United States Patent Application Publication US 2008/0114160 A1 - sequence listing, part 45

SEQ ID NO: 10932 - DNA, 19974 bp, Oryza sativa
cttgtggcctttctaccctgtcatagtgtacaagatcatcagaacataggctaaaaaaacacatatgacagctaaatttacttcaccgcaaacttaactgggaaagagtcaaacaagagtagctttaaatacatcatagaagcatcttagcccataactaaaaaggtggatactatataggagcatcttagcccataactattaagacggatactatatagaagcatcttagctcataattgttgcgatggatactatactctacaggtacctttttacaccataaattgattcaaatgcctctgcagcatttagttcttcttcattcttttcaacaacatgcaataggtcacttctcacacgcattaattgctgtacggtatcaaactggatcttcaaatatttcctcttcaaaccagaaaggtggtttttctgaaacacaaagagagagttataattaccttccagaattggcccaatcaaatctagataataaaaaatggcatatgaataagaacattggcacattggtgaaaccagtctattcaaagctttcagggaccacccaacccatgaatcttactctaccataacaagtgttagtctctctactatataaaagaagctagtggtggcggtcgctatgcattcctccaccacctttgagctggttggatctcccgaggataataagtatatcatttgtgtatgtcgtttgtaagcctgtgcttgtaataatgttattatggattgatattgtttgttacaaattagataagttttcttctaggatttaaataaaaatttgaagataaacatataatatgtttatttgagattcaatgaaatgcatgggtatttgacaagttagagtgttacttctagtcaaagtcaaaagctccatatggatccatactagagtccagctgtaatcctaagtactatttgttggaaaattaatttgttttcttgagaagaagtcaaatttaatttgactaaggtaaaatgcatgtagactaagtgaattgcttcaagatttcactagaactaactagaacatgcaagtactagaggattggtgatcagctatctgtataaaacctatgtcagcatgcatggagtaatcaaaatggaaatttactagctagcggtgtataggttggagctatgttgtgtttcaaagagaaagaaggaacttcactactaattagttccaatattatgtagcatagctagttttgagctgttagatgagttgtaacatgagctgtaatattgtgtaactgtagcaggtcggttactgtagaaaccaagttaaaagtcctatagaaagacatatatccctatgtaacaaaggtcttgggcatgccagtgagatcagtgaaaatgtagctcctttgctatactcttttctcttgctctctgttcatgctatgagtgaatgtctatcctagttttagagccaacactattaatagagtggggttccaagtacaacactaaattattttcccaaattcctacatggtatcaaaggtgggtcccaaccctaactcaccataaagtttcagcccctttcactaaaaatgaagtttcaaccccacaagtcatcattgtcaactttctgccaaactcttaaccatcgttgtccatgacatacttctcaaccaggttactggtggctcccagcatgaattgcttgtcactgacattgatgtggttaggtcatacccaaccaccacaatgtaatgtgggagcaggtcaccacagctgtaacatgctagaccaagtcaccaagcacagcaagcaggagatcaagtcagctgctactgcttgatttttggcctaatctgtcggccctggtttttaaaaagatcaagattttacgtattattattatcaggattttcaggatgttacaaaatcctccatagagacatgtgctctgtggcggagactggggatggttgatgctgttggtttgaactgttcacaggaaagctgtgcagcctcatcagttattgctttacccaagagggagaaagaggaatagacaggaagggaaggatctgtgctccatgatgttctgatagtgctacttgttagatcaggtgaagtcaattgaggacatgtaatgtgctttgctgttcccagtgtatggtattatctgcgttgctatttggtgcttgatcatattggtttgtgatactatggccagtactatcatgggaatgaatgattgatgcttagcagatcgtcaagattgtgggagacatgcagaaaaatatgttcatggtggtgaacttggcattggaggtgaagccctactggtggaagaatcgcatggccaagtaccagaggttatggtcatatgatggaagttataaatataatggtgatggtagagatgcagagcaggtgtaggtgcttaaacaggagtagaaaaccacttaggggaattgttgatgttaagttagagcctaatacgagtctgagtgcataatcttatgtgaatatgcattattgtccaattgtaatcctaagcactgtacatgaagtgtgtgggatcttaagggtgcaatggtgcatacatgatcattcttctacaacaaacagctaaggtaaaaggacaaaagaaatcacaggtgaagaactcttaacaagatcaaaactcttaaccatccaaatttatcacaacaatagcatttactgatgcaaagaaaatgtagtgaattaaacattcaaagcaaggcacatactagatcaagatcttctttctcaataatttctatgtcagcaatgtcgccttcataacgtcgcctgagatatgcctcgacttctaactccatcttatcctgcgacattttaaaattccaaaatatgatatctgaaaagaaacatcaagcaacggagaaactaaaagtcatcttatgattcaaacacaagctcaagctcaccttagtcgcagcataaaagtaagggggaaatttgtatttcactttaaatgtagaaccgtcctgcaagaaagcatacacgattagacgtgacaaatcaaaagttttttttttgccataactgcaatttacctgggacacgaagtataggtcaacacagctgtatatcttcccagtgtcctcatcctcccatgatgactgcaggtatttgaggtgaatcaagaaagtcacaaaaaggtagttgattacattttgcaaaacagtgagagattaacttaataatcttgtccaatttctacggatctgtccataacgtggatggaccaccaagcttaataggtgtatccattcagtgcgggcgttcattggttccaccagatatggcaacagcagcacagtttttatcatattgtcaagagattgtattggagaatcgtttaagaaacaacttctccatgatgtagctactttattttttttaccaaaaaaagaaacattataactgtgtcacaaattatcccacgagcatctagaagcgtcaaaggattgactgttgctattagttgcagtctgtgacagcatttgacaaacatcccccaccacacccacctggcaaatcaacgtgctagaccaacgttagcagcaactcaccaccggcattgctcagtgatttcacctactgcttactgaactaaaacaaaaggaggctcccgaatttcctggtctgcatactccgactgatcgacccatttctccagtcatattccacttcaaagtcagaagcaggtcccaacatttacaaagttatgccgctagtttccagatgacactcactcccaattcaagctagaaataatcccagagagagggcttaccggggagaaggtcaggagccatccgagccggcgctcgctgtcggtgtagggcgcaaagccaagcctgctctccaggagctcctccgctccgagccgcagccgctggtccttcgccgccgacgacccagaccttcaaccgccttccctttccccttccccttcttctccttcggccgacgggcttcggcggcgaccatcgccgccaccgccgccgcccatgctccccagcgcgcgcgcgcggtacgcggggcgcggggagaggaggagaatcgcctgcgccgctcggctctgcagcctccgctcgtgctgttgtgtgtgggggggaacggggagaaggaaggaaccctagatcagatttgggttttgggtggggcggcgaaatgaaatgggcgccaagtccggggcggcgaggcgggggttttcccgcgcgctgccaccgtctcatcattttgcatcccggtcccttggtttcgttgttttcaacttgggagcccagcccacggcccttggcaagactaggcccactttatgctttctagctggaggcccaatctactcaaggccttgtacatgatgggtcagatttttaagccttctcggggtcaataaatccataaggaaaaaagtatatttgactccctcgaccatgggccgagtatgattggagccctccaaccgagtatttcacatccctcaattatttaaaccggtacaaaacaactaccataataatattgtggggtggtttctggtcaacaagttgagtcagcacgggtttcaacaaccctggtcaacacggatgcgctcccccctcactctctcaatcgtgcatgcttccaaaccgactaaaaccctagacaagttggggcaaccagaaaggcgatgcagggggcggcaaggttgggctccgctctagggcttcgcagctgtcgttttggttggccggaactgaatatgtgcaggtacacctcatccctcccccattcattcccttcccattttgtcccctgcagcatgtggttttatcgatttgggtgtgatttctaccgagcttaaatttactaaaaaaaggagttgaaatgcattttatatgaatttctaaagttcagcttatctaaaactaatcattttgtagatagtatttttaggggcatttgatgtgaagtacgtatactattttattttactttatagaagaacataagttggtggatctatagaaactgagtttgttccaaaatgacttaaattgaattctctatgcattttataagtttgtgcaagccttatgtgtgatttagtttagatgagttttagaggcaaaatttgtactgtgagtgccaagtttttattccataacattaaagttcataatttgatgagttcacagaaatttgatttactctaaaatgtgttgttttcaatttgttatggtttttagaagtttacatgtttttctgttgaaaatataaaagctttaggtacttcatttagattttttccaaattttaaataggttgggtccacaggtcagtgagaccaatatgcaaaaaggttcctaggtttgaaccaagccacagttctaggcccatactccctccatactcgtaaaggaagtcgtttaggacaatgtttaagtcaaaccttaaaaatataaatcataaataactatcgagttgttgagtttgaaaatgtaaaaattatatgaatagatttgtcttgaaaaatacttttataaaaatatacatatatcactttttaataaatatttttatagaaataagaagtcaaagttgtattttgaaaaccgtgtcgcggtcctaaacgacttttatacggatcgagtatgtcattgagtggaaaggttagacattgagttgtttaaattctcaaaacaaagtcgtgtttccttctcccaccgtccgccgcctttcgtcccgatcctgttcggattctcctcgcttttatttatgtgttcggtttcgtggtttctccttctcctcgctcgcacagcttctccatggactcgcccgccggtacagatgatccacccccgttcgcagcctccggtcattactcattacggccacgcgatcgtcgtgctccaccctcaacaaacccacgcaagcgtccgcgcatatcgatccagaatgacgttattggcgatataggtgaggcgcgggggtatgcgcggccgatggggctggcggccgtgttggatcttgctctttccccttccccttcatcggtgaatgcttttttttttccttggtaatactaggctgagtttgtttccttgttgactcctgtttcgacagatgctagatcggggaacggcggggcaatcttgctgctgtttgagacgccatcgggctttgcaattttctcttttgatgggatccgcctcatcgcaccaactgccatggaggcatgtgctcgttatccttccctttgttatatagactgatgtgctgcattttggtcatggatctgattttaaatttgatttctctctgcaggatatctggcaaaactttgccatggaatatagggcaaaatttgtaagtcctttcgtttccttctgattatatattttttctatgggttgctcgtccgtgactcgacttatttattttgcattgaatggatggattttaccataacatcattgttcatcagttatttccttgcctttttaaactctgaaaagtgcataagtttagaacaacaacaacaaatgagaagaaaaagaaaaacaaagaaagattaacggcatgtagtcactaaatccatctgaccagccctggggcaaatgagattctatcttcctcacttctctgcatcttcaaactcgtctctacctttatctgatgttccaatgtttgggttgatttattctcaccttgcctgaactatccttagccaggccacaatgccttccagcttgaagtagagcacagaaattgagctcagcaacagagggaatgaaggcactgtgcttccctccagacagctcctagagcatagccgatttcaaataggtcctgtagtagtagcccagacagttgcatagcttgccttcagcagtggctgcaagggaccattgtagagcatgacagttgtgtagtttcttccaacgatagataatctagtctgacctttgattgaaaatatcatgagaaaaggatcattaccattggatttgactccaatcctgcgattctagtcgaacttgttaaagaaaccaaccaatttcacctgcttccctggtagattctcagactaggatcaacactatgccaatccataagccatgtagccaacaaattaggaacttggtttagcttgcttaggaatagcagccgcatgattgatcttgatggacctttaccatcaacatatcatcggtcttaccgattctcttccaggttgtgggataggttgcaccctgaccagcatttcctgctcttcatctggagcatatgttcgtgcctccacttgaaactgcaaggtggtggggatagtgatcaaccaagtgtattccgaccctgcctagcctcctagaagcccagttaaggttcaaatcttgtgatgttctacgccaccattggagggccaaatcagatttggtggcattcaaatattgccattctggattgatattaagttaaaagttggagtaccgcatgatttatatttttctaactgacgaaatcaatagaatgtttgtaaagcatgttcctaaaagcatggtaacaaaaaggtttcttaaaagtcgattggagcaaggtgaaacctataggggcatttggtacgcaccactttgaaaccaaagagcaccacatttttgaaacatgtcacattagcccatggtcttaattctgaattgaaccgcaacaatttgatagatgaacacttaaagctcccaattgtatcagattgagatgcattacattgcatcaaacatatattgctaactgataattgttttttcccgccattaacatgctcatccctgtttgtttctttatcaggtagtttggcgtcttgcttttcaagtttttacagacaagtctctggcaattaactgtgatactggtgtggacgatcagcttaatctcatgataacaaagtaccaccgcaaaggggggaaaatagctgttgggaaacccgaatataaaacaatcatagaagcaaacctggttagtgcaagctccctactttgttgcatcatttgttctgagctgcattttttatttgttgcatcatttgttctgagctgcattttttatttacattattttcagggtatttcctgtctgtatgatgaatttgtgatggaggtgatgtggggtttgacgaatcttatgcatagtttagtccctgaagaaaactctcagctgagtaaggaggaccgtctccagatgagtcaaggattaaaaatgctcctgaatcgttatggatttgatgtcaaaccagggatggtgagcttactactagttacactcttatagtttgttcattgtgcatttgaaaccttcatttaccgttggtgttaatttttatataaaagttttcatttgagtttttccctattactgacgaaatgataccctttgtttccaggttaacaaacgtattcttgaggcagcatctgacttgtatgattgtgatgattgtgagaagaaaaataattggtccttgcgtcgtgctggtcggaaccttatggatatctctagcattaacagtgaggattggggcctgttgaaactttctacagctctgatgatagtatgttaccctgaagaaaagatcatagcatgcttgctgaaacattctacagatttgctgatagcatcttaccctagaagggaagttatagaatacagtcaaaaggtaaatcgtaattatttttttgttgtgttccagcacatctgatggtaacttttcattcaactaatgggccaaagcattttaatttcagatgttttcaccagatgtgctatctaagctggtaactgatgcaccaaaatatggcatttggataaaaaagcgcacttccaagagaatccatgaagaaatggtatttttgtatcaacaaaggattgaaaagcgaaagctcttggccaccttgataggggaggctacaaaggtttatgaagctgaacaagcggaattgctgacaaactagaagtgaccacaggtattctgaagctgctatctatgcccaagatgacttccagtgatttccagaccaccacttcttttgtgttttgtttatctcaagttaaatttgggaattactgatatgatcagtgtactgtttggtttctactttagacaagttagactgtgcttctccaagctgctatttgttttggttttggtagtattggtttctactttagacaagtcagactgtgtttctccaagctgctatttgttttggttttggtagtactagctgaagcgcacaatgccgcgctgcccggatcaattgaagtccagtatatatatactatttaccaatggcattcgtcttcattcatgttttggtctatatcccataaactatcattataaaaaaaaattggcacataaaaaacatatagtatatagtctaaaggaccaaactaaaagtatagaaagtttgaataaaaagtaaaggaggtaaattacgtgtcaatgacaatgagagtttacagaggtattgtaggatcgtaaatggcatttcccaccccaaaaactagctattgatttgtccttccacaatcaatgtgggactattcaacaatcttctccttcacacattggtaagggcctttctcaccccttcacacattggtaagggcctttcccaccccaaaagctagctattgatttgcccttccacaaccaatgtggaactattcgacaatctccccctccttccacaaccaatgtggaactattcgacaatctcccccttcacacattggtgtccctcagcccttcaccgtatacgggcccccacacccacggtccattaggtatacgggctccgcaggcacctacgatccatcaggccttcacacattgtgtccattgggccagagatgttaacctagccaggctctgataccaattgtaggatcgtaaatggcctttcccaccccaaaagctagccattgaggtgaggggctcccccacttatatcttaggtcctttgcccttccataaccaatgtgggactattcaacaatcttttgggtgctacccttttttctttgtatgcttgggtgatgtttggttggtgggatggaatgggttgggacagggcgaacccgtttttccgttagatgggatgagatgatcctgttagatgaaacttccccttatatccgggtcgaggctgtccgacaaattcgagcggacgaacttgtcccacatgggatgggcgcacagcgtgagccccgttgctacattggatccgacgcaggggatctccggatccgtcgtgcgggctctggtcgactcgctccgccctcacggtcgtcgagcaactcgaagtaggagagcatcgtgttgaggagcttgtgcctgactgcgatggtggccgctatcggggccgaggccgacaacaccctcctcggcgcagcggacaagacacaagcgcggaggtggggcctgacggcgacgcggccgcgggaggcgaaggagagggagagggagccagggggagggggaggacaagaggaggctgtcacacccggagttttccccttttccgtagtttctaaatcattaataaatcgtctatagaaattactttggttaaccaggaggaaatccaaattaacaatgcattaaacaatcggaattgttggggagaaattttttcgaattctctttgctctaaaatcattaacaggacttaaagcggaatattcagagcaccggaggcaatgtggttaatttaatttgtcaaattttgagttaataataattcttcttttcgcctttggtcatgaatcttgcccgattcactcccctctctgtccgcggttttgttttgcatggcgaaccgtatttgttttcattcgcgggggcgtttctgttcttttcctaaaacagcaccgcatttgtttttctttttgggaaagtccttatcctaatccctttctttttttccccctctctccccccgcgtgcccctccccctagccggccgaaccgcctctctccccttctcccaatccgagtcccagtaggtcccacctaatccatctatttttgccccctataaaagtattcataccccctctattttccttgttttcccacatagttgcaaaacccaaaccctagccatcggccgtccctcccctgtcgtcgtcgctagtcgacgctgtcccgccgccactcgtcagtgcccccgccatcgccgccgttgcatcgccggtactctgttctcccttcccatggatgttttagttgttgcaaacatcaattcatctatctaatcttttccgttcaatcctatctagcgtcgtcgtcgtcgatcctgagctcgccgccagaaccgccgccgccatcatctcctctccggtgaggcttctgtcttgtttttagggctagttgttccttcacttttgttggcttgcgccgccgtgtcgttgccgtgccgctaccctagccctagccgccgcaggtagccaccgttgacgctgcctcgttccgcctagccgccgctgccactgccgtgccgccgcccagctgccactgccgtgtcgctgcctagccgtcactgctgtgccaccgttgccgccaccgtgccgcaccgctgccaagccgagccgagccgccctacccgtgtgccgacgtcttgccgtgccgctaagccgctagccgctgttcgttcgtagtttgaccgaagctttagttcattcggtcgttcaagtcattctttagtttagaaccgtcctgagccaccggtttggttgaccgtttggatggtcccgtgacacgatgagttggtatctcgtgaggcttgcttatcgatgttaatttcccctttgatctattttatctttgggcaataatatgtaataaatgactaaggtttttcggttactagtaataacacagttcatcttgtaaattcatatctaaatattctgagctccgttttaacccgttcaaattgcagtgaattcgttaaaatgtatagaatccattaaaattggtttcttttgatattttagtagccttattatgtgtattgcttgtgtgctttgtgtgtcatttagattccggctgttccgatgctccagtttattttgaagtggtcgccgaggttccgtcagttcaagagcaaggcaagtcatacatacatcattgatcatattgagcctattttacaaaatcccctcctttctattaaattgcattgggtttagaatgtttctattattctcagcctgttgattatatcatgccattgacagcttgggttataattgactagatgattggtttaggaatgcttagccatgcttagaccaattagctcacaatgggattcattataatttagtccttaattatgttatgatgtaccaccatggttctggtttaattaaactaaaatatgctttaatggtgggttgtgggtacaatgcatgattgattttggaagtcgtgcacatgacaattaaggaccggttctcgggaatccctgaaagatatactcgtattgaccacaggccagatgggctccaggctaaatctaaagtataatattttctagttaacataccatggcaagggtgggcgtgatggagtatggatggaccgggaagcggtctatgctgctttcggatttacctaggcacgagaggggactgcccactgcctgtttaggggtggggtgaaacctgaggtgagtatgttggttaggggaggttatatggagggttttgtcacgatttccccctttgcagtatcacggtgatacttcggggcatgtaacatgtgtagaatcgtgtcttgtgggtaaagctgtacatatctgatcagagtaaaactatttgaatagccgtgcccgcggttattgggcggtcaaccagctcaccgtgattagtctcatcttaataatttgacttaatgaactggtgtagttcatgtggttttgattgggcctattgcaacgtggttttagcgttgaacagtgttcatgttaatactacctaattatatactgtttttactgctttcaaattatgatttataaatgctacttttactacaaattatcctatgagccattcatttgaatatccttgcatcatgcctccccgttgatatgacttgttgagtacgggggttgtactcgatcttactttatttctccctcaccacagaagtagagattggtttagatggtaagttctctaaggattgagcttgttccagacgtcaaggttttgcctgtggattatggagaaaacttcgcttttgccgagaagattaagtctagttcttttgtttttccgctgcgtttgtgagtttattttatatagtcgtggaattgtatcaaattgtcgtttgtgtactttggctggtcctggatagaagtttaatacacattcagcttgaaattcgagttgtagaatttctggatgtgacagaggctcttcccggcagccgcgatggcggagagggaggtgaggacagaggcggcggtggccatggttgctcctcctgctcacttactcacgccgctcctccaccttctcgtcgccggtttgcttgctcgcccgccgggctgtagtcgcgctgcttcgccttgtcaactatcgtcagtagttgcaaacggcgtccatcccatccctccctcatcccttcaaccaaacaaaaaactaggatcgtcctatcctacaatccaatcacgcgagtggaatcatcccaaccataaaattagggatggtttcatcacatcccatctagtcccagaaccaaacacacggtagaatcgcactgaaaaatgctaaaaacagaagacctacatgccaactggtggttcatattaaatgcatgcacaactaaaataaacaggtagaaactgatcttttcaagtgcaacatgcagatgccctacctccatcgtactacctccatccagattgaagttttgtactgtttatatctaacgtttaaccattagtcttatttgaaacattttatgattaaggcctaaggggcggcggcgaggtggcgctctccaggtgcgacgtgcaatggcggcgctggggaaaacggccagcttggcggtgccctgtttggagatgtgagagggaaaagtgatgtttctctaagctctaaaaggtggtggtttggttgatggaagagaggtgcctgacatgtggggccctgcttgccacgtcaatagaaaccgcttttaaaaccaccgaaggagtcaatttacactggtttttaaaaatgggggaggcgttatatctgattctgtgattgagggagaatttaatcacaagcaatagttaagggaggcaaaatggacttattcctacaataagtaatgtataagtggcattttaaaattgttatatcatatttgtatttaggtgaaggagatatgtggagagagaagaaaagcaaattatagatctgtagttaggtacaacatgacatccaagagatcgacactatgtgtgtgtgagaattgagatatgccaggtagtaattgaccatactttttaattcgctataatcatcatctttgcctgcccatgttttggcgaatttggcttctcatacccattaattcctacttaataccacaaagggggcggggattctggagtatcttgttatatttttcagaccatcatatagaagacacgcaccatgctttgtgacatttcttataataatagtcaagttgttgaagtagaataacgccgccacacattaagcatgtgatgtgcaacccacggtagcacccggaaacacgccgccatagggagtgggtagatgccgcctaacgaacacccgggagggaccccatcaaggtgaacgagcgtcggtttattctagactcggcaggctagctaggtgttgacgaccaaatttggtaagatgtgaaccaggttcgacattgggatcgaagcggattcgataaagagatcgattcgaagaacagagcgtgaatcggctgcgaaggcatcggctggagtctacatcggctgagatggatcggacagaggatagccgatacagccgatggaggtgatgcagctgattccgatgaagacggtttcgaagctgtttccagaatcgttcaaagtgcttcatgaggattgccatgatggagataaagctctcggataaggcaattgtatctattagttaggatatttcatgtaatttccttagagatatgtttggacaaaagtctgccgcaaaggcttatggtatcttagagtttgttagagataagtgtcgtgtccggcaaggacatattttgtatctcgggtataaatatgacccgaacccatgtaatcaattaacaatcgttcaatacaatctcggcgcatcgccaccctttttactttcgtttatttcgatgagttcttgctttcgggttgagctgcatcgattcgatcttcaactagaggtaaaacttgttatggcggcttgcgttatcggggttaatgcttccatctttatgatactttaaccctgttcatgtaatccgtcgagttatcatatacatgctgcaatctatactagttgtgctatataacttgttatcggctagttcttattgttaggaaacaattggtagagttatgttttgttattaatctagattgtatcgtgtatccaccatctcttgcagattttgatcatcttgcttagatctcatatttgtctttatgcttaatgctgcatcggttgagttcgatctattaagtagtttttataattatgatatctggcttgttttataatcatcaagagagatagtattgaggtttcagccgattttacctgatttagctttatgtcttatatgcttaattgatatgctaaatctgccctttatattaagatcttgttacaataaagtatattaggcttctgtgtggtatattctatctgttttaatatcttaatatagagtggtatcggagtatttgccaatacatgctaaatctatctgatcggctatgctataagcgtttataatctttatgttaatatatatttcgacctaaatgatttatactgtctcggcatggcgaccaatctatcccaatcacttgatctaaatatacatcgacatactgattatatagcgttaatatctacagccgatcgaatagatttagtcttatcttgcttattcatagctgccgatcgattcacatcgtcttgaagataaatgatatgccatcggcgactagccgatcggctatcgtttatggatttaaccgcggttttttttgtctttgtttcttgttgtttgcaggttcaaatcaactggcacgctcataaacctaaaggcaagattttggatctgtactgaagttaagtagatcttcctagccagtgtgtgtttttcgcttcaacactagggcgtcctctaacaccgtagagatgagagacgacgagcaattggtggatttgagaacgataaacttgggataggtagcaagaatgagtgagatgtagaatatataagaaggtttggatactaaattgattttgacgattgattggttgttgtttcaatcggacttagaccccttatatttataggagggtggacttacttctgagggtttttttcatatccaattaggtgtggaaaccagttaggactctaaaaatctcaggcctaagcaagaaaaatcgagcaccacaaatcagacttggagtcagactatgtcagtttgactggccaaatgtcgttggtggctagtcagaccggtctcgcgtggcaactggcaagtctgggttatttccaaattggactgtagttttctttttcatttgagcattttcacgaatataatcatctccaatttgtgaagcatatatactgcaggaacacatgtcaacagcttggtggcgacaatacttgcccaaactttgtacccaactagttgaaatccttaaccaatttttaccgtagaaattaacaaagctggacgcctaggagattacaggagcaagaagagctcgtccaattccagtgtccatctcaaaaaggaaaactccaatttgtgctactagctaagtgcaattgatggtctgattttaacttagttgatcacaaacagttctggagggtgctccactgcttcccccttcttttttccaaaaccaaaaacaatatcagaagtttgaaattacccagcactaacacggtgcagtactggggtttacatatgatacactctgcactagctaattcattttcgcttctgccgttttgacgacgagctgatgatagagtgggtgacagtgcttgctaggctagctaagcactagcagtggacctgcgagcttacgagggggaagtcgaagggcgtcatccaggcgtaggtgaagcgcacgggcggcgcgccgcggcggatgactcggccaccgcggagcacgcagcgctcgtcatcgacggggcggatggcgcgcgggtccaccgactcgacgctgctgagcccgtagcatcgcagcaccaccctcgactgcgcgcaccggcaccggttcgccacctccaccgcgtactccggcttcccctccaccacccgccccgtcgccctctgcctcaccaccaaatccgccgccctgcacgccgccgccgccgccgccccttcgcctgcacgcccacaattcgtttatattagcactgcaatgacaatgcagcaactatcaagtgccaagtaatgctagtactataattagcaatttcaatcaccttggctggcgtcgcagaggagggcgagggagacgaagacgaaggccgccgccgccgccgctctcgccatggtcagccgaactgctgtgagtgtgaggtgatacggttttgatttctcgcgagaaggcctcagcttatttgtacccactacccggatgcagagacatggatggatcgatcgatcgattacgcttgttggataagggaggcagggcacggcaggacagcgagaggaaggaatgggttgtcgtgcgtggcgcatgcatgtcatgtggcagggccagacgacgacgacggtgaacggtcagatgtccagcgcgatcacgcatgtgatcgatcgtctgcatgattgacgatcgcgcgcgtcgcagtctcgcaagagggctggctcggtttcgcctgtagcaaacggctcataggttactgccgtagtagtactagtatatactcactggcactcttgcaggtgtcagctagcaacgggcggcgcggtttattatgctactactagtaagtgtaaagctcaaacttggtagctataaacttgaattgagacgatacatgtaaacgataattttgcaacctagctacagtagataggaaaacatggtgtacgattggcttgattgccaatgcatgaacacagaatcacgataatttttcttcctctcttttgatctttctgttaatttttttttctttttgagatggagtgccctggccatcgtgaaccatgaatccatgatcgctgtcgggaactcgggatgatcggcgccaagtgatgatagatttgctctgttttttcttttgcgacgagtttgagttcacgcggcgtgcatgtgggaaccaggacgcatgtgcctgagtgcctcccaggggcgaagccaggataggttgtcaccggggtcactattaattaacgatcctaacaattggctatagcttctaataattttaaggttattgttgtagtagtggttaccttttacatatcagggggtgtttagattaggggtgtaaagttttggcatgtcacatcggatattatatagggtatcacatggggtgatcgggcactaatataaaaaattaattacataatccgtcagtaaacaacgagacgaatttattaagcctaattaatctgtcattagaaagtgtctaccgtagcacaacattatcaaatcatggagcaattaggcttaaaagattcgtctcacaaattagtcgcaatatgtgcaattagttaatttttagcctatatttaatacttcatgcaggtgttaaacgttcgatgtgatatggtgtaaattttttgtgtaggaactaaacagggactcaattacaaccacatcgttattgtactagattactatatttgggaaaagaatataacaacctcttatatggtgaaaatcacctttgttatattcccccggctcatgcctcatgatcatgtaactgaacttgaaaaatcaaacgtttatatttcaaaactctaatttcctcaaattcagacttaagagactaggttcaaccaaattgtgatgataatcaagaaataataataggattagttggctactggagcaattaatcctaaataagggtcactttatgagcgccagtctaaaacgtatatatatatctatgtagactgacatataatcacaattgctaactaattttctatttgctagctgataatagtatcgtttcttgccaccagttgagctttaacgaaacaatcatcggggtctagtgttttctttgaccggtcatagctgtaaaatagaaaggagtataagggactcggaagaaatcatcggggtcaactgaccccaataacttgctatagcttcgcccctggtgcctcctttctcgtctacaggcctggtttttctaggaccttttttcgccatcaacatgtgcgtttttcttgtcactgtccccttcttttgtttttttttttggcagcacggctccagattatgtgcacagggtgcttattcacacatctcactggatgggttgcccatttgcccgtcatcaggaaatttccagatcggttacattgtatcgtttcctaacaaaggttgcatatttgttgcgacgtttggaaagtcaaacaatttgaagcaaatcgactcagatcctgtttcatt

SEQ ID NO: 10933 - DNA, 742 bp, Oryza sativa
atttttctatctataccacaggtaaccttttatgagaactttgtaaataggtaatgcagtatccagtctagcttttgcaatggattgttatttttatactctggaatactatggtactattgtccatttcttttctttattgacattctatgtactttgagttcatttattcaagcgctattattacagagtcaaatactagttcttttgtatgctctctgggtcccaagattgctcttcctagcagttatttgtgataattaatccatgtttatgctcctaaatgtatggtagaataagcataagttactcctacctgtattttactaaccaatatttgaaaccttgactgcactcatacttgatatatggttgttttgatttggaaactgatctatggattctcttatttccagcttgtcagaaggaaggggtgtatatgtcatgtacttccctacatctttcagaatacatgcagtggttgtcaatccgttccgcaataaagagctatcgccatcatttcttgaaaagcaatatcgagatgcttgtcaagctcttggctctttgcatgaaaacatcactttccttgtaagaatgaattatcgtatctgaataaaaaaaaattgcacgtgctggtttagcatgctaacttctgactatttgattccttccataggtggattaccacacatcaattgatgcaggtagcaagcatgggcaaaaaatgttacttgaaaacagg

SEQ ID NO: 10934 - DNA, 546 bp, Oryza sativa
ggagaaggcgcgcgggccgcgggagaggaaagaagacttgggccgaaaaggggcccaaagagaggaagggggaaattttatttgttttctttttattttaattggttaaatgatcttcgtgactttaaaactatttctcgagctccgaaaattcacggaaaattccggagagtacattagggcacaaagaatattacaaaatattcccggccaatgatttttaagggaaaattttaattctcccattatttcacttgattaaattgcttaactttttattcaatttctaggaaatgcattattaaatgatttttaatcccgaacgaaaatcggggcgttacagtttcgttgcagccttagaagcgaagcccactctaattgatcaagttagagaagcccaaattaatgatcctgatattcaagagatcaagaagaatatgagaagaggaaaagctattggtttcttggaggatgagcaaggaactgtatggttgggtgaaagaatttgtgtccctgacaacaaagatttgaaaaaaaccattctga

SEQ ID NO: 10935 - DNA, 797 bp, Oryza sativa
ccgaggaggagagagcagcagccgaccacgccaccttgctttgcgctgctacctccaccaaattaatacccccccccccctccttccacttcactcccactcccatccccatcaccaccttccccctcgtctctctcactctctcctcgccatggcgctccacctcttcctcctcctcctcctcgcggcgagcctcgccctcgccaatgccgccccgccgcccaacgacgagggcgccaccaccatcgtgctcaaggacggcaccacctgcaagctctgcgcctcctgcgacaacccctgcaacccctcctactacccgccacccccgccgccggtcgtcacccccacgccgcagtgcccgccgccaccttcctacccctccggcggaggcggtggcggaggcggaggcaccgtcatgtacacctcgccgccacctccctacagcggcggtggaggcggcagcagcaccggcggtggaggcatctactaccccccgcccaccggtggaggcggcggcggcggtggcggctggcagcagggcggtggaggaggcggcgcctacccgacaccgccgccgcccaacccgttcctcccctacttcccattctactactacagcccgccgccgccgttctactccagcggctcgtctgtcgccggcgtgtcggccatttcgtcggcggcggcggcgacattcacgctgctcctcactgggctcctactgtggtgagaactgagaatgggatagatctgctgagttaaacctatgtctttctttacactaggtgggtaatttg

SEQ ID NO: 10936 - DNA, 6921 bp, Oryza sativa
ccgactccgaacatcaggccacttagctggaagtcccttctcatcccaaccggtctgcaagtagtcaatagcccgcaacatacccgcatgacgatcatgtataaggcaaacgttgggcctcatacgcaccactgcaatgtgcactctctctaggaaccagtaccagctttcagtgttctcactctctacaaatgcaaaagccataggtagaacctggttgttcccatcacacccaattgctgtcaatatctgacctcggtatttacctgtcataaaagttccatctatgcatagaacaggtcgacaatgcacaaaagcattgatgcaagcacccaatgagaaaaaggctctttgcagcacactctttgttcgatcatcaaccgatgtaaatgtatgtaggtcatagtaagtattattattcctctgggcaatggtggctaacaaacgaggcaaattatcataagaagcttcaaatgtgccatacctcatctcaataatcttttgtttggctctccaggcctttgcatagcttatggtgtacttgaatttattctcgatgtgcctaataattgattttggtttaaagccaatgttaccaacaacactgctgtacatctcacttgccacaaaagcttaagtgatgtttcggtgatacttctccaccccttgtaagtagcacttgtgctcggtcacaatgctaactttccaataatcattccatttacccttatatgcatggacacgccacggacaatcttccttcatgcacctcacttcatacacataatttgttgacttgaccaccctaaactctctctgcaaggaaactgcccaatgcttcaccgcctccttcatctcatccttatgagcataccttgcaccctcaattacctcgttctccttatactcccagggtacatgatcaccctctgatataacaagtccagagaagtcctcatttgcccaatcagtggccattacatcaccttcctcatcggatgatgcgtcgtcgtccacttcctcattatccgaatcttccttctccatttcatcaacaattataccgactctctccccctcatccgccatgcccatggcctgctcctcccttggttgattttcctcattttgcatcgatggtccaacaacatcccttgcattgataggaccctctacatcttcggtttgcattgagacatttatatctttctcttgtaccgacacaaatataacgaggggccatgaccgttcaaaagccatttccacataccgtctccaagcagcagtgctgtccatcggcattagttcccaaaaataaccttctgttgcacgactcactacaactgatactgacattgtgtagacttcttggtctattctaaatcctctcaacaactaactataaattgactgaaatgttttctccgcaggcctatcgatacccttagatgtcattacaaaatctgacagatcaacaccatctggaccaaatctaatatttccttcaccatgaactatctgaaatgtgaccttatttgacattgtgcctgatgaaaacaataactgcgttaacctcgcatttctgtactacgccctaagttacattctctacaatattgttctccaaaattctaaaagtaggttacattctccagatcaaactaaactacatcttacaattaacactactgtctatgtctcaatttatactattatattctatgctctggatctacacatatgtgctgtgtgctacagatatgctaaaatatatggaactaaaactaaaacgcaatatatatactcaaacataacatattagtacaaatgcaaaagatgtatgggagcaaacctgtgatgaagtgagcgaaccagcagggcttcgccgctccccttctgctgccctctcctctctctctttcgttttttttggatttttagtgaatataatgaaatttcagagaggggggactgggctttataggggggaggcaaaaatcgccctcccccagggcggcaagggggccgcctgcaaattcccatgccccctcgccgcccatttgcaggcggccccccgcacagtacaaaatcgccctagcggagggcggcaagggggccgcctgcaaatttcgttaacggccgtcgcccgagagcgaacggccatccgccacgtcattttcgccgccctctgggatggcgatttttaaaaatcgccctcccagagggcggtaggcgactacttccgtcaattttcaaaatggaaaattatttttgtataacttttaataaaaaaattaaaaataaaaaaattcggtaaaagagcagtagtgaatggaccatatttctatctggcccacaacttcatgttggaccatatggtaggtggagatacaagttaaaggcccattccgtgtcatttatctattggctgttgggttataactgcaggataaatgtatatcatgatatatcatgacgtcaccagacctgaaggacttcttttcgtcgctactcccccagtaaaaaaaatcaatctaaaaggggacaaatctaaatttgttgtcttacaagaggttaggttgagttttttttttgaacggagggagtggttattttggcagatttgttcagtactcgtattttcttttaagagagaaggcattattcgtgtttgatgggtttatcaatgcggcaccaaatggattgacacatacgctcaggcaggcaggcacataacaactgacgtgcacggttgtactactaccatataaatgaaccatgctcttccaagtaccaaataacccgtacagccgtagtattaataattcgtgtaccgcgctgggaccagtgtatggaccatggtggaaagaacttggcctcaacggctcatcgcctactcgttggtttatcgccggtcagggttataatttatttttttattatagttttatttactatattgactaattagatttcttgtggtgaaaccagtccgtcgggttatcctaaacttagtccgtcgggttatcctaaacttagtttgagtgctcgttttttttactggaaatactgccagggctttagcccagcagtgtgattttcatttattaataaaacatttacaaaatgttacaagaaagaggagaaaaccatataaagtttataaccaattaacaacagattatttaagggggtccttcattctgcagagatgcagaagaattttatttataaagagagacttccaagactgaaaggttggctgcatattcctgaaaatgaggccattatgttgcttccggatgagccaagaagaagatctccagaaaaccaggctgattgaagtgctgagtgctcgtatttatgactaattatctttaaataataggtgacatacccgtcgacaacgagacaccaatgatatctttgttaatctcaaaatatgccagcgcagtctttcaaaggtgatcatagggttaggtgtgcgtgtatgcccctcattggggtgagtgcgcgcgttgtgaacgtctgcatttgtcctgtgttttaaaagaacaattataggacaaaaacatgagggataagtcaattttacacctcttaagtattacgtttgtttaaaatacacccctaaatattaaaaccaggtagttgacacctttcaactatcaaacgattattttacatccctaaaccaaactagagtggtttttatccactgaaactgtatgcagttgaaccaaggaagaaaagagtgggactcacctattagtgaccccttcttccaccctttccctgtctttttcttgtttctcctgatctctcctctctctttctgctaacgcactcaccagccgtcgctagtgggctcctccctgtgggctgccactagcctcctcctcgacagacgtcattgccgagctccttcttgtggctaaggcaagcttgagcgtctcctccagtaaactagcacatgcgactgcaagctcaaacttgagttgtgactcctcaacccctatgccgcagtgacggatgaagaaccccttaccgagcgccccccctgccgatgtcctcctactgtcattgctcccatccctttgcagggagcttgggtaggagacagtcagcgagttcgacgaggagaggacagtggagcttgagtaggaggtaacaacataagcattgtgaagcagagaatcgaagcattgcaccttggcctcatcgacatcaaggaggtgacactcccaaatctcaactagacgccacaatattcagatgctgtggagggtagagcttgggtaggaggtcgccaccggagctctgctctgctccgagcttggccaaggagggcaggctcatcgttaccccaccttttctcgacctcggtcaaaagagggcgggcttccgtcgacctcgttgtcggccacctcttccctcgagccatgccaaaggggcaggttgcttgtcaaactcgctgtcgacctcattttcttcgagttcgctgagggtaaactccatgttgtcgtcgttggcgggagagcggagggaggaaggaggaagaagaagaaggcggcgcgcgggaaggggtaaatagtgtacccaaggcccaggctagccatctcgaaccaatccagccagcaagacgccgtcatctttcctcacgcccgactcccatgcggccacaccttaattaccttagggtttagggtgaggatctatttagtctaaaaattaggttaggattttgttttgttctcgttgtttaatttgcttcgcaatttttaggttatcatgttaaaaatgttaatttgtgccattttagatggtatatggtttataaagctataagtagacatttgctccacgcaaatactatgtctgattttttttatttgtcgttgattagattacagcgtcatataaaaaagatagagggtgtatatacatcaaaccgagtttatatgcggttggtcctcctacggcgagacatgtaatgtttaaccgttgcaaagggatcaagggtaatgcatggaaatcccgtaggttgttgtcggcgtcgctgtggcagtggcaccggccggtagcatatatctgtagtctgtaaatacggagtatatatttgttctctcctcgcatagcacgtagttagctcaatcctcggaggagtacaaatctacgataaatgtggcatgtttggtgctgctaggcaattcctcacccacccagagacgcaccaaaccaatcacgacacagaaaggacggcgcgaggtttaatcctgcacacgacacgacgacacggcgcgtcctgcctgcttcatggtcccccacgcattcgcgtctcccgtcatggagccctcgtgcccgcgcgcgagccgacgaacgcccacgcgcgcccacacggacacggaggcattgctgttcggtgaagacgacgacgacgacgacgatgacgaccgaattcgatcggctacgacggcccgcagacgccaccgcacggaatgaaggtggtcgatcggatcgcggcgcacaccgctcgccgttaatgcgagtcgactcagacacccaaccatcaccagccccggcctccacccttccttaaatgcgacgctatccgtgcacgctcctacaatgccgttttgtgcaaatgcacccctccttgtgtctgcatttgcgccctgttccgctccgatgtcctgtgcagtaggggtgtactagtggtacaagctaatactacttgctccatgtgctaattttgtgggtaatgctggttctttgagttactaaattagagcaagtagtatagttcactactagttccaaatcatctatagccaatgtaataatcaattcatacaatagttgtttactatagtattaagcaggtacaatagaaggctataagccagctgcaaacatattttaaagagataaatgaggagagagaagagcagcgggctacagatttgtagccagctgtagcacggactccaagacacagtgtgtctatgacaggtgggaccagctattaataatatagtactccctccattccaaaatataaggtacaaccactcttaacccaaagaccaagaaatagttattatcaccttgtagtttggatcatcctaataaatataatgcatgtagccaatagagttagagaatatgagggtgaaggatttaaaaaagtagtaatttaatggagaattgtcatagttaatgacatgtatgcatgtatgccttatattatgtaacatctaaaaaaagtggttgtgccttatattatggaatggagggagtatgtaactattgtatgaatcagctattagattggctatagatgaattgaagctagtagttggctatactattaaacttggtctaatatatactcccatctatcatatacacattacgtcttatagtctgtattgtagctgactacagatctatagcccgctgctcttctctttttttttatctctttaaaatatgtttatagctgacttgtagcctactattgtacctgctcttatgcgagctgatcccgttgtgacacatgtgttaacctgcttgtgtcatgaggaaattatggatcatctgtctgttatccatttctatgcggagatttcatcagcaaagtaccgatcacgcaatgaacaaccggtacagattgtacaaggaccttctaccgattcaatggatcggaaaaatgtgacgaccgtactttatttttcagcttataagctgatgtcagaatttatattttaaaacttaaatttagagttaatttttctagaattttcttttaaatcattaaggagatatataaattgttatttataaattatattttaatcgctactaattaagtgttatggtttataattagttataggcaaaatgataaaactattgctt

SEQ ID NO: 10937 - DNA, 3624 bp, Oryza sativa
ccgcctggaaaaattgattttcgcaggcggacggtgagctccaccccggtttacattttcctatatggacatttagctccgatggtcatatccgtctggaaaaaaaaaatctcccatcgtatgtgaaaatgctttttctagtagtaggtgtgttattgctaggccctgtttagttcgcgaaaagaaaaattttaggtatcatatcggacgtttgaccggatgttggaaggggtttttggacacgaatgaaaaaactaagttcataactcggctgaaaaccgcgagacgaatttattgagcctaattaatccgatattagcatatgtgggttactgtagcacttatagctaatcatagactaattaggcttaaaaggttcgtctcgcaatttctatgcaaactgtgtaattagtttttctttttaatgctacatgcatatgtcaaaagattcaatgtgatgtttttgaagaaaaaaattgggaactaaacatggccgttcggtttggcaaacagatggctgctgtggctgagctgtgcatacagttcgaggcggaatttcggccctcgtcgtcagggctctgagcatgttagagagcagcacgtcaagcaagcaaccgagcatcggtgaagcagctggagcgtgaagctcgccgttccgttggatatagggtgattttgttgcatgatattgtgcgttcaaaggaaggaggtttcatgtgggtaactatttgattgttccatattcacctaactaaacttgaacttcactatatagtttgtttcagattgtacatatgatttaattattacgaattcgtgatgatcggtctcatttttggaacaaaagagtgaccatcgccgtgtttagttccaaaatatttcttcaaactttcatcttttccatcacatcaaaacttttctacacacataaacttctaatttttccgtcacatcattccaatttcagccaaactttcaattttaacgtgaactaaacacagcccatacatgaaaaacaaaaatcaatactgtacataattcctgacagcagactgccagacttacacccagcacaccattgtcatcttcgctagcctactgcagtcggcttcggttgatgcattaaggctatgtttagttcacactaaaattggaagtttggttgaaattggaacgatgtaacggaaaagtttgaagtttatgtgtgtaggaaagttttgatgtgatggaaaagttagaagtttgaagaaaaactttagatctaaacacggtgtaaggctgtgtttgatacttgggttaggaacccaactccaccgcacggaaaacggagcggtctattagcgcgtgattaattaagtattagctttttttaaaaaatatattaatttgattttttaaagcaactttcgtatagaaactttttacaaaaagaaaacataccgttgagcaatttgaaaagcgtacgcgtgaaaaatgaaagagagtagttgggaaccttgtggaaaaagaacgcagcctaatctggatacgggccagcaaatccttcatcactgtctgctggatcggccggatcaaattgtaagcagtactcgactgtaactgcgctggccgcctggcctcttcaagatcaccgctactatatgcaaaaagtgacactcgaagagtatccaacgtcaacgtacgtataagttccgcgcatatatagcggagcagaaatggtagcaaggctagctgatagacgggtcgcctggatattttctccgtcgattggtacagtacacaggtgtgatacgtccgcagctgtgcacacacatcctctgccgcgctcgcagtagaacaaggggacgacgatcgacagtctcgttatttcggcgaactttcctgctcctccgatacgccgagggagtacacgctagcgacactaccggtgaaacattctgtcaggttggccaaaaaccataatattctcgatttgaataggaaccgagaccgactcaaaaacctaacggcactttttttattttcaaccggaactaaagattatttttagtcccggttcaaaatatgatagacgatatcagacccctctactatctttaatctcggttgttaaacaaccggggaaaaaatcagcaagttgccttgagccgcgcgctaaaaaaaaagcaaactgtcccaatctattctctccttatctcctctcctcctctcaaccttatctccttctcctcctctcctccccctcattctctcacccccatctcctcctccggccccctcccctctcctctcctcccctctggctccccttcagcgggcggcggtgcccgacatgcgacgacaggggtgataggtggtcgggcggcgacggcctgtgcagtgggtggccacggtggtgggatgggaggcggtgcacggcgggcggcgaccgacgcggccccgaagacgacggtgaaccgccggccgatcccttccctgcggcgaaggaggcgacgagcatttggatatgtgaatttgctgattttattgatttatctatgaatttgttgatttgtgatgtgtttggatctgtaaatttgtgatgtggtgttgacgtgaaaaaacacctaattttatccttaacatgtggatatggataattttgtgatgtttatatgaatttgttgatttgtggatgattttgtgatgttttctgaatgtgaatgattttattgttgagtttggttagaaatcaatatgcaaaaaaaaatgaaaaaaattagtttcggtaggtgattttaaccgggactaaagatcgcttcgtagctccgatttgctacccaaaactattagggttgtaaacggggtgtgcagactgcagagggtttgtgcaggagtggacgacggacgtaagaaaccgccccatgtcccaaccccccccccccccctcccgcggtgaaattttcccgcgaaattacggcgagtcaagtcgccccagggccccggctcccaagtcaagtttggttagctcccagctcatccttaatgcagtcctccccactaagcagacttaatttatctaaaatatataacggtttgactatcctttatatgcgtagccaccatcattgtggcggtattccggttgtccgccattcccaaggcgcaagactttgcgtctaccgtcgtcgtctccatctccgtctccgatcaggctaggcggcggccgaaacaggagctaggcttaatgtacgagaagacagtaggtacatcatcgtggcagagcagtttactctgtcctccataccatatcttgttcaccgttcgttcattcatatttatgttttcttggtatgattatttcgtatcatcggtgatttgggtttggagatttggtctaaccgcatgtacatcttatgtggtatgggcatatatcacgagaaattggtttggtagccgatcgaataccgatcaggatttacgattcggagatggccttccgtttcgggctctggcggaacgacggttttcgtgaaatccgggctctggcggaatgacggttttcgtgaaatccggtggaaagccggtagtatgaacaattttcataaactaaaatttgaatacaaattccttaagtttaacgat

SEQ ID NO: 10938 - DNA, 714 bp, Oryza sativa
cttatgataatttgcctcgtttgttagccaccattgcccagaggaataataatacttactatgacctacatacatttacatcgggtgatgatcgaacaaagagtgtgctgcaaagagcatttttctcattgggtgcttgcatcaatgcttttgtgcattgtcgacctgttctatgcatagatggaacttttatgacaggtaaataccgaggtcagatattgacagcaattgggtgtgatgggaacaaccaggttctacctatggcttttgcatttgtagagagtgagaacactgaaagctggtactggttcctagagagagtgcacattgcagtggtgcgtatgaggcccaacgtttgccttatacatgatcgtcatgcgggtatgttgcgggctattgactacttgcagaacggttgggatgagaagggacttccagctaagtggcctgatgttcggagtcggtggtgcatgcgtcacatgggtgcaaatttctacaagcaattcaagaacaagcatcttatggagctctttaagaggctctgtgcacagaaccaagagaagaaatttaatgagttgtgggacaagttggatgagttgacaaccaagcaaacagatgagcaatctcgcagaccacaagttgaaggtgacgagccctccatacctcttggggcattacatgatgacccaccaacaatgagaaggaggtcagggt

SEQ ID NO: 10939 - DNA, 544 bp, Oryza sativa
ttacatctttggatcttctaacagcggaaatacatccaatgtgggtacaagatggagaacaccaacattcagagctgcacttgcatctgaccgcaaaatgtctcccttggcggtaggcctctcaaaacctcccatacctgttgtcacaggaaatccaacaggtacgggtgctgtaatctgagtacccttctgcacaaacttctccatccatgatatctgggaagaagtacagttccacatgattattaatctagcagccatacatgatgaatagatcaaacagaataacagggagccagagaatgttaaccacgagccaagagtaacaacaggtggaaaagatttcaactcatcccagcagctgtttataggggggaaaaagaagtccaagagtgtgcgtttcagttcatgtgttcattttagttggatgagtgtggtttccatttcaatgtggacttctttcaagcaataaatttgttctaaaacaactaaaaccccaatgaccaacaaaaccattaagggtaccatgatcaagagtagatgt

SEQ ID NO: 10940 - DNA, 5928 bp, Oryza sativa
taaatgaggtcactatgcaaggtttatgttgagaattgagcttaagagtttatgcaaaccttcactgctagccatctaacatatccagatctcctgattgcatgcattgatggagcataacaggtacaagcgggcctcattttcacagaagaggaagttgagtacagagtgcgcaatgttctggccagtgttgaatcatctctctctaatgcatcatacctatcgggaaaccctcctgagatagtggtttggagtgcctcattgtatgactacaaggtaattttttatctcaggttatcattccctattgctatcctctagcaacctaattatgtttggcatgctaaaatcattccaccagaatccgagggaattgtcaacatcacacaaccaatttttgaaggaaaaattaccgatgaacacacctcttgctgccccgtctttacctgctctgaacatagagatagagacaggtgtatttcagttctctttttttttttggttagtgattatatccttgatcatttttggtgtgtgcattgtgatacttgtgggctactagctaatatgttcaggtattttacttttcttttttccttcttgtagtatagcgaaggcaaccgaatatattttttttttcaaaaatgtatttcacttttctttgaatcaaatcaatccatctcttttccttgtgatcagatttcttgtgctattgatgcctctaaacgcacacacaacacagtgtcaaacttaaacgaaatcctctttagctacacatacaaaaacatcctccttagcaatagcatggtttaatctcatcatcctgagtatgcattacatcagtgctgcgtacaagttcgattcaacgcaagctgccaatcaccagagcctttggaaaggccatgaaacggccctgtcagtttggtcaccttctcccctcaaaaagaactgaagcattagcactccatgacagcaactgaagcattaagcacaccatgacagcaatctggccccccctgttctgtctagagtgacatcctttcatgacagtcactcatcatacatgctggagtatgtacttatctagcatcctttagctttgatgatgtatgtagagccaaccttctgagtgactttgcatgataacaaagcagcataagtacttagaaccagcatcagccattggtattagtacctcttgcccattattacattttgttattctttatttggtggccatctcaaaaatgcttaagcagagttcccatcagtgaggccataaacaaattaaagctctgattaggattacccaaccaacccaccttatctaagcacaagctttctttcaccagggccttgtctttgagtctcaccaaacctgacagtgacacaagcaattaatcctggcctctgaaatatgtcaagttgcagatgacaccaattccttttgacaagttaccccttatcatcccttcttccttcctgccccctaatgataggctaaggtcctatgctcagtagattatgtattatggattaccacaccacgcttcccgaacccctaatgaacggtactatatgttttacaaaaactttcttcatcaacagttttaagaaaaccttttcaaatcgacttatcaaccaatatttacttcattcatttgcatcctcaaataatatgatcataaactcaatttcagtttatcatccatcttatgctaagaacgcccttcaagagatcgtttacacaagaggagtgaaagaacatgtagttagtgattgcagtgagtagcaatctaagaccctagcttcgaatcttcgtaggagcaaatatcatattggattgtttgaggggctaaattttcaatttaaataactgtgtatattcggttggattagaggccgaataaaaattaaccatctctaaaaaaaatatttacaaaagaggtaaaaagcaagctactaattacttgttgctatcaaatggccaccactaggagtagtactagtgtactactagccctgttgcttgctctctctgcaatcctcctcggatttgttaatgattctgttcttttttttcatttcgcccttgtcatgccgtctgatcacgtgctgtgatggatgttaacaagctattgctcctgggccaccagctcgattttggctctgctatctgctgcattctcgctgtctccttcgtgacgcactcgatccccctctcgccggctagatttcttgggcagttgctacgctaccgcctcgctcgccgacgtgtgtgccgggcaaatcgaaaggcaaggatcccggcgagcgcactcccggatcggatggtgagatctctctggggcctttttgcagggcacacttggcatctgcttcttctgatgcggatgtttctcatgatattgcggtagctagatatgcaattgatagtgcagcgataaggggtgtatagtttcaacatcaaggtcctatatttaattccaacgcgctcacaatttcttctttaaaaaaatgtttggagggacatctcttcaaatctagtttttttgacgcatacatttctcagggtaaatatcggtacctcttctactctatcttccataaactagctacttgcctgtaaattctaacaggtcaggcatatataatgtatgtttggcagagctccaacttttaaatttagcttcgggagaccagctccactttcattttgtgaaagtgctccaactagctctactcccattttaggtagagttgaaactgttttactgtgagctggagctgtgccgaacagacccataaccagagagaaaaagttgttacttttcatgtacggacgcttaagcaccttgagatagtagagaatgactttgttttcaagaagtagaggtataaacatttctaacgtttaaaatttacaattcaccaccaacgccaacaaaatggatggaatcacttgaaagctcacgagttacggagagtactggaccgatccacctataaagcgcagttcctcggcttcattaacacgatcatttagaaaccttgctacccgctttgccgatacaccctggaaagtagaaacattcttttcacctcgtcatatacacaaggagaaactcatgtgagcaactcaagctgacaacgtgaaaacacaacaatgatggtccactagtggtgctactggccaaggtatattaaaaaaagggtccgcgctctcatcctactaacagtataggaaatatggaaggagaaaaaacatagagtgttttaacgcaaggggctcttggcaatagctaataggttgccaaaatcaaggagactaacatcctcatctttttgctaaggcttatacttatcaactaaaatttaaaatttaaatcttaaatttgaagttgattttgggtttttttatcgaaatttatttttcagcctttgctttttagatagttaagaacacgtatataaaggttttattcacaacttattttttatttgcaaatatgccgtttggcttattcaccgaataagcgaaacgattggactgtataacctaggacctagcatgagcaaaacgacttcggagctttttttttttgaaaggtttcggagcttattctttagctttgttctactttttttatagttctctttcacacgtatacaactcttctttttctcttattatatttaaaagtaaatttcataaaacttgaagtagtttaatcaatctatcacaaaactacaaatttttaataacatgtatcacaaaactacagatttaacatcataatttttttatataaaattacagatttaaggtatgatataaaaaaactacagatttaacgtcacttttatcacaaaaactacaacttctataacaccaatagtgctaagatataaactctaaactaaatctatagttttgtgatatgatgttttaaatctatagtttgtgataagtttggtgctaaatctgtagttttgtgatacatatctttaaatatgtagttctacgacagtttgatcaaagtatatgtagttttgtaaaatttactctatatttaattaatgaaattgtcacgatctagtacggttcgttcatttgtttttatttctagcatactacttcccaatccaaccggccactgttcatgattatctatatttacagatgtattgctaggcacgattttttttaatcaagtaaatttctagtgaatatcaccttaagtttaattttaaactcctaaaagtgtatatatccgtggatggaggaagtagatgccttctccttgaacaaattggaagtggtcgtattactgcattcaaagacatgtgttgaatgttctaaaaaaagacatgtgttgaaatgtcatagggcaattgttggatgagttagaatatatttatttagctcgagtctgatttgctgaacataataaattaataattaatagacttctaagagtgactttaaaaaataaggacagttgctccaaactagccctagttaagtcagaagggaagatggataagatgcaggtaaatgttcatttttggtatatccttttggcttgttctgcagaagatacaagcaagtacatgtcacagtattagttggaaatcaacaggctggctgttggatttgcagattaacttaaaagagactgtcacttgcgaagttggtatgactgcaattgccgctcttcgaccctctaaacggatgatgaggcaaatgaatgatcccgcgaatatatcctctaacataaagaaaaaaaaaacagataaaggccataaacaaactctgaaagaaaagtgttacaacattttatatctagccagtaataaatatatagtaccaaagcttactggtccatccatccgtatgactatgttctgaaccttcaaaacatgaaagagtcatttggttacaaaattgactttagttatgagtgcaacttgtcgtacaaaggtcaatggtcttggtgtgttcttatgtggtctctaactactacaaaagaaaatcatccgcatacttttaggctgtgtttagatcagaggtgtaaagttttagtgtgtcacatcggatatacggatacatatttaaagtattaaacatagactaataacaaaacaaattacaaaatcctcctgtaaactgtgagacgaatttattaagcctaataatccgtcattagcaaatgtttactgtagcaccacattgtcagatcatggagcaattaggtttaaaagattcgtctcgcaatttacacgcaatctgtgtaattagtcattttttcgtttatatttaatactccatgcattcatgtgtccaaatattcgatgtgattgggtgaaaaattttaacaggtgatctaaataaggccttagtctatactactgcatttgaggtctcatttatgtagagtatttatggagagaagcttcagaaattttctaaaagactaaactgtcaaaatagtacaatactaggacttcttatattgcagttgtaactatcgccataatttattagagctggcaagtttctactcttcgttcttagttaattctccatcaattcattaaggcaacatccaagttactgattaaatcttactttggatccttctgaagcatttcaaatgtcactgattgtgaaattatgcttagtgtaatgttgccgtagacccgtcaaaaaaaagttcacaattattactccctccgtattttaatatataacatcattgattttttataagtttgaatattcatcttatttaaaaaaaatatgtaattattatttatttcattatgccttgatttatcgttaaatgttcattacgtatgacttattttttttatatttgcataaaaattttaaataaaacgaatggtcaaacatttgtaaaaaac

SEQ ID NO: 10941 - DNA, 636 bp, Oryza sativa
catcaatagcaatataaacaccagccgtgaaggcagctgaggcaactagcggtgaagatgaaaacgcgcatcgacggtggtgtgaccatccaaccataaagacgaaggatccaatcgacggcaatgaaggcagtcgtcagggaaagtgaagacgcccatcaacggcggtggaatccgccaaccgtataggtggaaacaccagtcgtcggtgatgacgacagccgacagtgagacgttgatgcccaacaatggtgatgtgaccatcaaaccgtatagacgaggacaccagtcggctgcgatgaaagcaggccggcggtgaagatgtagatgcccaacaacggtggtgtgaccatccaaccgtataggcaaagataccagtcagcagcggacaaggcggccggtcggtgaagatgatgacgcacatcaacggtgatgtgaccatccaaccgtgtaggcgagggcaccagtcggcatcagcgaaggcgagccggtggtgaaaacgtagaccaaccagccatgtaggcgaggtcactagtcggcagtggtgaaggcaagccggcggtgaagacatcgacgcccaacaacgatggtgtgaccaaccaaccgtgtagtcagagacaccagtcggtggcggac

SEQ ID NO: 10942 - DNA, 2311 bp, Oryza sativa
cagccacacccaaccgcgaaggaagggggaaaagagggaaaaccgacccgtgcgaaggtgaaggcccacgcggctttgtatggccgcgcgcccacgcgcgccttatcggcccacggatagggcgcccagggccgtggcctccgccacgtcgcctggtatttcctgggccggcccgaccgcgacagcccaagcaacactccacaaggaatgttccagaatctctcttatgctttgtttagttcctggtccaaaatattttttaaagtatacggacacatattaaatcgaacgtagattaataataaaataaattatagattttgtctgtaaactgcaaaacaaatttattaaatctaattaattcattattagcaaatatttactgtagcaccacattgtcaaatcatgatgtaattaggctcaaaagattcttctcgtgatttacatgtaaactgtataattggtttttttccgatcacatttaatgcttatgtatgtgtctaaatatttgatacgacgaaaaaattaaaagttttttaaaaaaatgaatctaaacgcggccttagcttccctcctccgctccactgactgtaaattggaaggttttttaaaaaaatgaatctaaacacgggcttagcttccctcctccgctccactgactgtaggcccatgtaactgggggccacacttcgtgacgtgacgtaacgtgaccactcactctccgtggggaccagcgaggccctcgcagagttgcacacgtacgggtagaggagaaaatgcgcgtatcacatgacactgacaagtggagtctagtgtaatacttcctctatattttaatatatgacgctgttgatattttatccaacgtttgaccattcgtcttatataaaatatttatgtaattatcatttattttattgtgacttgattcgtcattaaatatttttaaaatatgatataaatattttcatatttacaaaaaaatttaaataaaacgaatggttaaacgttggttgaaaaatcaataatgttatatattaaaatatggagagagtacttaccccgacgtgtcagccaaaaatacctttcatcccgtttataaaaaatccgtagttataaaatccaaaaagcaaattaatatcactatctccacttcagtcgttttaatctttttagttctaatcaaatttataaaaaagtaatatttttacaaaaaatataaaaatattaatatccaatttaataaaataaattgatactataaatattacaataattttctataaatttagttaatattttaaaaaatagctttaataaggtcaaaactacttcagaacggagggggtattattgagaagctagaaaaaaaatacagtgttctaaaaaaaaaagaaaaacaaattcagcctttattttcatcggcttctcagactcggtctcgacttcagactagtctgtctgaacgaggtcgagtcggaggagttgcatcgctagcttaacccgaccgctttttaaatcgaaatcccgcagttaaatcagagatttatgcagacaaaagaaaaacacacacacagcaattactattctccaacccaacacgccccccgcaccttccgtcctcataaacgcgagtgggtttaaactcgagttgtttttttgttcgttaatcctcgccccctctttctctctaatctccgccaaggcgatggcggattcgaaggggagcggcggcgccgcaggagacaagcccggcgccgacgcgagccccgccacgaatccggccccgccagctgccgccgtggccgtcgccgctgcggccgcggacgccggaggggacgacgacgtggccgcggccgcggaggcgcggcggccgttcacggcgctcagccaggtcgacgccgacctcgccctggcccgcgtgctccaggagcaggtatatgtgggggagatctcgcggtcgggtgttgttgctagggttccgggacctctcgattgacaatttgacatggttgttgtttggatcggctgcaggagcgggcgtacatgatgcttcgcatgggcggaggcgtcggcgagggcagcgattacgggagctcggatgccgggagctacgagtacgacgacgaggccgaggaggactacgaggaggagctggagcaccacctccgcgtccaccaccacgagcacgccgttggggagggtcgtggcgagggagagcgagatggggatggggagggggctgagggaagcgagttcgaggaggaggggttcgacgaggagtatgatgaggaggaagtcgagccagagc

SEQ ID NO: 10943 - DNA, 738 bp, Oryza sativa
atgcctgcagtcgactctagaggatccccggcttcctgcttgttgatcaagttgcactcatgacagacttccttgatcttcttcccttggtttttcttctcttccttctcctcatcaacatcctcaacctttccctctttagcttcctcgttctcactagtaatctcctttgaatctgagagaggtttctgcttgttcgaggaatgccactcatgagagacttcattgatcttctcccctttcttttccttctcctcatcaacagttgcatcaaagccatagatattatcacctgccaaatagcatcaccaaacaatacatagtctttaaaacagggaaataaagtaacaataatcagtgaagtatatgaactatggccatcatcgttctgaatacgagtaactgaacaagccatttttatatgaaaaaaacgtaattatgtaaatgctactaaattgatgtattgtctgcacccaaaaagggaaaaacagacaaaaaaaaaacagctagcagtggctgcatccaaacgctgcaaaagtagcagctttggaacatcaaccaaggttacccgtgaaacaaagcgacgaaaacaggacagtgatcaagagctgatcagatcacaagggctgcaacatttgtactgttgttcttctctactccctctgtcccaaaaagaccgaaattcttcgattttcgtgtctaacgtttgatcgtccgtcttatataaattttttttat

SEQ ID NO: 10944 - DNA, 1296 bp, Oryza sativa
cagcgattacggggagctcggatgccgggagctacgagtacgacgacgaggccgaggaggactacgaggaggagctggagcaccacctccgcgtccaccaccacgagcacgccgttggggagggtcgtggcgagggagagcgagatggggagggggctgagggaagcgagttcgaggaggaggggttcgacgaggagtatgatgaggaggaagtcgagccagagctagaccccgcggagtacgaggacgatgaggcttatgcacgagctctgcaggatgccgaggagcgcgaagtagccgcgcgacttatggctctcgcggggatcagcgattgtgagtagaaaaggagtgctgtttcttcagttcatttcacatgtttcagttattgctgtcgataatttcaatttgatattgctttgtagggagacctgtggagcctgtagaggagcatgcgaatgatccacaggtaatggtctatttttcttgttagttggacaaattgtgtttgttctgatatgtggaaatcctagagttggatgaaatgatcttggagtaataacataaatgatgatatagtctccttaattcgttgttgttgcaataaaatttacacctacattatgtatgacaaccgaaatcatatggaatttacacttgaagtgatgaatgtgccttgcaactttccttgtttccacgcactgttgataaacgataagactgcccccaaattcattttttgggtaccttccagcatccaaaatccatcttattttcagttgaacctggaattctttttcttgctcaccttcagtttcatatttgagtgataaactcatgagcatccaaggtttttatgtactttttatcacatttacagatcatgacttctataagaagtgttggttgtttacatcaggtggatttttaatcgtttatactttagtagagcttgtactgtccattagttgagcaatagtaagaccagaggtggtatgtggttcatgctgtggcttgtcaaatttgcatgctgtcctgtttactccatggattttggcatgctatattatctccaatggaagctgcatacttgaacttgggaaaatgtcttttcattttttccttactccattactcattgataatcagcttttatgaactggaaaaacgtcatttaacacgttgatatatttttaccaaaacccaggatgcgtggcaagaggttgacccagatgagtattcttatgaggcaagtttcattgttatatgttagccttctggcacctggcactgcatcag

SEQ ID NO: 10945 - DNA, 1760 bp, Oryza sativa
acccggccttggccgagttggcgccgacgcggcgcctacgtggctgccacgcgggccggcgggaggtagacgacgacgccgaccggaacggacggcggacgacagcggcgagcggcggagcgaaccacggcgatacaggcgaaagcgagcacaccgggtggttgcacgagacgaggggagacgagccaacggctcggattcgccggagggagcttgacggcggcgaatcgcggcggcggcaaccggcggcgggagaaggggaaaacggcgacgaggtcatgaggggccgattcccggcggcgagagcacctacgcggctacgggaatccgatgctagcgttggattaggaggaaacgcatcgggggaggccggcgacgagaggcgcttccgagctcgggcggcgacggcggcgagcacatggcgagcggcggcaacggtcggggcggcgccggctagctacggggaggctactcatgctactacccgagtctaaggggaggagatggagcgaggagggagaacggggagatgcactaccgtgcgggcgaggcgcagtgacgagaggctgacggcgcgggagtaatctctccggcctcgggccggggaagaggaaggagagggcgcgcccggagtccccttccgcgtccttgctcgtgccggctcctccgacacgcgcaacgacgaacggcgacggcgaacagagcacgggaggcggcggcaatggcgtggaggcgaatgggagaggaaaggaaagggggaggcttgggtttataggatggcaatgtcggtttgggaaccgacttagggcgggcaaaggagagggctagcgctcggcggtcgcggccaaagcggcgacagggaggagggaggaggatgacgccggcgggaggaaaaaggggaaaagagggagaggaaagagggcttgtcccttgcctcttcgggaaaaggacgagggagcggaggcgacgcggcagagggaggaggagctctgcctctgtcctttggcagcttgcgcgcggagtggcggggccgaggcgatgacgacggcgatgacggcgggacggtgtggagcggagcggcgacacgggcgacaggcgcgggcaggcgcggcagaggctgacggcggcggcgaccaggcggtcggccaccacggcacgcgcgcgcgggaagcaacgggcggcgctgcggtttgagcggcgtggcttgggcacgcgcgctggcttgcggggccgagcggctgcgcggctgcagacgcggcagggcagcggggccgggtgacgcggacggtgcaggcgcggcacgggcggctaccacgcgggcgcgcgcgctgaacaacggcgcgcgggggccgacttcgcgggcggggagctcgccagggatggagacggggagagggagagcgagggggaggcgctcggcgcggcgcagctcacgcgcacgcgcgcgcggcgcgcgggcggaccggaagagggagggacagagagagagagatagccggggagggagggggagatgggccgagagagattcggcccatcgaacccgggggaggcaaaatagacttttgcggaggaattgatttgggaagggtttggattcgggattgaactcgacgatagatcggggatttgagatctgagatggcacggacactagacaacaagcaaagaaacaaatttcgcaattagggtttttaagagataattttcctgctaggcgccccgacggaacgggcgctacagaccaacccccctaacaa

SEQ ID NO: 10946 - DNA, 2791 bp, Oryza sativa
atccttatttttttcgctcacaggttttctcttaattaccttttttttctcttttttttcgatggtgcatgaaaatactagtactatcttatactgtcgcttttcctctttctacgagtgtcagatatggtggagttcgagttcccaatgcttcagttggcccgccaaagccatccaatttgccgagacggacaccccgcgcgcgacgccacgccaccgcgcgcgaatttacgcggttgcccctcggtggagtccccttcgccgtaattagcccctacaaggaggggcagtctcggcgcgaaacgttgactcccctgcactcccccaatcccctccacgtcaacacggccctgccacgtcactggcgaactcttcccctgctccccggcgtgagcggagcaggtgcggacaaaacggcccctccaccatactaccagcaccacctgacaatttgcgttctcaccccaagttaaactcgtaattacgtgtagccccctcctaggctcaccatttataggagattttttttttcaatccggtacttgagaagggttggaattaggatttggggttcttccttggtgcctggtaatggctaaaataatccggcctagcgcacggtgcactcacgaacgaacgactgcctcggccagtgggggcgtactggtaagaaaagcccactcgttactcgttagtgctgcctccgcatcatctgcttgctacgctttcctttctcctaagagcattcccaatagaaaccacggtagcagtggtcttatatgaaccatatagcctaagagcatgtacaacagcgggctaaaagtcagctgtaaatatattttaaagagataaatgagaagaaagagggcagtgggctatagatttgtagccagctgtagcatggatttcaagacatagtgtgtgtatgacaggtgggactagatattaatagtgtagtatgtaactattgtatgaatgagctattagattggctatagataaattggagctagtagttggctatactattgaacttgctctaaaatcatgctatataagagtaggacacactacttctattgaaggttacttcttaatccccccgtttcataatataagcatttttagagttggacacggttattaagaaagttggtaggattaaatgtgtgagtatagtattggaggataagtagagataggtggaaaattaaatagtgtagggttataattggttgaaaagagaatattagtggagaagttatattttatgataaattttaaaagctataagttgttatattttaggacggagtaagtaaatattacgaaatctgaggatactttgcgaagataagcccatcccagcccacaaacacaagcgctgttttcctctcctacccttttctttattttattcggcccactccccctcctttttctcgtctcctccgccccagcgcccggcgcctccccttctcttcaccgccggtcgtcggcgctgccgactgcgccccacgcgccacgacgactcagccccaccgcgccgcctccgactccaccccatcgcgccaccgccgactccgcaccaccgcgccgccgactccgccccaccacccgtcgcctccgctcttcgccgcgccagatccggtgggccgcgccgtcgactcctccccacggcgccgccgacgactccgcccctctccctccgcccttcgccgcctctctctccctccgcacggcgagaggtgcgcgcgagccgagccggagggggaggggagggggggagggagcggcggatgccatgggcagcggcgcgtcacggctgctgaccgcgtgcacgtgctcgcggccggcgccggcgtccgtggacgcggagccgtgcctggacgacgctctcggccactccttttgctacgccgccgccgccacggccaccgcccactcctcgtcgttccgccacggcatctccggcgccgcgctctccgccaactcgtcggtgcccgtcccgctctacaacgcgtccgccgccgccggcggcgtggcgccggggtactcctcggcattccacacctcgtcgtccttttcctccgcgccgctgcagctgtccaacctctcctcgggcccgctgttcctctcgggtcccatcgaccgcgccggccagctctccggcccgctcgaccccgccgtgcccttctctggcccgctccccgcaaagcctcccaagcccgcgtcctcctcatcgagggggttctcgaggaggttccggaagccgtccttcggcagcctgcggcggagcgtgtcggagaagaaccgcccgtgcgccgtgccgctccgccgcgacgacggcgtgcagtgggcgcacggccgcgccggggaggaccgcgtccacgtggtggtctccgaggatcagcggtggctcttcgtcggcatctacgacggcttcaacggccccgaggcccccgacttcctcgtcaccaacctctaccgcttcctcctccgcgagctccgcgggatcttctacaaggaggccgacgcggacaacaagaagctctggcagtttctcgtggacggcgacgacgacgacagcgagctcgacttctcgggctctggccggttcgcgctgtcactcgacagctcaaggagagtcggtttcacatgtgggcgcacgccgcggtcgacgagagcaggagggaatggggttccaggaggttggcaccggcgcctgcggtgagggaccatgcggcggtgctagccgctctcacccgggccctggcctcgacggaagcgg

SEQ ID NO: 10947 - DNA, 522 bp, Oryza sativa
aacaggtaattgtgatactgtttgagtgggtcagccattcttttaatttgattcttatacttacgatgtttgttttgtgtggtatacatatccatcttcagagcaagtgcatttgttgtcagtactttgtacttttaactagaaactatatctgtcatgtgttctgattaatccaatgccctgattgaattaatatagacactagataattcttgatcatagaacttcgtgtatttgtgcaggcaaaattgaacaatggattgttagagatgttccgcaatgattacattggtgatacaccgtatatatcatgcacaccatcgctttgccatcacaagctcactgcaagggatcagtttttggttctttcttccgatggcttatatcagtacctgagcaacgaggaggtagttttgcatgttgagaatttcatggagaggtttccagaaggtgatcctgcacaaagtttaattgaggagcttctctctcgtgcagcaaagaaggctggtaggctctcttcta

SEQ ID NO: 10948 - DNA, 726 bp, Oryza sativa
cttgggccggccggcccatttagctcggctgagccgccccttttctctcgggccgcgccctagccgcccgaggaaaagtctaatttccctccccctcttcttttctttttcaaaaaggatttaattaaattcttttcctttagaccaaaaatccaataatcttagaaattcaatatcttcccaaccgtaaatccgtttgactccgttcaacttccaaaattcctcaaatctcgagatctatctaatggcacgcttagaggtcattaatagggctttattttcgccgtttgttgagttgtcccgtttcgagtgtagtttcggagcccgaagacccgcagtgcgaggatttcgaggatcaagcccaagatctcgagcaaggcaagccacctttgaacttaattatgttgcttgaaaaatattatgcattgataggatcgcacttaatctgtttgtcccgtctgcaaggcagattggcagacctacctagtttgttgcatttgatccttcctttgttaattgttataccatgttcccttgtaaccatctagttgcgcctcgatattcgtgcactctgtgcgagtatcgacggtcgccttcaaacttaaaatttgaaaaacaacttgggtaaaacttgggttttacaaaagacttggaaaacccgacacctgggtcggtgcttgcgaactaaatgaatttccaaaaccgcggaccggggaacgtaccggg

SEQ ID NO: 10949 - DNA, 2718 bp, Oryza sativa
cgctgcactcgggaacaccaccggccgccggcgtcgttgccttccggccactggagctctggcgcccctcctctccctcctgtcagtttgctcggcagtagaaggaagaggaggaagacgacgggaggaagaagaaaaggaaaaagaaaagaaggcagacactgacaggtgggcccctgcacagtaactcttcgtattttctctatttaattcaaatcctaatctttagaagcccatatctcctaaaccgtagatccgattccattcaaacttggacctaaattcatataaattcaaaatctatattttgataccaaatttgctattttaagattctgtttgaatttccttaatttattcaaatactattagaataaatatttgattaaatcttacaattgaatttacaacttaaatttatatttgcttttcaaatattttattttattccaaattacccctttagccactaaaaagccgccggttggaactttacgccttccatggggatgttcgcggtttactatcctcgacgtcggaccgttggttgtaaagcccgacaaaaaccaaacctaaggtcgaagtgctgctcctagcaccccacgccttgatgcgtatagcggtcggagcttcactattccctcgacctccacagcacgccgcacagttagctctcgggctcttttgatcttagccgctccgccgccactcacggttgtcggagtaacacttccgccccaccaaacctacaccaacctcatattcctctagccgatatactgtcggtcgacaccggctagagaagacactaaatctagtcattatgctgccaactctagcaacgactagcaaacaaccaaaccctagccgataccttgctagtcaaatcccagttgtcatccaaattccatactgtcacgccccgaactagtaccgaccggaactagcccgcgacgctccaaattaacctgttaattgataccagtcccaggaaacagtgctggtatcacaggaagacagattatcacagcaacagaggtctctttattatagagtagaggtacagtcatgttgggccgcggacagatcccgagctcacaactgcattacaaaagggaagcggaagccaggacttggaccaaacaacacaggcgcgacttgggaactaggccgaaaccctaaaactcatcgtagccggcttgctcctggaagaactcctcatcagcaggatccgcttcatcttcttcagcaactgggggggattatttatatagagcaagggtgagtacgggagtactcagcaagccatgggaaataagtgtttaatgcaggctacaaagaaagggctgctgtttttgcaattgattttatttgaactcttttctgaaaacaactaagtgagtgcttctcaaacgacacggatgagacagtgcgtctcgtccggtcggagtatgtgcaatgtatcagtctttagaattggccaagattggtacccggccaacatctttcaaacggccaaccgggccaacaactttcaaacggccacccgggcctagctgatcccatcagctgtagatttctcaaacatcgatcccctttttcacaacggcaatttcacaaggcagtagtcaaacaaaactacgctaggaatcacctcacatccgcccatgaccgtgggcacggctgttcgaacagtttgttaacctctgcagagggggtacactttacccacacgacattactaacccggatcacccagcccgtggggatcagccacgtcgggagacctccaagctttcatgacaaggcatttcgaaagccgacacaggtttaccatatgccgacgagaggggtcccagaccaacaacaggttaggtcccagaccatactgtgccaggaagcccaggggtcctccccgacaccaccccggcgaatccacatgtctctcggcatcaaggctcccctgataagctagttactcagccaggggtgtcccattccacccatgtggtcgtacttgtcttatgttcggatgaaaatccaaggaaacggtccttaagtgcaagagcggaaaaccgtacacccggtacgttccccggtccgcggttttggaaattcatttagttcgcaagcaccgacccaggtgtcgggttttccaagtcttttgtaaaacccaagttttacccaagttgtttttcaaattttaagtttgaaggcgaccgtcgatactcgcacagagtgcacgaatatcgaggcgcaactagatggttacaagggaacatggtataacaattaacaaaggaaggatcaaatgcaacaaactaggtaggtccgccaatctgccttgtagacgggacaaacagattaagtgcgatcctatcaatgcataatatttttcaagcaacataattaacttcaaatataggctcaagatgttcaaaggtggcttgccttgctcgagatcttgggcttgatcctcgaaatcctcgcactgcgggtcttcgggctccgaaactacacgcgaaacgggacaactcaacaaacggcgaaaataaagccctattaatgacctctaagcgtgccattagatagatctcgagatttgaggaattttggaagttgaacggagtcaaacggatttacggttgggaagatattgaatttctaagattattggatttttggtctaaaggaaaagaatttaattggctgcaggaa

SEQ ID NO: 10950 - DNA, 716 bp, Oryza sativa
ttcctgcagcccgaatctctgacacattcttgggtgggttccaagcaagtacagcttcaaccttgctgggatctacttggacaccgttggaggagatcacgtgtccaagaaatgctactcggtctaaccagaattcgcatttcgagaatttagcgaatagttgatgatccctgagcttttccattatcagcctcaggtgttcagcatgttcttccttattcttggagtatatcaggatatcgtcgatgaacaccacgacaaactggtccaggtattccatgaagattttgttcattaagttcatgaagaatgctggagcattggtgagtccgaaggacatcactgtgaactcatatagaccataacgcgttgagaaagcggtcttcgggatatcttcagatctgattttcagttggtggtaacctgatctcaagtcaatttttgagaaaactcttgctcctttaagttgatcgaacaaatcgtcaatctgtggcaacgggtacttgttctttatagttacttcattcagggctctatagtcgattaccattctctcagagccatcctttttcttaaccagaagcactagggctccccaaggggatgagctaggtcgcacataactcttactctccaattcttcgatttgtcttttaacttctgctaactcattagctgccattcggtagggtctttttgcaattggtgcggtgcct

SEQ ID NO: 10951 - DNA, 1257 bp, Oryza sativa
agtgctttcaggcacatgagctacacggaaagccgtagcaaactcatcccaagcaatgttagtgggttcagggtgtgcattgcagtaattctcccaccaatctgcagcaggtcctcttagctggtgagaggcgtagagcgtcttctcaacaggagtacactgcactaagttgagttttctatcaacatctttcagccaatcgtcagcctcgacgggctcgacggtctgagagaactctggcggacgagacctcagaaaatctgtcagcttggatctattgttgctcatgtgagggtggccatttccatgcgcattatgctgaaaaccggctacggctgcggctaacccttgcaagatttgtgtctaaactgccattaagtgctgcatgttgttttccacatgaggtggggaagggaggcgttcttctccagaattgtgactagcagtgcggtgagagcggtgagactgttccatttctgcattacgggaagctgtgtgatgcgagcggttactgcgacggggttgctcaacttctgcgttgcgggaagcagtacggtgcgaacggttgctgtggtgagactgctcattagctgactcatgatttgcttctggctcaactctaccatcctcaaaaccaaagcgggctggtgcacgagcagcacggcgggggcggctaaccatctaaactcccagaagagggcggggtaagagtcagataagcacttaggagggcaaggagcaaagtaaatagcaactcagatagcacacactaggcataaactggatttttcatatcataaaaacacctagtacaacgggtgtagacaagtcacagagctacgccgagcttgactgtgcgcacaccacctaggagaaccagactaccaaacaatacccacaacaaacacacgcacgcactacctcgccacgactccaaaagagttggcggcggaacaaaagggcctaacacacggacggctgctgaagactgcctcctctactcctcgtctgcctggctgcttcctgtagtcggctcctcagtcgaagaaacgtcgatcggctgacgcgaagggaccggcggaacctgtcgagggccggcagcagcacgggccgctggcggtgggggagctgggtagtcgaaacggaacacggtggaagaaccaacaacacgcttccgcgcagtgcggataaagcgtgggcctcggcgggaggaagcaactggggtgtgtccgggggtgtaggaagggctaactgggt

SEQ ID NO: 10952 - DNA, 706 bp, Oryza sativa
acaaccttcctccgccgcctccattactcggtgccgctccaggaagctcgccgacggcggacgcttccggtgatcttttcacgttttctttttcacctttttcatcttctcttcaccgcttatcaccacctaatcccaattaccatcctttttagatttttcttctcctttcttactcgcattttgtccatccatgaaaagtctctataagattttatactcccaactccaaaccacttcgttgacatataggttactactgctcgtcagccgaccattactgtaagagctgcttgtttgtttgtacagctagttgtctaatcttgatttgcaaaattgttaattaaccttagtttcttttttttttctttgatgcttgggtttaagaatgagtggacttgttgatgtgcatggactgcacggtacaggtcgtttgtacacaggattaaatgctggatttatgagtgagagggatctgagtagagggggataggagtgtatgtggctttgtgcacagggattaaaagaaggttcttgattgttttgtgtctgaaatgaattctgaatctgatccaatggtctatgaatactccatgaaatagcatcaattcaattcatttggtcagagctttcacatggaggcaggcagcgtatttatgggcgatggctgcctctgcctccattactcccttttctggtgcaccaa

SEQ ID NO: 10953 - DNA, 1140 bp, Oryza sativa
ttttgctggttggtttccaccatggtgtgaccgtcctttgtgcgattgtggggatggatgcatactcaagtcttccctcatgatacaaactcggggcaggagattcttccaatgcgcgaactttgatcaggtatgcttcatctattcgaagttcaaatggataaaaaaactaacttcttcgtacacaattgtaacatcttacgcagacatatcgtccaatgtgcaacttcatcgagtgggtagacatggagaacccacaaaacgacggaacccgtgcttacccacgtagtgaaacaagatcggactacctaaggtggaaggatgagcatgaacgtcgaattgctgctgaggctttagaatggcacgtaaatcccctaggactccccacgtggcgtgagcgtccggagtgtcgttgtggtgaccgttgtcaggtcataaggtccgtaaggcaccgaactcgaggacaaaggtgtttcgtgtgtccaaatattgtcgacgatgatttcgtggtaattacaactattcttttcatcactcctcagtactatcattaacttaactatcccaaaatggatgtacatagaggatgtaaggaaatgtcaattcgtacaatggattgacacagtcagagttacttcaagtggcgggccgataacgcaacctgaaccgaccatacagttcattcatgcttggatggagtacgatcgggtggaaattgcaagcttagactggaggaacaatccattagggttacctaaatggtccgagcgtccaaagtgtgggtgcagagatcgctggcaggtggctacatcctttgctgaacaaacatttcgaaggagatattttgtctgccccaatgtagacaacgatttcgttgtatgtctaaccatttacaaaatccgctatgatttgcacaaaattactacccaaactgaataacattactatttttacagggcaatccaaggatgggtggatttactcgatggatcgacaatgtcactctatcatatcatggccagaagataacagagtcagaaacacaagtagagtatcaacgattgaaggaccacgagaatgcaatgcattctgaccgacctagaagatgccgataggttaccgcatgcttgattcgtcggg

SEQ ID NO: 10954 - DNA, 1578 bp, Oryza sativa
acattggctttgaaccaaaatcaattattaggcacatcgataacaaattcaagtacaccataagctatgcaaaggcctggagagccaaacaaaagattattgagatgaggtatggcacatttgaagcttcttatgataatttgcctcgtttgttagccaccattgcccagaggaataataatacttactatgacctacatacatttacatcggttgatgatcgaacaaagagtgtgctgcaaagagcctttttctcattgggtgcttgcatcaatgcttttgtgcattgtcgacctgttctatgcatagatggaacttttatgacaggtaaataccgaggtcagatattgacagcaattgggtgtgatgggaacaaccaggttgtacctatggcttttgcatttgtagagagtaagaacattgaaagctggtactggttcctagagagagtgcacattgcagtggtgcgtatgaggcccaacgtttgccttatacatgatcgtcatgcgggtatgttgcgggctattgactacttgcagaacggttgggatgagaagggacttccagctaagtggcctgatgttcggagtcggtggtgcatgcgtcacatgggtgcaaatttctacaagtaattcaagaacaagcatcttatggagctctttaagaggttctgtgcacagaaccaagagaagaaatttaatgagttgtgggacaagttggatgagttgacaacgaagcaaacagatgagcaatctcgcagaccacaagttgaaggtgacgagcctcccatacctcttggcgcattacatgatgacccaccaacaatgagaaggaggtcagggtcgtccatcagaaatttcactcagtggattgagaatgagcctaaggagaagtggtctctattgttcgacaccgatggatctcggtatggcataatgacaaccaatttggcagaggtgtacaactgggtaatgcgaggagttcggatacttccattggttgctattgttgaattcattcttcacggcacgcaagcgtactttagggatcgatacaagaaaattggtccgtccatggccgataacaacatagtgtttggcaacgtagtgacaaagtacatggaagataaaatcaaaaaggcacggagacatagagttgttgctcaaggcacacaagtgcatcggtatgaaataatgtgtgttgataggagcaggcgtggtatctatcgcaagcaagccgtgcaggaatgtgtcttgaaggcggatggtggatgtacctgcagttgtatgaagccgaagcttcatcaccttccttgctcacacgttcttgctgctgccggtgattgtggcatatctcccaatgtgtacgtctcaaattatttcaggaaagaagcaatctttcatacatgagtgaggagatatatgggttcgggatctcaggatcttacacaacactgagtgcccaagttttttacattccagatccatctaagttaagggtgaaaaagggtcgacgccaaactagacgcatcagaaatgatatggatgagtcagaagcaggtgggaggactttacgctg

SEQ ID NO: 10955 - DNA, 1667 bp, Oryza sativa
gacaacgcctgcaggaccatcggccgcttcatcgccgagaggtccatgaacgccgacgtcttcgccatgtcctacgagcccaagaagaacgagaggatcgaggggaagcttggcatcgtcatcgacaccattaaggagcacggcattatatttgtttaggcaagttcagcttacaacgttgattaaaatgtaagtaggatttttttttgtgctattgccttcttaatgtcggtcttgtgatgttattctgcttgtagaattgcttgtttttcttacgattttgctcatgggttggtggtttacagcgaatgcaattgttttatctattgcttccactaaaaagtatagaaatcagacatacttatttcaaaaatatacttatgtttcaaataaatacagaaactcttcctttcaaaaataattcatgccttttttagttctgaagttggaaacacaccaaaattgtcctgtcaaatgtgtaaaaagactgctgtgatgttaatgctaatggaatatgtgagaatggcaggggtagggccttggaacccgttgatcatctcagttcaggtttactgagttgaattttgccagctagctgtgatcttaaaatatacataaatacgttgagatgataattcaggggatggatctcatcattcaaccaaacatcttagtaataaactgcattttggtggaataactattactaagttctattacattattattattatttatttggacaaaggaagtataacttccgggatctgcaccaactaaggatacacacaatcatatttgtggatggagtcatgtgttccaccaccacacaaatggtgcttcccataacatgatgttgatcattggtattgttcacgtaagaaatgtgtgggtttgtaaggaatgtagagcatgagtccctactgattgtcgaattttcgtacatcatgtatcagtaggatagccttgatctcttgttgattatcaggtatctgatgaatgacttccaagcgctgtattgttcatgttcttcaaataataactgtatgtttccaccagatgttgcgaggtttattgcatggtagctatgttcatctgttgggtagctgaagtctgttgtcccaccatgttcatcaaaaattatgtctggaagaaagtgggtgattaaacaattggataaatcaatttagcacagctacatattaaaagcaaaggtaagacctcagatttgcactgcctatggtgaatggtcctgcacttaagaaagaggatagtaaaatgaggctcacattctttactggttctcaaactatgctcctttcctaagttcaatattatcttgtcatgcttgcagtgcacagaaaccatcctgatatggatcttccctgcatgaatacacaaatgaaagtgttttttttttcgcattcatcttgtatccctggaaaatgaagtaatctaattgaatgtggcatgtcattgatgagttaattgggcattataccatcaggtgttcgaataggaagtcggacatctttctggttactcatgagattctcaaaggcataattgcttattgccctgttccgcatcttaaaggcattagctccttttaagcctgcagcaaaagaaccaagtttcatgcaagtaacttagtatacaatatatag

SEQ ID NO: 10956 - DNA, 692 bp, Oryza sativa
ttgcaaactgggtatactgtttttcagcactatgtgtcctaaggtgcaagctggttaagcaaaacaaattttgcattgttggtgtaaagaacaccatggttcagttggtaattttggctctactgtaggatatttttgtattgattgttatgaacaacttgcagtcatcatcattggtacacgtttgtgttgaatatttgaatttcaatagatgaatgtcttgtcgaaacggtttccagttgtctttaatgtcaaatacatgtacctttttttttctcctttctccctcagtaataccatgatttaacttttacttttgtttctttaggtatggatttttatgagttactagatatacctcaaggggaccgaagaaaataccatgatgatgtcactgtcatggttatttctctggaagggagaatctggaagtcgtccggaacatatgtgtgatgatcagttggaacaatgtcgatgtcaatatttatggtgacgcatcaagtgatctcagctggtcagagcctctgagcaactgcatttatgctcatcaggggagaaacacccacagatggctgacagatgatgcactccatacatttgtcaaagcgattggagttggagccagcgttggtctagatcttagcttcagcacaaaacacagtccatgaatgtgctagagagttaattctcgg

SEQ ID NO: 10957 - DNA, 637 bp, Oryza sativa
ttaggatgagatctcttaactccttcttggccggtacacagatgcgtggaccgcaccaaactgtgccttgatcgtctatggagaaatcggtgtctttcttctcttgtattctttttattaattcttttatcccttcgtcatctttctgagcctcccggatttgcgattctagggttggctgcaccgtcaagctggcagggacacctgactgtaccacggtcagcctcaacttctccaattctctgcacaggcggtcttggtcaggccgtatttgagctacattactgtaggccttgcgacttagcgcatcaccgaccacattagctttaccggggtggtcatgaattccaagatcgtaatccttgattagttccaaccatcttctttgcctcatatttaactcggtctgagtgaagatgtacttaagacttttgtgatcggtgtatacttcacatctgttcccgattaaatagtgcctctagatcttaagagcatgaaccacggctgccaactcgagatcatgggtgggataattgacttcatgaggcctgagctgcctggatgcataggccacaacctttcgttcttgcattaggacacatcctaagccttgtcttgatgcatcacagaagatctc

SEQ ID NO: 10958 - DNA, 3647 bp, Oryza sativa
cggtcgtgttcacgcagatggcgtcgctgttcgtcgtgcagggcgccgcgatgcgccgcaccacccggttcccgggcttctccgtcccgccctccagcatgtcggccttcgacatcctcaccgtcgccaccaccatcttcctgtaccgccgggccgtctgcccgctcgtgtcgcggctcacgggccgccacaccggcccaaccgagctgcagaggatgggcctcggcctggtgctcggcgcgatggccatggccaccgccggcacggtcgagcacttcaggaaggccggcgccaccacggcgatgagcagcgacctgcacatcatgtggcaggtgccgcagtacgcgctgatcggcgtgtcggaggtgatgatgtacgtcggccagctcgagttcttcaacggggagatgcccgacgcgctcaagagcttcgggagcgcgctctgcatgatgtccatgtcgctcggcaactacttcagcgacgtcatcgtgagcgcggtgaccaaggccaccgccgtgcgcggccgccccggctggatccccgccgaccttaacgagggccacctcgacaagttcttcttcctgctcgccgtgctggccgtcgcggacttcgccgtgtacctcgtgtgcgcgagccggtacaggagtggcacggtggacgtcgaccggagcgacggggaggaggaggatggcgtggccggcaggcagatggcggcaacggtgtaagcgtcaggatgaatcggccgtctgctcgcgctcgatagatgcatggcaggctgtcgtggttcttgagacggagactgcagactcttcgaggggatgagttgcattgggacgagttggtttagcacgacaagtctccgttgatgataggacatgcacggggggatagtgacacgatactaaagaataagaggtcgcctacagatgcagtattgttctatcatgtacgcctgtgtttcatcgtttcacatttttctggccaatgtaacaagagaacgcgactgttactgaccactcatgttttttcttctgcaagagtgactgatcaatgcttctgtgcattgccgactgttgattgatacgcatactagtgctaataatacttcattttccctgcctagtactgttttgtttctactatttacaattcactgctgttccttcacggtggcactgttactttgggcctgtttggcacagctccagctctaactccacccctcctagagctggagttcagccaaacagtttcagctccaccaaaattgagagtggagttgggtgaagctctctcacaaaatgtactagagttgtggagctgggtttaggccccgtttggcatagctctagctcccactccaacttatcaggagccggagttgtgccaaacgatccagatccacctttttttggagtggagttggcagagctactcctaaaaaatgaactacggggtggagctgggtttttgctgctccacagctccactctatcccaaaagacccactaccctctaattttttagagtatctacacgaaaatgccactcaactacccctacaatcctcctttcctcccgttctctctcctcccctcccaatcccgagcgggcgccggcggcggtggcgggctgcggcagcggcgggatgacgacaggcggcgacaggcggcgcagcgtgacgatgacgagcgggtggaggccggcggcggcgggctacggtagcgtcggcggtagggggccacggcgacggggcgtgacgacgacgcgcgggcggaggccggcggcggcgaagggctgcggcggccgggggctgcgggacgaggacgggcggcgcgcgtggccggcggccggcggcgcggctggggccgattggtttcgttttttttcattttttcattttttttttcagatctagaactgaaagtatagccaaacacttttaacgagttttcaacttcaaccggagctagctctcactggagttggagtttagagttaggagttggagtttggagccctaccaaacggggccttagacagctacacaactccactctagactcaactcctggagttatatttaggagttggaactgtacgaaataggccctttgttagcagcaaggcggtgaacagctgaaataaagttaagtggtagaaaaataaggtgtgtgcgcccacttgggtttgtgggggcgtaaatgtggtatgtggattcacatccaacttgtagccgaaaaccatgaaatcgttatttttcagtagcagacgagttatctatttggctgcctagcactcaccatatttggattgctgggccaaatttgagttgaagtttattatttctgtgaagagtacactttaagggtgtgttcagcacccctttttcccaacccatctctctcgttttctgcgcgcacgcttttcaaactattaaatggtgtattttttgcaaaaagtttctatacaaaagttgcttaaaaagtcatattaatccattttttaaaaaaaacaaatacttaattaatcacgtgctaattgactgctcagttttccgtgttactgttccgggttggaaaccagcctatgcaaacacaccctaattatcttggctatgcattgagcttcattcgtgtccattagcgcaaaaccggctatagagcgttaccgattatcaaaactaatgtaaatcaagtccctcggtagtttacacggcgctttcatcctacggctacatgacagattaacttagtccttatccgacgtaatgcttacatgtaattacagccaaggaaaaaatatataataggactcgtatccacatgtaagtggtaattgtatagatgttttttttattttgagtaaattatcacagtactgcaggtttaacatgatatatcacaaaactatagatttagcactaaatttatcacataactacatgtttaagactaagtatcacaaaactatagatttgatatcaatttaataacagaagttggacttatataactcaaacatagcattagtgctgaggatttaaaccccaaaatctgtagtttacgataatttcatcagcaaatctatatcttttttatacttagccttaaaccagtaggtttgtcataaatttattgttagatctgtagttttgtgatacatcactttaaatatgtagttttatgataatttaatcaaagtatttatagctttgtgaaatttactcttatattttttttccatgtgaaacatatgagtcctacatctttcattagaaaaattatggcacaactacgactcacattgggtctccttatttttaaaattttttaaatttttttctagtttcgtgattaccacaagtgccatgttagattaagactatgccaacgtgccaagtagaggttacataggtcaaaaaccactttcaaattagtcgagggactcgatttgcagtgattttaaaagttagaggatactcttacctaattttatagttgagtgatgcaaactcaaattagggatgcgaaatggaccgtttccttcattagttgggtttgatgattgaaggtccgatctaatttgtatctcttaactactatatcagatatcttgacccataactattaaaaccaatgcaaggg

SEQ ID NO: 10959 - DNA, 884 bp, Oryza sativa
gcggcgagagggacgcagcgacggcgagggcgatggtcgccagcttcgcgaactcggcgtcctccggggccagcggcgacgcgtcgtcggctcgccgaacgcgtcctcgcacgtccctggcgcgtccagcgccgcgctgagctgcgtcaccgcgtcctgggtggcctcgtccccgcccctggcgatgtcctcggcggtctccccgagctggtccacggcgtccgagtacacctccgcgcacacgccgaggcggtccttcctcctcgcgtccttctccgcggctctcagcgcggcgatgcgcgcggacgtggcgttggcggccttctccgcgatcctggccgcgatggcggcgaggccgcgcgcgtcggccgcggtggcgctggcgctgtcggcctggaaggccttgatgcagtcgttgtaggtgacgtacttgtggccggcggcgacggacttgcatgtgtcctgcaacacggaggactcgcaggtagacaatccgagcatgaggaggagcaccgggacgagcagacgcctcatggtcgctgggattgggtcgacggccggcgatggtgagcttgcgtaggttgggagcttgggattgtgttgtggcggcggcgtacgttctcgcggcttgtcgcgtagacgtcgactgcgtgtagacggtttcgatcagaagctagcgtgcgagacctgggcattttaatacgcgggcaagatttgataataccataatagttgtcttaataatttataagtttgctaaaataaaataatgttgtaccagaccctacttgtcatcgtcaagacattatggtattttgagaagtttgattcgatcttgtctacctttttatgatctgtgcttcctttttttgggacacaaatgt

SEQ ID NO: 10960 - DNA, 659 bp, Oryza sativa
atgcaagacgataggaaaatcacttaaccctgcagcctggccatcaaggtgccatgctctccaatcatcaacaatggaaaagtttaatgatcttatccatgcctgcgtgcctgagaatggcacaatagggtcgtggtctccgctgcacccacataagtttttttttttttacagagcattaagcgtaagcgatcaggaagattcaaaacaatatgtaaataagaaatgagcctgctgaaaatattgattatgctaattgaacctgtacacaagagcacggtaacccctggtggtgacgttgaaatggcattctatgctgcttggaagatcacgtgtgtaaggaagacccgtagggcaccttatccattccgtcaccgttccctatttggaaggtgatttattattgacttgtagattaattagcccctccgttttaaattatttatcgctttaattttgttctaagttaaacatttctaattttgactatcaatttataaaaaatcaataatagtttagcaacatatgaactatatattctgaaaacatttctcatggtgaatctggaaacatagtattatgttgttaaactatataaatttttaaaaattgctagtcaaagttagtaatttttgacaaagatagaatagtaaaaggct

SEQ ID NO: 10961 - DNA, 657 bp, Oryza sativa
tggttgtagagagtgtaagttcaatgataaagcatgacaggaagctaagattacttgttacagcttgatttcattctctctaagttcaacaactctgacgctttagtgtttttgcttgttctcccggatacaagcgtgtttttttgggcagagtttggagtatatgtagtttattatttttgtagtatatgtattgttacgattgttatttgtaccgcccgtgtttgtaaaatatggaccacaaatcatgtaacccagtagactactagaaagacaccaggtttccccctcgaactgtgcccttttgatctggcgtggtgagattggtgattggtacattacatttgtaccatcagtttgtcaggtcaagacaaattaacatggcatggactggtacctttgttttcggttgctaaatgaaatagtacaagtactttggttcgttcttttttcccatcctggtaaatccaaggtctcagttattcagatgttgcagtttatatatttattactaacatttgtctgctctgcagggctttttaccctttaattcctttacagagatatattcattattggggcctcgggggtcccaggtccatcgataccactaccgtgctaataataagtgtactgagctttattcatggtcacacc

SEQ ID NO: 10962 - DNA, 657 bp, Oryza sativa
ccgttgtcaatctgaattgtagccttgtcatcggcgcaattgagctcgtacgacagaactccgcactcagatgggtcacctcgccggcggaaaggagacgacacgctgctaagattaccacaggtgaacggagggcagccatgccgatgatgccgcccacctgcatctgggacaagaactgcaagcaaacacaggacagaaattacccgcaggatagcagtagtagagcaatgaaacacaccatgaatcgccatgccaggtgggcttgtgcagagccggatctagatggccaaatgacatgaacaataatacaaagaattttttttttagctacctgtccttgactgtgatgctgttgacttggaaacactcgacagaagcggtagagtccaagctcagcattcagttccagcattagtcagtcatgcatggttatttattgctgaaaaagactggactagtagaaatacggctgtgtttagttcagtgcaaagtttggattttggttgaaattagagatgatgtgcactgaagagttgtgtgtgtatgataggttgatgtgatgaaaaaggaccgaagtttggatccaaactttggatctaaacacagccgtataatcatatagactcacaaagtcacaaatacagccactggaag

SEQ ID NO: 10963 - DNA, 1592 bp, Oryza sativa
ggtctaaagtccatatcgatatccaataaactaaatagaaattcagaattaaaaaataagaaaaaaaataaatgtagaggttagaatccatctagaaatccattttagaaataaagaaattcaaaattaaaaaatatattggatgaagaatatagagtccataaagaaatagaatttaaaaataattaaaattccgaattaaaaaatattgaaagataagtttagaatccatatatagaaatacaatttagaaataatataaattaggaattaaaataaggaatattggaagaagagtatagaatccatattagaatcttaaaattcagaataaaactaataaaattaaagtagaatttagagtacatatagaaatacaatttacaaataactaaaattagaaattaaaaaaggaatattagaagttcgctctcatgagacacgcaaaattatgttgtcattttaatatatttgaataatacattgagaaaacatatatgttattataagagagaaactataatgatgctagctgcgcaatctgcgcgggccaccatgcttgtttgatttattgttaaatatacttttatgtatacatatagttttacatatttcataaaaatttttaaataagacgaacggtcaaacatgtttaaaaaagtcaacggcgtcaaacatttagggatggggggagtagtttattcatagtcattttacatacacgtaaaacaacttcaatctgctaggtaaataagttcaagctggactagcttacaatggtcttgtactccatctagtgtaaaattaatattagtgaacgctaattgctagattcaaatacttcgctcatagcctagcaagcaactactatctagttgagttattccatccacatcctcctcctctgagatcgcagtcaactcggaggagtaaaggcaaattgaatccatcacaggcacaggaggaggcggcgtgctatctccatcgcagaaaaatggcctcggaggcacttgcaacgcatcaacatccccttcgagcatctctatgacctcactcattgttggccgatcatatgatttcatctggatgcaccaaaacacaacaagccacagcttcctctctttctcatgcatgtcaatagcactagatatctcatcaacttgttgatctactataagctggtcatacacccatgctgggtagtatgccctactcgaatttgagtttgcatttgggtctgcgttctttctacctccagccatctcaagcagcagcattccaaagctataaacatcggatttgctggatatgacgccaaaactacgacatgccatctctggagccatatacccaaatgttcctcgtaaagccctatctgacacaaagctcttctcccttgggtacaattttgcaaggccgaaatcagcgacctttggaataaagttgtcatccagaaggatgttgtctggcttgatgtcaaagtgtagaatctgcatctcgcacccttggtgcaggtagttgatccctctagcaatgcccagagcaatctcattgagcttgtcccacgagaagcttgagtattctatagtgtc

SEQ ID NO: 10964 - DNA, 717 bp, Oryza sativa
aggtgcccgaccccttgtggggtttgcactatgtacataggtggggtgaacacggtagggctcacctaaccgcattattgcggtctggtcaagcgtgtcacgctgcatgcagcgcaatgcagcgcgctcttttatccggtctgtgaccagtcacagaccggtcagatcaacggttaggtggcgactggcggtctgacgcacgcctcgccccgtcccgtcaagacgagagcctctaggcactcgtccccagctggagctagcgtgatacatcccagagatggcacgttagccccgatcgatatatgccaggcttcatcctaaccattacaggcaagatgttgtgtgaagaagggcaaacatgcacgttgctaagctgacacgcggtggacaagaatgaccgattggtgaccggtctgacactgctcatgtcgtcagcgcacagccacgttcccacgacgcgcctgcccccggcagaagtggaggtaggtatgtgccgtcccatcagaaggacgttcggagggcaaccgtgcaaatctccgtccatttattgtcgcgaccgggaaaattgccttttcccgaacgctagtgtattaatccccgtcccaggaaaagccggggtacaccacacaaacatgatataaaagacacatctttattatatcgataatatttacattattacaaaggcacttaaggcctgacaatcaaaaataaaca

SEQ ID NO: 10965 - DNA, 629 bp, Oryza sativa
agaagttatgctatgattgccccatatgacgtagatggtaaccgtattacgtacccttctcttgggggacgaaactacaactctactacccctgttaaatttacaaaactagcaaaaccacttaaagtcggggatacagaggtttttgtagaagatgttagtctatggaacggacaggcaccgcaagactaccaacgtagtattatcatgtggggttataaaaactcgttcggctatacttatcccgatggaacgtatagtcagctaatgcagatgaggacatatgatattggtgcagttgacaccacagctaacaagattacgttaaacaagccatgggcagttgcaaacccaaatagttcagatgggattttcccagtagggcatacacttagcccaacttctgacggctccacatatttgtatttgaatggtcacgtaaatatacaagtacctactacgtacaccaagtacagccatttgattagtggctcttctgagtttgctaatacaacgattatcccagtagaaacaggttttattcaacttggattcttgttgaaccgtgatacaacaggtgaaaaatcttggctaaatgggttacgtctacgtgactatacagatacgta

SEQ ID NO: 10966 - DNA, 1539 bp, Oryza sativa
acgttcgatagaaaacaaaatgcgggacggctgcgtatggtgggacccagtcatttaactattcaaccaatccatttcccattcgccattccccatccttatctcttatgtcttatcttcttctccccattttcttctcgccatcccggtgaccggagggcaccgcaggggttcgtcgcggccgcgtggctcgggggacggcgtgtactccgccgcggcgaccacgctgccctacgaggacgcggatgggctcatcaagtacttcgccgtcgacgactcccgcggccgcgtgttcgtgttctctgtcgccgtggacgcgctgctcgagctggagcctagggtgtgcaacgagccgccgatcactgccctgcttgtgtacctctctccgcgccacacctcttcttcctcttcaccggccatgccgacggctccatcgctgcccaccgcctcgtcgagtcgtctcattatttgttttcgttgcacctttgtcgtgaaatgatgtttcattgtatttttattggatgttgcatatattattgtctttttgttgcaatcagtagttttcaactgttgcattcacccaccgcctgatcgagtcgtcccattatttgctttttgttgcatcttgtcgtggaatgatgtttcattgtgtttttaatcgatgttgcacatattgttgtctttatgttgcaggtagtagttttcaagtgttgcatctagttacaactttttaacccggtgataaaatattttctcaagactgatgaaacatttctctccaaaatacaaacaactgaaacatttatattaaaacaattttttattgtcaatgacacatttctctgcggcactgaaacattcctcttgaaacaatttttattggtcagtgaaacatttctccgtatgcgctgcaacaccgtccgatattttaaaaaatatcagactttcgatttgtagcactctccgtaaactctataggtcccgaccacatcgcacatgaccttaggaatgacaccttggcatgcatattgattcagttcaatatatatagcgacacatacagtgaccgagatatgtgggatctctcttagcctcctcctctagttgcaagttgcaaccaccagtggctagagaaaaacagaagcaaagatttgacaacgcttgacgacagtaataccacagcgaactaggcgccaccacacgcccacccctcaaccggcgtgatgacgcccgtgcgtgcgtgtgatatatgatccgatcgatggcaaccggccgatgatgtatcgtcacactaccctgcatgccatcagtggaagagagcccacgttgagctgtaaagcacagcggccactgtgaagaaccctggacgtcaatccgcgcactgttaactgttccctgaaaccggcgagagccagccggcggcaggcggcagcccgaaacaacggctttccgatcgatcgatcgatcgctgctgcgcaaacccgcgaaaatgacaaatgcatgcacgagataagggagtgtggcaactggtggcgcatt

SEQ ID NO: 10967 - DNA, 760 bp, Oryza sativa
tctgtatgatacgattataaaaatctttcgaaagatgtataggtactcccgaattgcagatgatttgggccatccaaccggtgctggctgctgaagcccaactcaattacgcaaaggcgacatccatgacgacttggcgtagaaggcccaatcgccaggccgcggctccggttacagccgtgacgacgaagcggtggctgtgcgcagatcggagttgcggcagcggcggcggcgatggcgatccggaacttctggtcgatggccgcggcggccgtcgggttccggctcgttctcgtgctcttcggcggggacctccacctcgcctcccgccccgaggtctccacccccctcacctccatccgccgccgtaagcgctcccttgctcccctgcctcctcgtcccagacttgagctgtgctgtgttgtcgccgtaattggactaatagcttgttttcctgtgtgttttgcagtggcggaagggtactggctgaagcaggcttccatgtcgccctactccggttcgttccacacatcttaatcttgcttgattacttttttttgggggggacaactgaagtcgtgaattgttgagctcagtatagggatggaattactagctacatgagagcacttttaaaagtaaagtaaattgattgggtgctacttcttctagtaagctccattaagcatgaactgctgcaagcccgcactaatggggtgtgttaaaaaaaataagcgcaaaattgccatacctttactta

SEQ ID NO: 10968 - DNA, 689 bp, Oryza sativa
aaggagagagactccgatatatccaaaaaacaagaagaaagtgaattgcatctctacaaaatgtaaagagaaaccattagtgttgtagtgtaaaactaaaccattagttttctagaggactaggagtcattcaaaatatgttaaaagaaatgttaagcacctgctaattcattagcaaataggcccaaaagaccaagataaagagctgaatctccgaccttcaagataaatcataatatggtatcaatgaacttgtgggaaaaaaatcaggacaacacaacaaaaacagtttgatgaaattttacacaaccgagggactaaatttataggtattatcatgtaatgtgtacttaccgatggatacgatttcaatattgcgacaattgctgtgtaaatgaaggcaaggaagcatggacgatgcttcagacggattgccaatggtaataccataaaaacaatgttcatattgaagactataaggaagaagcttctgaaaaagtcaaagacttcagcaaagaagtacctgcacaacccctttaatgagacaaatggaatatcattgagttagttacataatttgatcaaaactcaccataatacaccaatatttggcgataggtccttaacggtaaggataaaaccatatgtcctgcagaaacacagcacaagtcaataggtaatggcaaata

SEQ ID NO: 10969 - DNA, 1585 bp, Oryza sativa
cgcccatgcgaaggtggtggggtaaaggtccgcggctccggcgacgggcaggcgccagatccggtcgccccgcttggccgaggcgaccggcgacgggctcggtcgatgccggcgccgctccacggacctggcaggggggtggctggcggcggcgatggtggcggatgtagcggcgacgaagttggcgacgaaggcggcggactacggcgcgtgccgcgacgccggccctcgtcaagaaccttgccgccatgagggaggcgcggcgcccgtcaattgtacgccgtgcccgtgacgccttcctccatggcgccggcgacccgcactgtgcgctgcaccttcaggtccgcgccacccaggccggtctggacggttggcggctggcgatggtggaggctgacggtggcgactggacggtggtggctgatggtggcggctggacgggggtggcggtggcggtggtggtggcggtggcgatggtggctggcgatggcggctggcgacggtggtggctgtggcgctggcagtggcggctgtcgacggtggtgcaaggccatcatccgaggctgacggtgcgtcatcgtcggcagcggcatgtggagacggggaaggaggagtccgggtgcgggcgcgctgtcaagaactgtgggcggtggccttggccgaatttctaaagggacaatgttgttgatcgatgaagatccttcttgtgcggattagtggtgtgggtttggacagggaatcgcgggcgaaagccttgccgagccgtttggccggctgacgacggcgacgccgtttggcatcgttcccctccttggaggcgtcattttagattacccctctccttttctaaccatattctccgggtgaaaaccttgcttccttccgaacgagcggtggcggcgatccacgtcgcgtcctccttgggggcaccgctttggagaaacctcttcgtgcaaggattgtcaatggtctatgcattggcttcgaacttcagtcctaggctttgacgaggccttctagctccactttttgttttgcttttcttagtttgtgtcctctcttttcctgtttggtgtgttcaacttgtcttgaactacactctcttctggagtggaattttgtaataattggctgtagctctttttgagcaaaggccgagatattatattccattatctaaaaagctacgccgaataagaaacccaccagaagttttgataggggtcgacgccaaagcagataatccaaagaagccagccccatccataccaccggcaaggatagcaagagtaacaccactaactgcaaaagaaactgaggggcatccccgattagggcctccacgcatgggaggttgagaccatctcagcaaaacttgaaaccttcagccgtgtaattgatcttcactggaggtcaagaagaagaccacctcctttgtatagaactcgtcggagaaatcgagaaaggttggcgcaacctttttttcccagatctaaaagtatctcatccaacggctgggagaagaaacccggcaaagaggtgaccaatcactggctaaaaaaccggtgatgctcaccacaccacc

SEQ ID NO: 10970 - DNA, 1093 bp, Oryza sativa
tagacttaaaagattcgtctcgcgagttagtccaagctcatgaaatgaattttgtaattagtgtatatttaatactctaaattaatgttcaaatatccgatatgacagggatttaaaataagtctccggaaaccaaacagccctaaagttacgaattttctgaagtctcatcaccgaaccacccgaaacgcaacccctctctggagatcaccagatctactcgtccccaatggcggccgccgccgccacctccccggcgcgggcggcggcctggaccttcgccgccgccacatgcgtcaagctcctgctcgtccccacctaccgctccaccgacttcgacgtgcaccgctactggctcgccctcacccacgccctccccgcgcggcggtggtacaccgacgcctcgtcgcagtggacgctcgactacccgcccttcttcgcctacttctcccgcctcctcgccctcccggcgcccctcgtcgacgcctccctcgtctccctccccgtccccgacgcgccgccctccttcgcctacctcctctacctccgcctcaccgtcgccttctccgacctcctcctcctcctctcctccgtcctcctgctggccacggacgcgctcacgcggcggcggcggcggccgttcctctccctcgcgctcgtcctctggtcgccggcgctgctcgccgtggaccacgtacacttccagtacaacgggttcctgatggggctgctgctgctgtcgctgcacttccttgagcaggggagggatctcgccggcggagtcgtttttgctgctctgctgtgctcgaagcacctgttcctagtggcggcgccggtctacttcgtgtatcttttccggcattattgctgtggccggggtgtggtgaggggattgggaaggttggtgctgatgggggctggtgtggctgctgtgtttgctgctgcatttgtcccttcctgtactatgggcaggtgagttttgctcggttaatttacctttggaatggacgaattggtatgttttttttttgtttagatactgtaatccatctgtaatcatcagttcacttaaaagtaggaaattatttcttga

SEQ ID NO: 10971 - DNA, 3905 bp, Oryza sativa
tggtgaggaagaaaaaaaaatcacagtacacacatatgctgaaaaaaaattgttcccacaacctttattttaccaaaataatatgttatggagagatttttgaaagttacatacaagttatattataagttatattatagttatagtgtaattacatataagttatagtgttaaatttttaagagaaaatttgtcgacaaatatatagcaaaattggtcatcataggttgcccgtttgggcgtccgtcaccgtcgtggccgtcccgttccgagttttgttcacaaattagacgcgagaaaaaaaatcaaggagatgcggtgaagctgttggttggcgagctaactcctggtggcgttacagtatggcggcgtctttggctgattcttgtcccattgctttcgcctgctcaatttcaattctcctaatatttttatgagccggccagagctatcagcagatcgagcgtcgtcgccctcttatgattggatttcatcaccaagtaagtcattgtgataaccatccaatctggatgtttgacatacacatagacactgataacatatatttgaacctgcattcgactgtatacacttgaatcaaacccaataatggcacagtatcaacttgccaagcgtgccaaaaatcacaaccacaatatcgacttgactactccacaggacaaggaaaattgggggtgacataaaatttattctcttgcttgatacatccttacatcagagtaatcaagacaatatgtatagttatataccaaatggtgcaaaaatggaatttctttgatgaggttcctaataactacagtaccttactcagaaccaacaacttaaattggtaagagcggcattctaggcaacattgtgatgattaggaagtttcctctacactgactgtagtctttctacctttcttgccatcaacatataattggtggccatatgacataaatccccaaatggccatcagcatagctataatctttactccatccatcttgtcatgaaagaaaatcacagcaaaaacaggaatgatgggtagagctagggtgcttatcacatttgaaaacagcgatgacaccacaaagatcaatcccaccactccaactgatgctacctgccaagatatagccgtccacagcagagtcattacatatgacagtttcccagactggaatgcatgcatctctccttgtaaagtcatccattcaccacttgcaaataacccaacaagagaagccaatgttgccaccatagctgtttatatatgcatgttcaacacaactgagaacgtctccctcttaataaccttctcaaatgtgacttgcatcagggagagaatgagcgagtatgtagctgatgcccctagtgtcaacaggaaacccaaaatgtacttcccatgtgatatactagtagttccctgagaatcttcatcaactccaaggagtgaagcagaaaacgtaaggaggactacggaattgaaaatcagaggggtgaatttttgagcattgaggaaatatgagaagacagcattgaaggcaagctgactagcacagatgagcgaatatgttgagaccggaagatatagtaggccataggaatacatcaagtcgtctgcagcaatgatgaggcccaggacaacatatatcagagtaattttggggatagaaattgtaggggcaggactactagtgactgtttgtgtagaagatgtctttgaatggaaaagaaatagggcaatgaacaaaatcggaaagccagcagtttggacgaatgtggacatccacttgctattgccgccttgattgtagtagaacctcccaagaagtgtagatgcggtctgaccggcaatgaggaagaacatgttaactcccaccatcagccaccattgccaactcttgacaggagagttctgtataggtacttcatgagttgacgaagttgcagctttggatgaatctgcaagttacagaaggtaggcagtatcaacaggttagcccaaacttcatgtgttaagcatagcacggccaactgaaactttcttttcctattcaaaatagactaccaaagttcccatagtgaagtgaaaccctcctctcctttttttccccccaacaattggccatataaaccccaaaagctctaaatttattgagagaaagtcgagcaacacaagactatagctccatccttacagtattgtccattggtgaaactatcaaatgaaagcgagttacttggaatctcagggaaatcctgcactaatataaaaaaactaatataaagattttacttttgttaaatgcagtgcattactatagctggtgctatcatcaaccacttatccagctcatgtacgcgaacaacaggggtttgccaattaaactcacatgcctactctgccactcgatgatgtcacgatagtctgaaaagttaatatggtctataaacaaaaaacaaatcccatatgggcatatggccatatccaacacgccacgcacgagaaggcaattcatcgaacacctcgcgggcttacttccccacaccatcgaacaccaaataagcccgagagaacgaacgagttcatttcatctgcgtttaccgccgcccatcgcaagacgactctaacctcctcacccccactccctcaacgaagaaaatcggacatagctaaacagtgaggctttcgacagaggaagggggggaaagatttgattgacctgcgatctgtatctggacctcctcatcccggttgctaccgccgtcgctgttgccgctgtcaccggccatgcccgtcgttgggggcgctgctccgcgcgagcgcgagcgcgatccgaggcaagcggagcggtggagagagagggagttgataggaggagaagatgagaagaggtgtggcgccgcacgggggaagacaagtggggaaataaaaagagtaggaaagggtggggcgctgcagtcgtgtgaaaattgaaaactgcctcctccttctttcgcttcgcgagccgccgaccgatcccttgttttactatcgtcaggggctaaaacgagccgatctcgaccaagcccacataggggtggatatgagccggctcggctcggtctggcttgctaggataacaagccaagccagctcgttattctaacgagctagaagactggatcagctcggctagcttgagctagctcgttcagctcgcgagccaatacaccaaacccaaaaagtttgcaataaaaattcagattatcaaaccagcgttcaaatccaagtatgcaactgtatctaagtatcaaagtaatgaggcaacgaatcacagagtcaagtgttcaacaaatgaatcatcagttgaacaaatcacaggaggatgttagtacgttacacctacacggctgcacctcgtcttcctcctccgtgatgcacagggacactcggcatgggttgctcatcgagaggccgacagcgaccagtgagcatcacggcgtgggtagctccgcagttggggaccggccatctggttcctgggcatgaaccggcaagcagcgagcgtcggccactggacgctggacgggcgacggcgaagcaggatggagggagtgcgcaggcggctcaggatggagggagcggcgtgggatgtgcggaggcggcgcagacggctcagcggcgcacgggcggctgttgccgatgccgaatctggatctatcgagaatgaggggaaggggactgattgaccaagtctactagggttttggacattcctattgcacattttctttgggcctagcacgggatggactgatttttctctttctgggccagcaagttgagttatacttatgggccatgttttgttaatgtctctcctatctagctcattaagctcatgagcagctcg

SEQ ID NO: 10972 - DNA, 2224 bp, Oryza sativa
atactccgcgtgtcgaggtccgccgtgctcagcttcggcttcttcatgggggtcctcgtcgtggactcgtggtgctcaacatcgccgtggtgctcatccctcctcttcttcctcctcccctctcccctctcttcatctctctcccctctcctctccccatctcccctctcttcacctcccgccggcggagcttgcatgagcagcaccagcagtcgtaggagcaagacgggatcctcaagtacatgctcaagatgatggaggtgtgcaacgcgcaggggttcgtgtacggcatcatcccggagaagggcaagccggtgagcagcgcctccgacaacctccgctcctggtggaaggagaaggtccgcttcgaccgcaacggcccggccgccatcgtcaagtaccaggctgacaatttgttggcgacaatgccgtgccggggtgcgacggcaacgtcggcggcgccgcgccggcagggccgcacttcctgcacgagctgcaggacaccacgctgggttcgttgctctcggcgctcatgcagcactgcgacccgccgcagcgccgctttctgcttgagaagggcgtgccgccgccgtggtggccggaggggacaggcgtggtggcccgaatccgtcgtgccctcaccatcgcggcccccgcccccgtttccaccgtcctccacgccgccctccgacctcgacggcatcctcgccatgggcggcgacggcatcctctcccgtcggcgccggcgcgcgccgctccctctccgtcacgcctgagagagagagaggagagacaggaagagaggggagatagggaaagaggaggaagaagaggatgggtgagaatgacacctggggcccacatgggccccaccatttttattaatttatgtgtgaaactgacatgtgggtcccacgaggtttattgtttttcttagatcaaattgccacgtaaacgccacgtcagtgtcacatcaaatggagaccgagtcagattagccacgtaggcgtcacgtcagctaaaaccgctgaggaaccttatctgcactggttttgacagttgagggactgttgtatctgatttttcggttggaggacgaaaatcggattcgttgacaagttaagagacttcagatgaacttattccttcataattccacgtctctcggaagaagaatgttaggcctgcttcattcgtgcaaacggcagacaccgatcgcaaacggcagaacgtgtacgtcctgaggacgggccggcccagatgtaggaaaagattttttttgaaaataaaaaggagaaaagattagagcgcacacagacacactgagacgagtatcctcaggttcatcagaattttcagattagttggaattgcctttcatttgggggtttgcgttttcataaaactgctaattacgggctctctttgcactctgcaatgctgcaagcctgtcgatccctcaccttctctgagccccctctaagcttatggtcccctgtcccaaatctttttttttcgaggggacagacagggagctcctgcaattcactatagaagaagagagttgatccagtttataagggaaaccggacccaaaaaccttacaacaacacggttattaaaggaaaaccagcaaaaaccccgacattgacaaaccgaacctaagtacagccgtccaacaagagataaactcctaaaacgaagcctttaagaaggttacgccgacaacgacgacatcgtccgatcctaacgaatctaggttttcacccggagaaaactcttgaagtggagttgaacgagggctccagtagcaacgccttcaagaaggtgaacggcgtccaagggtgtcgccgttgctagcaccgagagcggagcaagactttcgccttggagcacccatcaaccatagcatccacgacaggagccaccaaatgtcacctgcacaccgaggatacctgcgatattcacaccacctgcacgacgaccggactccaaccaccccgttcccacccgaggacgcgccggatctgggcaaggagccagatccggctgtcttcctctccaccaacgccggccgacgcctagaggggcgccggaggacgccagtggcagccgcggggtgcctgcgtgctctggccaccaccggccggcgccggatccgggtgcgccaccgccggatccgcgggctgcaccattgccaccccaacgccgtcaccatccccgc

SEQ ID NO: 10973 - DNA, 1284 bp, Oryza sativa
gggcgggagtgactacgttagggagatggaggtcacggtgcgcgtcgtgcagaccgcctgcaccctctgccagcgcgtgcagagctcgctcctcctccccgcctccgcctccgcctccgtcagagtccactccaagatcgaccgctcccccgtcaccgtcgcaggttggtcttgttgccttcactcctgagcgagctcgtagcactggtcagttcgtcgccgcaatttagtatgcctccaaaatccatagcgagagattagtcaaactggagctccatcatattagaatattcagattgatactgattcattgttcttaattcagtccgaattcctaaatggaatggttgcttaattagttattgttgttgactttgaaattgagcgaccgtgtgcgtagtggtcttatactcttatgttctgtgatttcctaaggaagagaattgaatacttgcacttgacttgttggcctgttagaacactactaaataataatggtccactaccaggttcagtatgagtacaatggtagtgggtagctcatgctccatgttgccaacataccagataccagatagctcataataccacatggtcatatgtcaaatcaaatctgatctgatgcaatgttatttggcccacaaatttaagaagatctttgtgttaaatgccatcaagaattgtgactttgtggttggtatcttttggatgcaataaatttatgcttttgtggtaattggttaccagtagtaatctttccttcaaacgttattccagattggggcgtccaagcgatagtaagctggctactctcggattgctttcaagatgaaaacatatctatagtagccgaagaagatgatgagacgctatctagtagcgatggtgcagctttgcttgaatctgtcgttgctgctgtcaatggttgcttgattgaagctccgaagtatgggctgaggtccccagagaaagagctcaaagctcatgatattcttcaagctattaggaggtgcagctctatcggaggtccaaaaggaaggttttgggtgcttgatcctgtggatggcacgcttgggtttgtacgtggggaccaatacgctgttgctctcgcgctaattgaagatggggaagttgtattgggagttcttgggtgcccaaattatccaatgaagaaggagtggctcaactaccaccaacgatattacaggttgatgtctaaggtttctcctcccacatcaggatcctggcataagggttgtgtgatgtatgctcaccgaggatgtg

SEQ ID NO: 10974 - DNA, 4647 bp, Oryza sativa
caaaaagagttgacatggcttctctcaaaacaagctttggtgcctcaattccaaaatttcaacaaaatattttttgcacaactattgtatttggatcagctgtccagttccatgtatttgtttagaaaacaaaaaagatagtgatcatatgatgctatgaattgaattagtgatttgactgttccttttttattagagggtaagttgacgaagtattcttaaagtggtctgatggatccctgcctattcttgaatgaatatttaattatatgctgtcatttctcatttagttactttcaactaatactacgtgcacattcactttttcttctagtctagtattccacgcggcaaagcaacgtgtactttctagtcaaccaaggcctagtttagctgaggaaaattgttaggtttggttctcacattgaatatacggacacacatttaaagtattaaacgtagttcaataacaaaacaaattatatatttcgtcagaaaactgcgagacgaatttattaagcctaattaatccattattagcaaatgtttactgtagcaccacattgttaaatcatgacgcaattaggcttaaaagattcgtctcgcaatttaaacgcaatctgtgtaattattttttttctacatttaatattctatacatgtattcaaacatttgatgtgacagcataaaaatttttgttttaacagcgtaagttttttttgctttgggaactaaacacagcgcgccctctaagaaaagaacacgtcgccgcgtgttctttcagtcaactcctaatacacgacgcagcttccatgacacatcctcctgatcttggcatatttgccctccaaaaaacgaaggaaggaagcttgtgcgcgatctatttatatggatatcaagcccggccggcatgtaaaagcaagacggcaagaagaacaacacgaaggcgattatacatgttagaaatggctaccactagtacactgcatcaggcggttgcctacttattagccgtcatgctcgtctgcttggcgccggtgacaccggcatcggctcagccatggccgggctgccccgacaagtgcgggaacatcagcatctcctaccccttcggcattggcgccggctgcgcccgggacaaagacttccagctcgagtgcgacggcaacactccgcacttcaactacctggatgatcgtgagaaaaagctggtgagcctttccatcgccgacggcgaggtccgggtcttcgtcgacgcgggaagcaactgccacgacgaccgcttcaaagcaatcagtgggcactaccgcacgccggactacggccgcagcatcgcctaccggttctccacagcgaggaaccgccttgtcgtgctcgggtgccccgtccttggctacttggttgacgccgacgataactacgtcactggctgcacatccacgtgccggcggtcgcagtcgcagggtgacttgccgggccagtgcaccggcgagtcggggtgctgccagaacaccatgccccgcgctctcaacgtctacaagccttacatactcacgttgaataagacagaggaaccaacgcgaaacgtccccgaccaacaggagctcccgccgacggaacccgtcttccgccatctcgactcaacaaaatgccagtatgtgttcgtggcggaggacaagtggatcaacaccacctacagctatcgcgccttcatcaaccgaaccagcgacttcaccgtccccgtcgtgctcgactgggccatccggaacgccggcaactgcgacatcgccgtgcgcaacaggacggactacgcgtgccggagcgcgcacagcgagtgcttcaacgccagcgacggccaggggtaccggtgcaggtgctccaagggctacgagggcaacccctacctcgacggtggatgcaaaggtgggtgcctaaaacgcaaatggagtaataatctttctgacaaaaaaaaattaagtgatgaatatgttttgctttgccaacgctagacatcgatgaatgccaacgcacaaaggaatacccatgcttcggaaaatgcacaaacacaatcggaagctacacctgcgaatgccgaccggggactagtggaaatgcaacccaggagaatggatgcctcccaacggacaagttcacgttagctctgaaagtcgttacaggtattcaatcggccggttatcaagcaacattattaatgcacttattttcttgtcgggaactaatgaatatcattggcataccatgttcaggggtcagcgtcggtgtgttcctgttactgttcatgttgttctggctctacctggggctccaaaagaggaagctcatcagaacgaagcaaagattctttgagcagaacggtggcgtgcttctccagcaacagatgagttcctatggtggcaccagcggcggagcgggtgggttcaagattttctccaaggaagagctcgagaaggccaccaacagctttgccgccgaccgtgttcttggccgcggtggctacggcatcgtctacaaaggcgtcctggaggacaacatggtggtggccatcaagaagtcaaagatgatagaggaggcacagaccaaggaatttgcgaaggagatgtgcatcctctcccagatcaaccacaagaacgtcgtcaagttgctcggttgttgtcttgaagtcgaagttcccatgctagtttatgagtttgtctcaaacggcaccctcgaccactacatccatggcagcactctcaacactgtcatatccttggactctcgtcttcggatagcggcagagtcagcagaggcactctcctacatgcattcttcagcctcaccacccatcctccacggagatgtcaagacggcaaatatcctccttgatgacaaactcaccgcaaaagtttcagattttgggacatcaaaactggtgcctaatgatgagttcgagattgcaactctggtgcaagggacatgtgggtacctagaccctgagtacctcatgacatgtcagctgactaacaagagtgatgtgtacagttttggtgttgtcctcctggagcttctaaccaggaagaaggcactctacttcggcggatcagaggaagacaggagcctcgtgtcttgcttcatgacggctgtgagagatggccgccatgaggaacttattgacagccaggtgaggaatgagatgacagaggaggtgctccaagagattacacacctcgtgatgcgatgtgtgagcatgagtggtgaggaacgaccgatgatgaaggaggtcgctgagaagctggagatgctgaggagataccagctacacccttgggataaaggtgatgccaatccggaggagaagcagagcttgcttgacatggaacagagaaatgtggatcagaagttcagacaccaccatgactatgatcctgaaaatccagcttgcagatcctagtatttgtgccattcgggtatgacctgtgttttggggtagaaataaaatagacatattgttaccttgaatgtgcgttggtactaatcatcactatgctttctccaaaacacactcaggaaatattgctgtctctccgttgtccattcagttgcaagaaatcaacctatcagaatagaactttcagtcacaataacgttgtgaaataaccccaataaactggtggatcgcacaatcgcactggttttatttttgtcataattcttcttgtggtgttgtcataattgtctctatagcaaaataacattcgattaaggtctttatagcaagagacaaaatcaaaatttaaaattaacatgtactttacatactactagaatggaatgtttacttagctagattacatgtcgctaaacaactggacttacaggattgtttatgggcaaaaactgtgccttgtatttagatagctgatgatgtaccatgcagtccccagagaaatgcatcattcacagcttcctaataacggaataagcctcccaatgtaggtcgtagcactcagcatcccatgataaaacttttgacatcgcatccttaatacgccaatcccactgggaagggttgttcttctgcacattcaagaagcaaaaaatttgatatagcttattcggggaggctattttagcttcctataagccttctttcttgcagatttggcatgtcctaatgattcaacagcttccaaaggataagtgttaactaagtagtgtcctagagattgtgaacttacaatgccatcgagagcttgagaaagggacatgtccccatatgttgagatgatgtactgagagagggctgtgctagggtagtcatgccactcagtttgcctggttacaagtaaatttaaacacagtgccataagtacacataaacacatatttgccacttcttagtaaacttgacaacacataattgccaattggcacatcaaacatctataaaatattttgcagttttcacctggatccattactgggaaagtttatctgtactggtgcagatccatattttaatgctctaatctgcccacaaagataagagtcgccttgctatgagacaaagtagtgagattgcaacttgtaagctaactttcattgcagaattaatttcattttcatgtgtcaaaaatcagaatata

SEQ ID NO: 10975 - DNA, 610 bp, Oryza sativa
cttgcgcaacgtttactgcccacgccgcatagttagccccagcgaatacaggattggtcccagtaacggttttaagttctgacaattcaggatgctctaatgccgtttgatgaaattcttctaggtattgtttagctttttcctcagatactgttttattgggactttcgctcattttatttttgatagggccatgctctttcaaagactctatctttgtcttagttttatcccttatgacatcccaatcaagatttatgcatgacaatgagctacctactgatcgtcagacacgatttcctgcacaggcttgagccatatactcatacatcgcatcttggccacgttttccacgggtttcaaaattaatctcaagttctacgcttaacgctttcgcctgttcccagttattaatataatcaacgctagaactcccctcagcgaagggaaggctgagcactacacgcgaagcaccatcaccgaaccttttgataaactcttccgttccgacttgctccatcaacggttcagtgagacttaaacctaactctttcttaatagtttcggcattatccacttttagtgcgagaaccttcgtcagtcctggata

SEQ ID NO: 10976 - DNA, 4864 bp, Oryza sativa
tctatgtgaaggtagttcaaagtccgaccgcttaatcgtagctgctaactactactaaaaactgtccacatggtaagcacttgaatatgcatctcccatctgttgaatatatcagaacctgcaataatcatgttcttaggctcccattggatggcctaattagctaaagaaaaagccaaattaaaaattttcaaacttaattttgagatattttcactatagtttctttttcaatattggcttttaaatcaccaagaacatatatatatataaaagttttacctacaaatttatttgtatttcctaataaactgttttggcttattagggaaaaagccaaacgatggggcccttaagattatcagtttacatcgtataactgctaacaacaacataagagtagaataagatattagtttccgtttgggtgaaccctatattttatctaaaacaaaaaaaaacaatatagctcattggggtgaacccttaagagcagaataagaaattaggtcagctgcagtgagaaagaactcaacgagttcttgaacagaatattggttaagagataacccggtatgttttttgggggtcatgatccaatataccaactgattggtccttaaagtccagatgataaccaaattcgtcaatgtaatcgaatatgaaccaagaagcttgagtaaacctgaataggaaaaaaaaatgttagtcccattcgaaaaaaaaaagtagtgtggtttttcatacatgcaagacaaagtaattgacatttttggtttggataatggctgcgggaaacgggagggtttgctggggttttggacacgggggagaaaacgttttaagaatggagagacgtattctatgagaaaccgccttcttagtcaggaagcggatttacactcagtaaaagcaatataaaaacgacatctcacattctcaccacgtcgtcctgtatccatgtcgatgtttgacctccaagcacagaaatgttggaggaattgtcacccctttccattcaatttatacagtggtttcggtgaactacctggtcggatttattttctaaagaatacccacgtctcaaaataataatccatgtgtatgcaaaacaatctcaggaagttacagcgtaataccattataccactatattatcttgccgcacataaatgcggtaattccgagtcaacagttaactgctggttcagcacaaataaaaaccaaaccaaagaagaacagcgaaaaataatatctgcaattaaatgagtccaaaaaggaaggaaaaaaaattaaatgatcttcccacatcaaaatgcaacgggccgctactatttatgtacattcccgcatttcttccgatgatgccactgcagctagtgttactgatcagcagctctacatgtttttactaattaacaagaaaccgtattgatctttgcagggaggcatcccagtcttctaccagccggagccccgatgagcttgaagagtctccacggatttgccggagttgagtagtagatgtcgacggggccattggtgcagttgatgcttgagtcgacgaccctggtgtgacggcgaccacggtggcggtcaaggtagacgacgatgatgctgatgtcgtcgtggaaacggcgcctcacttctctatcgtcttcagatggaagttgacctccctcttcctcgtggcttccttcaaagcggcctttaccactctgtttgctacatcctacatgaatattcagaggaacttggtgttatctcattgtgtgattcctcgttcattcatggggaataaactcccgatgatggcatgatcgaatgctgtagatgttgtctgaacttaccgttcttggattcttgaagacaatctgcaccgcagcgtcatcgctaagatgctcctagggaccatctgaagcaaatatcaggaacatatcatttggtttcagcttgcgaacttgaattgatggttctgcactaagagctagctgctttagaggaatagggggaccaatgctacgaaacacgggatccatgctatactcttgttccttcaagtaaacatcaccaatggttctcgatacctgacagtagaagagtaaaattttagcccatgtctctagtatttgacataaaaatcttatggtatcttaagataattaggtaagtgaaccgagagataaagcctgatcaaaatatcaaaccatgtccaagtgaccaagttcattactctggtaagatataataaaagtagctgtcatactttcacacttggcactataaattgtgaaaagtaaactatgaaaacaatataactcatcgtttttcattagttttcctggataagcaagagtagctgtcatactatgcacagttggcagtacaaactgtgaaaacaaaaatactaaaacttggtcatttttgctcgttttaaaacaatgacaaatagtagtcacaagctcacagcatcttcttaaagcactgcctgctgaactggtccaagtcctggaaacgtgtaaaacgacttttaagttgtgaaatcttcaaagcaagaactttaagactaacaattactcaattagtctaacacatatgatgaactgcaccaatcaagctatgcaacaaaggttgagtaattgacagaaaggggcaatttattttaactccttggacagtaagttcaggatttctgaattcaatccttatgaagctctgatacatcatatgagaagttgcaaaatgcacgaattcactctaccacacaaagctgtggataagttatatccagaagcaacaatttttaccaccaaatcctggcatacatgcatcaaattaattaagtaaagagaagtattttctcatcgaactctcacctgaatgatccccttcaccctccacgcaaccctggtgtgcaccaggatctggccatccaatcctgtgggctgtgttggagtcacctcccgcatcgagttcttccgcggctcttcttcaccgaagaagaggaggggagggggacacaggcaccgactgcaaccacaacaccgtcgtgaggggacactggcgccggttccgaagccgccaccggcccagacgtagccaggggaggggaacacctacgccggtcacgtaggcttggccgcaggcccctttgcgttggctccgatgggcggcggtcgtgcagccggctccgctcttgcgtgcaatgccctctgcttccacccagccaacgccagccgggtcagcgtagaccgaccgtccggccggcaccagatccagctttcaccctctcctctacgtggatgcgaaggagaccacaacgcgtccggataaaggtagacgaagccgaagctgaagaggaatccaaagaatcccaagccaacagactgcgacgcatttgccgtccccgaccttatcgacgttcgggttcgaggagtcgccttgccacccagcattcgtggtgtcgcctcagccttgtcgttgccgtttgtccctcccctccccagccaccttgtcgatcgtccctcccccggctgcaacctccgtccctcttgaagcagtactgaacatcatgaaaggaggaatttatttttgcaatgcaaatgtagctaacggtttggtttatggttgatttgtagtctctgaaaatcagtgtatcgtgtggtatcaagcaactgcagcagtgtctgtcatgttctaagagacttagactgtgcaaatggacctaacaatgccatatatagttaataaaaataaatcatgagtttgcttgtcatacagagtacaatggttctagcatggaaatgtttggatttgtttctgtaatgattttttaccttatttgcttcatataatgtcctgtatagaaatggatttattggataaagtattggatgccataaaaatgccaatgtcatgcaatttcgattttgtatataactagcaaaatgcctcaaatatcattagtgggtatgatggcactgattgcattgatagtctcctgattatttcttttttcatcacttagctgtccatgttcagtgattttttcttcagtactcatcacatactatatcagttagtatttgttctctcttgtcattttcttccaggtgcaatattaagttctgaacatagtattgtctacaatcagatttggggatcagactgcacgtaggcttcctgactgatacactcaattaagggaaattaacaatcactagagttcagtttcaagttaatcggaagtaatcaattgggggaaattgagactgacaagagttccattttcagtcaatcaaaaggttaatttttttttgttcacactgacgatttccaactcaaattctgttgacgcatgtaaacaatctgagagtttagagcacgtgaaagctaggcaataaagttataacaccgagcattttgataaattactttgctcaaactgggacctaacatcaccatcagtaaaattttgaaataacattcatctataagcgaatttacttccaaacatcactttggtcgttgatgttaaaaagaagaaaaattattttcaaaagcattgtttccactgctgtcaaaaattaaaaaaaaattggctcacacctactcacctgaggtacgttcttttactaatatcgttgtattgtcttaattttgattttttttttgtcttaggaattccattatcaggactacttaatatttcttagcattcatccaatgcttcgggcatatgctctgtcggtgacatggggccgggggtatcgtgactagaggcttgggtagccgctgtcacccacgtggcctgaccctatcgggggggtcgggcccgaggatgatgtggccacccctccctctg

SEQ ID NO: 10977 - DNA, 10235 bp, Oryza sativa
tgtggttttggcgccacgtgtgtgggttaggtgagcacagcggggctcacctaaccgcatttaaagcaggttggacgagcgcgccacgccgcatttaatgcagcgcagcgctcgcttacccggtccgtgaccggtcgcagtggtgaccggtcacagaccggtcggatcgcgggttaggtggcaacaggcggcctgtcacacgcctcgccccgtcccgtcggaatgatgagagcctccaggcactcgtccctagccggagccggcgtgctaactcctggagttggcacgtcagtcccggccagattcataccaggcttcattgcaaccattgcaaggaagtcattgtatgaagaagggcagacatgtggcatgctaaactgacgcgtggtggacaaaaatgaccggtctgtgactggtctgacgccggtcacgtcatcggcagacaaccgtgctcccacgttgcatctgcttccggcggagtggaggtagatatgacccatcccgtcggagggtaattcggacagcggcaattgcaaatctccgcccattaatgaaggaatgacaggggtatcccctgtgtcaggcgagtgacggcgctgagcctcactcaaggacaagctgtgatttagcttccaggagaaggcgcgtgccaagttttggtcaagatagggtgggtccccacccaaaagaagagtaggtagaagtggtgcatgtggtatccccttgagatataaaaggaggaccttgcccaccgaagaagggggactggaggacgacatttagaatagctgaactctcttgctctccaactctctgtaactctttcacacacagatccaccagaacacaggagtagggtattacgcttctcagcggcccgaacctgtctacatcgcccgtgtcttgtgcgtttgctctctctcgcgaacattccatagatcgagggtgaagaatctcacttagcgcccccggccgaaccggcaaaggggggcctgcgcggtctcccggtgaggagccccacgctccgtcatctggcgcgccaggtagggggcgcgtgtgtctttctaagccctcgtcctctttcgtgtgcgccaagcttctcccgctcagcccaatggccgaacgggcagtggcgcacaacctctctccgagcgctagcggtgacgacggggagcagaacccgcgccgtcgagctcgtgctccaccgtccccctctcgccgaagtcttgggcgggaaaaggcgctcgaggaggtcgaaagattcgcgacttcgccgcccgcgggcgatggagaaggacggcgagacggggagcgtcgcctcctcgtctacagtgatggcagcacgtcccagggcgcgctccaggccgcgggtgcgctcctgcgtcacccgcccgtcgtccccgatccagagactccagcccgacgttggctggatgacgtggccgacttgatcatgacggcgcagcagtgcctagacgccggcgggcggtcctccgccaccaaggcctctggcgctgctaccgccggctccgtgtcgtcaaggcggagggcgcggcgagcggcggccattacccgccgttcgtccgccattccctcgtcaacgcctccgactcaagaagatgtgcgtggggggccggatgcccgcctcaatatcgagcgccggcgcaatggtcgtcgtgttgcccacgcaacggagggcgcttcctcgtccggagcgccacttcggtccgagcacgggggccagccccccgtgtccccggttggcggtgccggctgtcgagcctttgtggcgagccttcggaacgtccgttggcccccaaggttccggcccaccatcaccgaaaaatacgacggaagcgtcaaccccgccgagtttctccagatctacacgaccgggatcgaggccgccgggggtgacgacagggtcatggcgaatttcttccccatggccctgaaaggtcaggcgcggggttggctaatgaatttgccacccgcgtcggtccactcttgggaggatttgtgccagcagttcaccatgaacttccagggcacatatccgcgcccaggtgaagaagcggacttgcatgcggtacagcgaagggacgatgagtctcttcgctcgtacattcagcggttctgtcaagtccgcaacaccataccgtgcatccccgcacacgcggtgatctacgcattcagggggggcgtgcggcacaaccgcatgctcgagaagatcgcctccaaggagccccagaccaccgcggagctttttcagctcgcggaccgtgtggctcgcaaggaggaggcttggacctggaattcctccggttccggtgtggcagctccggccgtccccggatccgccgctcggtcagggtggcgggacaggaggaggaagaagaggtcggcccattccgacgacgagggtcacgtcctcgccgtcgagggcgcttcgcgggccacccaaaaggggaggcctgcaagcgaaaaaaagaaggaggccggcgctcccagcagggagcgcccgaccggcaagtggtgttccgtgcacaacacctccctccacgacctcgcggactgccgcgcggtcaaaagtttggctgagcggacgaggaagtgggaggaggagagaaggcaggagcgctgtgagggcaaggccccggcggctcccgccggcaaccggcgaggtgaggccaagcagaaggcccccgccgaggacatcgacgatggcgacgataacctggggtttcaggaacctgaggccaccatcgccaccgttgatgggggagcgtgcgctcacgcttctcgccggagcctcaaggccatgaagcgagagcttctggccgcggcccctacccatgaggcgacgcggcgggcgcggtggtcggaggttgccctcaccttcgaccagaccgaccacccgccgtgcgttgcccggggaggacagatcgcgatggtggtttcccccaccgtttgcaatgtgaagttggggcgtgtcctcatagacgggggtgcagccctcaacatcctttcccccgcagcctttgatgccatcaaggccccggggatggtgctccggccgtcccagccgatcatcggtgtgacgccggggcacacttggccgctaggtcatatcgacctcccggtcactttcggtggttccgccaacttccgcacggagcgggtggacttcgatgtggcggacctcagtctgccctacaacgcggtccgggggaggcccgcgttggtgaagttcatggcggcagtccactacgcctatctccagatgaagatgccaggccccggtggccccatcaccgtccatggtgacctcaaagtcgcgcttgcttgtatggagcagcgcgcggaccacctcgccgcggcgtccaagcccacgggcggggcgacgagaggctcagcgcctccatcccggacgcccgagggcagtgaatggtcacgtgcgacgaggtcccggtcaagggaggttgccctttgggcgacgggcccgtccaagaccacacgaatcggtggggtcttctgaatgacaaataggagaaacgcgctcgtctccttcctgcgggcaaacgccgacgtcttcgcctggagaccggcggacatgcccggggtccccaggaaggtgattgagcactgtctcgccgtgcggccgggcgcaaggccggtccagcagaaattgcggcggcaggccccggaacgtcaagccttcatccgcgaggaggtggcgcgacttctggaggccggattcatccgtgaggtcatccatccggagtggctggcgaacccggtcgtcgttcccaaggcgaatggcaagcttcggagggacaggcttctagatcgcggcgcgcttgctccttccgcgctgcctctcggagggacaggctgtccgccagccgctgcaccgcgccctcggcctcctcaagagctcgcccccgctcggtgagctcgtcctcacggaggtggagtgcggactcctcttcggcgcaggcggcttcgtgcgccgccagtgttgcctcccgggtggcgacggcggcctcgcggtctgccagctccctctccttcgcgttcagggcgcgggcgcgctcctccagcgccgtggcgcgagcctcaagggcctcttcgcgccgccgagacgccgcctcgttctccgccgcccgccgttcccgggcagcggcggcgtcaaggactccccgggcggtgtcgagcttcttctctagctccgctgcccggctcccgtattggaggcggaggtcgtcccgcgccttgttgagcacggcggtggtgatgagggcagtctcccgctcctcctccacctccctggcgatctccgccaggtccttacggtgggcctcgagctcggaggcgtgccggcggtgtgccttgcggcccgcctccaccatggcttccaccgagcgccgcccctcctcgtcgcgcgcccacgccgcgtcgagctccgcccgctctgcctgcaggacctccatctaggcacttaacccgtccagcaccgtggtgttcgcggcggctaaggcctgcaggaggggctccgcgctcagtggggcagcggaaggcagaggggagagccgcctcggtgtgggtgctgcgcggctctgtccgccgatcgacgtgctggacctgggggcgtcccccgaagctggcttgtcccaagcatcgcccgaggggtcgggtccgagcggcgcgctcgcggcctcgtcgtgggtggcctcggaagtcgtcgtcgtctcgggcggagtcgggtcggaggcttgggaggccgcctggcgtgcgcgcgccgcctccgcctcccggacggactcctcggcccggcggagtctggcctcctcccgagcggcttcctcagcctggcgaacccggacggcctcctgggcggcttcctcggcttcccggaggcggtccgcggcttctcgccggtcagcttcccaccttcgagcctccgcggtcaccgtctcctcggcctcagaccggtcggacttggaatggcggagggggtgcgacgggatctcgctgaggcaaaagaaaaaccataagacaaaaagaaacgggtgagtgaaaactcgccttgggagatgggagaatgaatacggccgcggtggacgcgggaacgaacctgcgaggaggtcggctaaatgaccaccttgggggcgagatgaggttcccccgtcatgactcggtcccccccatcttgcggagccgtttctttttccgctccccctcgggctgcggcgtcggcgcggcaccctccgggcgcctgctgccggcacgcaccgccccgccccctcggggaggagatggggaaggggtaccctcctgcttcctcttcccccgggcgtcggcagggcggctgctgtcacaccccgaagttttcctcccaagccaaaattgtaatttataaatgaccctaagaaaataccggtgcaaatcaggagaaaaccctaagaaagtaatgcaaataataatcggatttgacatgtggaattttttcttgagttctacatgtcgaaattcattaacaggatttttagtggaattttcagagctctagaaataattttaaccaattaaaattgagcaagcaatattttaattctagggaaaatcctttttccttttctttttcttttccctccctttttcctccttttttcgaatgggccgccggcccattctctcctttccttccccctcccccttgctgggccggccgcaggccgaggcccagccaggccgccccgccgccctcctctccggggtcgccgacaggtgggacccacctgtcgggtccttcccccacctcccgccgatctcgctcgcgccgccgcgcccgcaaccgccgccgcgcccacgtttccgcctcctccgggccacgtcgaccacgcccgcacgtgcgccgcgttccccgcgcccactcccctctcactcccgctcgcacccgcgcccgagatggccgggattcgattttcgaatcccgcctctctctcctccccactcccccacgtcgtccggcgattcccgcctctcccggccacgtccggtcctctctccccctatttaagcatcgccgtcgtcccctctcacttttttccacttccgccgtactctctcgagcctcccatcgctcccgcgccgtgcaaccccttgccgccgcctctcccgctactccggtcgccgctagccgccgttagggtcgccgccaggccgcgccgtcgccgccgtcgggttcgcgtggccgagatccaccccgtccacccctcctccgtcgaggttcgtcgccggagccctcgttccctcgcactcgggtgagcaccaccttcaccgccgccttcggccatggtttccggtcgccgtggttcatccccctctctctaatccctctcttctccttccttagggcaccccgaagctcgtccgcccgccgacgtcgtcctcccgtggcttgccgtcgccgttcgccatcgtattcctccgcgccggccaccctcggtgaggcatccctcccctcttttccccttcctctcctcctagtgccgcgcagccgcctccgcgtcgccgtttgcgccgtcgcattcgccgtcggtcgcatgcgtcgccggcaacgcgttcgcgcgcgcgtcgtcgccgtcgccgcggtcggtcggccggccttgagccaagccgagccgcgtgccgccgccctttttcccctctcccgcgccgctgaccggtgggccccgcatgtcggcaccgctcctccccggtccgtggatccgatccgccgtggaccgccctctcccgggccgctgaccagtgggccccgcatgtcggtgccgcaccccctccgtgctgacgtcagccctggaatatattgcgcaataaatagtttaaggtttttcttgtatagtaataaacacactgaatcttctaaaattcatatctaattcatccgagctccgtttaagcccattcaagtctcagtaaatcaagaaaaatgtgtagaatccattaaaaatggttttgttccctgtttcagtagtcttatagtctgtttgcaatgtttgctttgtatgtcgctagattccgtttcctccgacgctccggtgtacttcgagatagtcgccgaggttcctccagcagcagagcaaggcaagtcatgcttgtcacttgaacatgttgatcctacattgcaaatgctctattgttttctttcaaatattgcattgttttataatattactatgggttgtttacctattgttacagccatgctattttgataccatgctcctttgttagcttgggttataacatgattagagttaggactagggtttgcttagccatgcctagttcaactagttcacattggggaaaatcctattaatgtttaggctgttagttctaatggtaatgttggattagtgacaccgctttggtgttggttaattaaaatgaatcacatggtgggctgtgggtgcatggttttgctggtcgcacccatggcagttaaggaccggttcgcgggatgccctggaagaatttatcgtacttaccacaagccagcgtgggcaacggctgggcttgtagtgtagcttttctctagccgacgcatccaggcaagggtgggcgtgatggagtttggatgggccctgcgacggcctatgcggcttccggattcacctaggcacgagaggggactgcccgctgccttgcgaggagtaggggtgaaacctgaggtgtggtgtgcttggttagagggggttatgcgaatggtcctgtcacggcctctttccggtatgtcgtggtggcatgtcggcgcacgggaacgtgtcgtggggctgtgtcttgtgggtacagttatacacctctgatcagagtaaaactattcgaatagccgtgcccgcggttatgggcggtcaaccagattcaccgtgattagtctcaccttagcgtaatcttttgaaactggatagtttaggtggatggttgggcctgtcgcaacatgggttagcgttggacagtggatagttaatattaattaattattacaactgtttaatctttcaacttctgtttataaatgctcgctttatgcaaatgaaccactttagctcttctttgataattccctgcatcatacccctattccggtatgacttgctgagtacagtgggtagtactcagtcttgctctacttttcccaaccccagagttcgagttcgggtcagatgaaggtttccccgaggagtaggcttcgtccgtgccgtcgaggatgcctgtggagtggtgttcccgctgcagttttagtcaaggcttagctcttgttgtctttcttttcttccgctgcatttatgtaagatttttatgatgtttgtaagacgtggatctgaatgtcaacattgtcgtttgtgtaccccggccggtcctggacggggattttaatgcacattctgcttgaaattctattcgggaatttctgggcgtgacagctgccccccaggcccccgtcgtggggcccagaagcacgaccccctcccggggtagattgttccccctgcagctcccgcccgcgccatcgtggccacggagggcctgctcccccgacgccccgaccgcctgcatgatggtcaggatgttggcgcgctctggatcgcagcagagggggaggactccttgggggatgagggatgcctccacggagctgagattcagcacccgttggaccaccatcttgaagtcctcagggtcccagtcccatgtgcgcccctggtgggtcctcatgaagtcctccggcccggagtactcccaggcgccccgggcgcgccgttggagcggcgcgatccggcgacgaaggtagtcgccgaacaccatggcgccagtgagtccctcggatcgcagacccgccaggcggtcaagaacggcgtcgtagccgtctcccagatctaccgtcgcccgccagctggaggcctgcgccgggggctggctcggaagtcggaggcgcgcttcgtcggcgaggggggtgtagaaccaatcgctcttcagtcgtccacttcttgcggaggacgcacggaatgtagcggtgcagcacctgcccccgcggctggaagtagcagccaccgactaccgacggcggcggcaccggctgtacggtgaagaaccaccggaacacccggagagatgggcgcaccccgatgaacatctcgcacaggtgtgggaagatggccaacgtcattaccgcgttgggggtgaggtgcgccatctggagatcataaaactccagaatatccatgaaaaaagaagagaatggcgggaccagccctgccattgcgaaagagaggaagaagacggaccgccccgggtagtgtggcgccgggcgtccttcgcccagcacgaccacctcccggctggtggcagattccggcatgaatcggcgcggcagcccggcctgcctctcgctcacgatgcgggaaggcggcagcacgctaccatcgagcggtgcggagccccgtgccatgatgccgacggaggaggagcttgagagcgagtgagtgcggcaagggtagggcacaggaaacaaagagttagagctcaagtggcgaaggcaaggggaagaatggtgagaggaaggaaacgaatctcttccacggcgtctttatacccttgccaacgctattcccggctcctcgtttcccgcgcccactacctcgccccctcgtttctcgcgcccacgcctccactaacccaactcgcccgtttgcggcgcacgaggcagatgtgcggccgtagcagttgagatgggacagatcgtgcgcgcgttaaccacgctcgctaaacgcgaaaagcgccatcatcacgcctccaggcgaaacgaaccggctcgtcccgattcgcgcgctgctcgagtgatgtagcggtcttgaagaggccgttcattattatcggtcgattttcccttgccgatgcgcgcgacttgcgaccgctgggttcctgcccacctgtagagaccggccccacctgtcaccaggcctaaagagtggcgtcacgcccgagcgcttccctcgaggggggcgatcgccctggcgtaacgccgggggctactgtcggtgacatggggccgggggtatcgtgactagaggcttgggtagccgcggtcacccacgtggcctgaccccctcgggggggtcgggcccgaggaagatgtggccacccctccctctgtctccccgaggggt

SEQ ID NO: 10978 - DNA, 5719 bp, Oryza sativa
agatatgaccaatccgtcggaggtcattcggacagcgcaaatgcaaatctcggcccattaatgaaggaatgacaggggtatcccctgtgttaggcgagtgacggcgctgagcctcactcaaggacaagctgtgatttagcttccaggagaaggcgcgtgccaagttttggtcaagatagggtgggtccccacccaaaagaagtgtaggtagaagtggtgcatgtggtatccccttgagatataaaaggaggaccttgcccaccgaagaagggggactggaggacaacactgagaatagctgaactctcttgctctccaactctctgtaactctttcacacacagatccaccagaacacaggagtagggtattacgcttctcagcggcccgaacctgtctacatcgcccgtgtcttgtgcgtttgctctctctcgcgaacattccacagatcgagggtgaagaatctcacttagcgcccctggccgaaccggcaaaggggggcctgcgcggtctcccggtgaggagccccacgctccggcatgctccattttatcaacttatcatttaatgcttttttttagtgagcaacaactgtaaacagtaggctgtattgctgtaaacataaccattgttgggttgagatgtcaaattctgtatgttgcattctgtattaaaggagtgtgtgttcttatctgagatgttaagttcatcaattttttgttcagtatgggagttggttaatggtttcaaatttttggggtattttacaggtgtttgacggttatggtcgtacagacgaagcatcttttgtttagaagaacttacaaaggtccatgatgatgcttggttgacttcctcagcagcatccacaatgtaatcaagagtgcattttggcaagtatctcaaaatgttattctggtggtactcataagatttggaaggtttgacctcaggggccataggatctgtcccttgtgctgccgcctccaccgtaagggggagaagggagggccaagtaggaggagatagcgggcatggcctggtttcacgacagacgccgggaaggaggaggttggagggcgaagggttgatgatggccgcaacttgatgccttggtgacagctcaagcggtgtgatggtggtgtcatggcctccagatttggcagcgaggaggttgtggcagcacctcgggttctgaccttctatatagctccttctgcccatgtaaattttctgtaaagttctcttgtgtgatgtctattcaggccctcctccccctgattctttgatggtttaaaagatcgattttgtgattgtgttggatccattcatttttgttaaagattgattctgttggccgtgttaagatttattcgaggcacaggctcttccttcagtttatgtgatgcagaatgttggagaaacgggaaccggagtcctccttcctccggggccctagtgcgccgttggctatatatttatgcaatcgattggcctgacaaaaaataataatgtaatatgatataaaatttgttcccattgcaacacatgagtgaaatttcaaatggtattcgagaattcaaatttgaaatagtaatatcgatctaaatttgataaaaaaaatgtatcaaaatttgatgaaaaatgtcatatagctgagggttggcatatgacactaaatcgaaaaggtgaaccttagctacaaaggcttagttgtgtctggattataaaaaattaatcatgccatataattcacttaatatttcatatcttttaattcgtaaacaaaatatcatttcgtaacaaaatactagctcagtagctctcatggctcatatttatctttgatgaatcatgaaacggctattgtcggggtaaatatctagcttcgaacatgatatcttttgatttccattgtaacacgcgggcacacaactagtatacaagataaatcaagacaattgtgggacccacaaagcccggagaaaacagtgcaggtgcgtagttcaaaatttgaacagtacgtgtgggacccaccgaaaatattaagcacgttttctaaaaaaattaagtgggacccacaaaagcccaaaaaacaagcccaaatacctggtccatccaatccacaaaagaaacaagtcaacatagaaggcccatatgaattataaaagtccatctctcagcacgaaggaaaaagtatacttcgactccctcaactatcgcccaagtatgatttatgtcctccaaccacaaaaccgggtatattaactcctccaactatcaaaaccggtgcaaacaatgactctgggtggttttggatgacatggcgcctacgtggcagtcttggcgcttacgtggcattagaataaaacaaaaaaataaaaagaatatgtgagacccacatgtcattcacacaaataaagtattgcatgtgggacccacatgccatcctccctatccttcccttcttcctccttcctccctctgtctctctcccttatctctctctcctccggccttccgccccgtgacgagctccaggatgagcacgccgaagacgccgtagatgtcgcacttctcattgatccgaaggctctggcacgccagctccgccgccacattccccataccgtcctggaaccggctgctcatcacgtgcttgtccagcttcggcagcagtcgcgccagccagaagtcgccaatcatcgggttgcactgctcgtcgagcaggatgttgctcggcttcacgttgtagtgcaccctgccctcgccgaccgacgcgtggtacaccgtcccgaacacgccgcggccgatctccgtcgccttgctcaacagcgcgtcgcgccgcccacgaagtcctcggaacggaggaggctgttccccggcccaaacgtcaccatattgcccgtggcaagcttgctggacttggtcgagcttgacacgatgctctccagctctttctccggagtcgtcccgccgtcgctggccctccgccgcgccgatatgttgagcagggtagatgccgaggttgccctcgagcgcgctcgcgtcgaggctctggaacacgcccgacgccggcagccggccgacgaggcggttgtgcgagacgttcaccgccaggaggctctcgatcccgctcaggttgttgtactctagcctcagaatctccagcttattcagctccgagatgcccaccagtatcggccctgtcaagctgttgtgccccaagctcctgccatagcaaacccgatgcatcgatcaaacgtcatgcaattcgtcgttgtcgtcttcaatgcaacgaggacattgtaaatgtaattagcaattttttgacttacagttggtacaggaacgaacagttgccgatgttgttggggatggggccggcggcgagggatcagttgcagtcgagctggagcacggcgaggttgccggcctcgcacaggtcgctcggcattgtcccgtacaagccgctgctgtggaggtcgagcacggtgaggttgtggagcaggccgagctccggcggtagctgggtgcggaggtcgttgcggtacaggttgaggtagcggaggttcatgaagagcgccatttccgccgggatgcctccggtgagctggttgacggagaggtcgagccattgcagggtctccgccagcttcgtcgagcccaacggcacgacgccagagagcacgttcgacgacatggtgaggagaaaggccggggaagagagagataagggagagagagggaggaagaagggaaggaaacatgtgggttccacatatttctttttatttttttattattctaataccacgtaagcgccacgtagggtagagactcggtcaaaaccgccacgtaagcaccgtcatccaaaaccacccaggggcattgtttgcaccggttttgatagttggaggagtcgatatacccggttttgtggttggaggatatgaatcatactcggacgatagttgagggagtcaaactatactttttcccagcacgaatcttgaacagataagggtccaaaaaacgaaagattaagcccaacagagaggaatagcaattccgttattttattttcacgggcggcagaaacatcttttattttttattttttataagtagtagagatatatatcagtttttaagaatactttccttgtaatttagcactccctctattcaaaacataacaattgctagatagattggtattagaatgtcttatccaaaaaaaaattaattttaagatggagggagtaatacactgcacagcggcaacagcaggagcagctggcgacaacatttcagtttcaggattgcatttcacgctcattccattgccaacatcagttcttaatttagatcaatatcctgtcttgtctggttatattctgaaattctgcttcgatcgaggaccttgcaaccctgattctcagcttcactttgtgctctcccttgcaacaacaatccatactggattcaaaattgtatttgaccaaacaggttttgcagtcccgttgcaggagacaatacgtaatactccctccttccatttgaactaaccaataataacaataactaacagataatatatagtgtcaactccaaaagttattcagatcatacattatgatgggtagaacagggtgttgaaagattattcagaagatatcagcgatgacggtgccattagacacgtggcatagcgacttgttctttttcattcgaagcttaagtttggtatttccactgccatcgccgtcgtgtccaaccggcaacacctccacaccggtgaagacttcaatcctgtcaattatttcaccgtcgtccatagacacaatgcggaagaatcttgcaatgcagaacctgcccgagcccaggttgacaagctgcggatcatgtgattccagccaacccttaggtgggtcaaattccttccaatcaccaataagttgtggctgggagtgggagtccatggtggagagatcagcagcagccaacggcgacatggtcctggcctcagtcgagaagccaaaccagagcttgagctcagggacatacacaaccttgccatacaagggtagattcccattaccgacttcccatgtgtttctcgctgtgtccaagcagtaggttgcgttgcagctgttgtgggatatgcagatgttagagccgaccactgcataggatgtgatcttggggtaggtgaagcagcaggtacgatcagagacgaatggcggtggccggaggaggtggcagttccatgggccctcaaagatgttgctgcacacaaaggcctcaaactgatcactcagcttcacatcgcccttctctggctcaggaaccctctccatgacatagaggctgccaccgccaacgctgggatggtcattggcatcagcagtacttgggatgaatagagagatgggccgtgacttgggcttgtggaggtttgggatactcaccacggcgcgcgtgtcggcgtcacaaaggaacatacgcctggtgtggtccgctattaccaccttgcgatctacaagggggaagcagtcgagagaaatctggtcggatccatgtgtagaacaaaacttgaggatgggtctgggaagccgaatcctctccatctttaagcctgctgccttcttcttgggattacaggagtcggacaccagtgtctgagaggtgtagtcttcttgcacagctgctgact

SEQ ID NO: 10979 - DNA, 662 bp, Oryza sativa
gggtgacgacgaatggcaaccggcggcgagctccaactcctcatcaaagtggtgacgaagttcttcaatggccaccaaagctgcctcctgatgagcgtgtggatagtttcttcctccaagcttcaaacatcattgacggaaggtcttcacgatcactgatcagcgtcacgcgaacacgacacctcctcgttacggtcatggggaatttggctatactccggggtaacatcatatcttatggcaaacaccatcatcctcagctccctgatgaatcctactacactgatcaaactttctggttgacgaagtggcttctagagaacacatgataagagggagagagagagttaatgcattgattcaagttgattgcacaagcaagttaaggaaaagacactcccaaaaggattaaattaaacaagatttttttttaaatggtaaagaagcaatttctggatttttttaggaatttcaaaattttccttttttagcaaatttcctttttttaaaattttaaaatttattttctataaaatagcctatacagtactttgtaaaataaccaccttttcaacaaacagaggcaatcaaagacagttttgtcaattgacttatcaaaacgtgttttttttacttatcagaggcactagacatacagacgt

SEQ ID NO: 10980 - DNA, 655 bp, Oryza sativa
cgctaaggggttttgttttaggaacagacggcggtgttttgctgacgcctcgaatcgacgcttttgttgcgacatgctaagttttcccccctattgctagtaggttgatgggtcgcacgcccggcacacatgttttggccttgcttgtgtgtccataactcaaaataggtgacctaacggccgccgcccgactaaacataccaatagtcaccaaattcatatgggctactgaggagtaggcaatgatcttcttaagatcgatctgtcttaaagtggtcaaggaagtatatattatagcaatcgcgcttagagtataaatgaaaggagtgaaacaaagtgtcgcttcgggaaacatgggtattgaaaatcttaaaaacccgtaggttcccaattttaaagaattcctgccaagatgacggatccagccgtaggtgcctctacatgggcttcgggtaaccaaatatgaactggtaccataggcacttgacggcaaaagaggcgaaaaaagcaatccatagaaggatttggcgccgctcactaaattctgtggttaataaaatttgtaaatcggtggttcctgtttggagaagaatcaacagaatagctaatagcataaaaacggatcccagtaaagtatataggaaaaactgatatg

SEQ ID NO: 10981 - DNA, 3462 bp, Oryza sativa
  unsure (1)..(3462): unsure at all n locations
aattatgtttattaatctttaagagcttagcatacatatagcatatcaagtcatgtgttgcaataaaaagaagatgaacccatctataatataacaagcatgcattaaagtataatcatgaaccgaagattttacaattaagtttgaatcaacaatcaaaattcatgatttcatacgatttataatgcaacatctttacaagcacataggttgaagaataaacactaaacatatatacctattgcatttatcactctttctcaaattagctttagcacaaaacaaccaagagaattttttaactttttcttttcttgagcctttttgcttatttttttctcaattattccgggtacgtccctatcgtcaagactgtttccagggattcggcacccattatttttgctcacatcgaatacgtccttgtcgtgaagactgtttccaaggattcggtattcatttttttcatttttattctctatgcacaatgagcaattacaaagctatttgaggaataataattcaataaagcatttatagatcaaaccatatgctagcatcaatattgcatatttgcttaattcaagtagaatgtaagtgtcatgcatcatctcccttaaaagcaatatctaaacctcataaaaagactagaatacatacaagctatgctagagacaaataaaccttcatagtattgctagcatgcacaagaaaataccatatgtatggaacaaagctcttttttttttaatttttctcattgtcatatttttgcttgataaaaccatgaggtacgaaaaactccccctcaaacaatgccaaaaggattcacgaaaaaaaacacaaactcccccctcaaattaacctctaattctccccgaagaaaaatcaagaagaaatcaaagattttgaaaaagacatccaattgccaatgaaaccaccaagattcttatgaattgatattcaaccactcgtataaaccaaaaccactacctcaaacactagcacttgaaaagctaataaacgaggaagtaaaaccaaagttatatcaatcaaaagtaaattgatgttaccttgaaagcaatcgtcatctcaacattgaacgctcatggggagtatgccatcaaaatacctatgaacaaaaagatgtcgaggcctccgtgttggggttagaaatgtaactaccccaggtaaccacgtacctagaatgccacaccaaaatacactcaaaaactaagtcctaaaattattagaaatttcggcaaaatctcccctaaaaatacggacatcacgacaggcagttataagaaaggtcaataccgatataagccacacaatccaaaccatcctagctccacaaatcccacgtgaaaaataaggatcagaaccttaaatgacctttacaagttctatgcaaaacttttgctgagcaaaaaatagtctaaaactaatttcaattgtgtgcaataataatgtgtagtccaagggtgctactcccgccccatgccgatcgatgtcattaggtacctaaaaaccaaattaaacacaagagtgagtaaagaatactcagcaaatacaatcttgaactagtaaaacatacgcatgatttatgcattaagaaaccaatatgaagggttggatttactttatttttaaaccaaagaagtcaaaagatagtagttccctcccgggcaggtctgaatatcctcttagcattaccggtaagccgagcaagcgtgatcagcgcttctcaaggatcatgaataaagacccaaattgcactcccatggctacgcatggttcttgaataatgtaaacagaacatccggaataatgaaacatgaataacgtcatgaatttgaatatgggtcgaaacacgaataagtagcataacgtcagagccatacaatcagtaatatcaagcaattgaataataattatgcaagtaaagccaaacaaaacaactcagtttgtccatcacataagtctgtcttgtacttgccttaactccttcgatactccgactcaactcctccaacgttggaacccttcacacctgtggagcaaaactacgcataaaccactatattcaactaacgatggttacaagggatatttactaaaatcgaaacctagaacatataaaccttttaccgatttgattaaataacctatagctgntccattactggtttatgcgtaactcacaaaccgtctaacggaaactagcaaataatacaacttcagacatctagaaaaaattctctacaactttcatgttgagcacaaaatcagattatgcctctgaaaatcccagattaaggaaaacgaactactgtcctgagttcctgtctctgtcagcagnattggttttgctgtttctcctaaaccggttatcggaatcgagtgaaactagcaccggtggaaagatatcgacaatgactacaaactttatttaggacaactaacccgattcctgatgggttaataccagatttgaaaatacggtttcagcctagcggtcgatataaaataaaattcaaaaaaccgggaacggatcgtctttaatataaattagaaacaactatagactaaaacggattacctagcagtactaatgtataagaaaaacgaagaatttggaaatattcaccaaattccccaaatttcccttcttctatcaaatttccccttctttccttccttcctgttcttctctgccttctctccctccttcctgttcgttgcaggccaacagcagcagcagcagaaacgaatattggcagcaacagcaagccgtgcatcaccagcaaggaagagatcagatcggcaacagcagggatcggcagcagcagggaaattaacagaaacaacagtagctcaccaacgaccggctgtggacgacgacggctgtggcgaccggcgacggctgcaccagcggcggcgccggcgaagacaggaatagcagcggcagcggcagagcgcacgaggtgcggcggctagggctacagtagcgattctcctgttttttttttcgtttgttttttttgtgggttatataaagagactaaataagatctaacggctcacatctatttaatcctcgggacttcgttcggactccgattactataaatttatagtctattttgcactactcggcgagctctacgcatccacggttcccaatcgcctatacgaacaatggtttaaaagttgaacttttgcgcaattgctctaatactccgcgaaatatattaatttaaaactcggggcattacaagaaataagaaattttggaatccaacactgagtcacatgaccagtagaaccagtaggcacatatgcactaataaaatcagaatcagacttacctgaaaacttaccttcatgcttcacaatagtctaacttagattatgcacaaacttgcctcgatgccaatctgaccgccactgtacctg

SEQ ID NO: 10982 - DNA, 1111 bp, Oryza sativa
gtatttggccacctttccggccagagccaactcggcctgctgtttgttgccccagaggaggacaacatggagacgatcgtcgcgcaggatgcgcttgtaatcacgtggaactcgtcgccagacaccgcagatcttgcccgtggcattctgatagacactgagagtgcccgccaaggtggtctccagttgatgctcctccaggattacacccgcatcatcaacgaattgaatggcacgcggacgaccgattcgcgatgaggtgtagaaggagtagtatagattcttcttgtggaacaggaaacgggcggtggccaccacattctgcggattgtaggtggtgtacatggacttcatttcctcacccttgaggaaataggaggtgcggcccgttagcaacgcagcgtaatctataaatagggatcaaatgaaaggtggagataatccaggtgttagataaatacaatagttctcttgttaattaaatgtaggagctggtgaatgggattacaatttcccgcaggatttggcggattctattgggatctgggtgggtgtccggtacttttgtacttacgtttcatgttgcgctcttcctcttcattgggcacgggcacatccaaggctacatccgtatctgaaagatggagggaatacaaatagagaataagatgatgctgggcgataaggtacgaccttaaatggaatttagatagcaacaaatgcttcaaagcaaccgaaccgccgccagccattcaccatccatccagccagccatccagccagccatccagccagccaaccaactatccatccacaatttgtggacacaattccggcattcaaccaaaattccagttgaatgggtgaatggtgaatggctgaatggacgaatgccaggggatcatcatgaatggcaatgcaactatcaggtagagatcccacctccgaactaagaccttccatttccacctctcgcttccacccaggtggcattcattaatcgtgcataaattgagggcaggtagaaggtagagtttctcgaacgggaagtctaacctacatctaactagggaagtgctttgtatttgaggatgtgcggactctggggttc

SEQ ID NO: 10983 - DNA, 623 bp, Oryza sativa
gaaacctatgatggcaagttatcaaaaaccaatatgactagcccaaaagtattaccacagaaaagaatacgaaggaatcataaccacactggaacaaatgcacagaaaaataactctactctaaacttgtagttgcagaacaaggactaagtctatctaagattgccacccatgcacacatgagcatcccatgtacacatcaattacaagtcatgatgtgctactaaaagttctctttcatctcacatatgtagcaaccaaatggttctagaaaacatgaaaaacactatatttcagaaagaaaaactttactattttttttcgacagcgtcaaataaattactgtacattacataaatgcaaacacacaaacctgaacgttaagataatcacagatagcatctaatatgaactgtatctcatcctcatgtggttcaggaagcattgttattgctgtactagagtcggatgtaccagctactgtcctttctaaccatggcagcataaatacaactctaccatccttggttttagggacaattagcccaatcccatcaggggaataataatcaggaagtacaatgtgcactccactgcttggactgatcatgggcactacgtaa

SEQ ID NO: 10984 - DNA, 8939 bp, Oryza sativa
agggtgtgaaatagacttctaccattaaaaacgatataaaagtttgaattcatgagttggaaattagggttcccatggaaattcaaaatttttactagaaaagtttagaaagttcgagctgaaagtttgagtggtattgttgaaagttttacagtagattgctaaaggtaaaaaactcactgctcaattatccacagaaaataaaaaaacaatccctctatttatgtgttagcgatgctaaaaattaaggctgtcaaaagagaaactctaggctcgtgagccacttgagctcagctcattcaggcccagttcgggctcagctaaaacttcaaacaagcttaactttatatgacttacgctatttatttagcttgtttatttgttaattaaactaataggtaaaatatgtattagtactccctccgtttctaaatatttaacaccattgacttttttaaatatgtttgaccatacgtcttattcaaaaaataattaattattaatttttttcctatcatttgattcattgttaaatataatttatgtatacatatagttttacatatttcacaaaattttttttaataagacgaacagttaaacatgtgctaaaaagtcaacggtgtcaaatatttagaaacggaggaagtatatatgtacataatgattcagtttgtgtttgtaccatttttttattgatatgattagaaaaataattaattttatgaaaagcattcttaaaatatatgttatacacttatatactatatactacttactgcccagctcgactgcatgagctcaaattgagcctgcttaatagggaagtggattttttttcccttgagacaacatccccttgttttgtgcatggcgtttaaaaagttataaaaaattttaaaaaattatcaagatggatcaatatgtgatatatcttttcgcaaacatgcgagttaaaattaggcttatacaattcaaaacaaaaatgacaaatttgaccgtgaattacatgttctattaatagttaaatttgttatttttgtttctatttgtataagttaaatttgaatttgcatgtttataaaatgacatatcacattttgatctatcttattaattttttttatgaggagatatcttttttaagggatgaattgagttttaatagctccaatgcggaaataggccggacctagaactagggtttaatatttcgtttttttctccatttgtatcgaaggtgacaatattccaaaattatttttttaacaaaatttggtgaaatgtgaacaaataccgccaaattaaaaaaatcggttaaaataatatcattttttatgggggtggggttggggggaatttttttgaaaataatacgattttaatggaaaatcgcacaaatatatatcagtcagacaaaatcgcaagtttagcatcctatcgaacaaccgtggttcgacatggcacctatggaataaccacagttcgacaggtgataaaataatttttatgaaaggaaaaacactgtagcatcacacctatcgaacactacctgttcccttgttcgataggtccctaccgagtactgttgttcgacagtgtattaaacttgtaatttcctcccacccatctatatttgtgccattttccattagaatcgtattattttcaaaaaaaattcggggttggggggggggggggggtttgcggtgtgtggggtggtgaacttgctgacgagctggatcgagggcgccacgtggacagccctaccatcaacaaggcatcagcggcgtcacgtcatgctgaaaaaaacttgtgagccccatccccggaagcgacatttcactcgtagtactccgcaccaacacgcgcaagcatgaccaaagcatttttgtactcactatgcacaaggagctgatgagctggtcggggcactcctcggggtcctgcctctgcaccgacagcagcacgccgatcatgctcctcggcctcgccgccgccgccggcagctcacgcccgtcgccgtcgtgctccatctccttcctctggtcgtcgatcagcccctgcaggaacctcgtccggctctcgcgcagccgccacagccgccgccccacccctcccacgtccacccaccgcagcgccgccggcaggaagtcccacaccgtcgacgccccgctcagcgccatcgtctcctccaccatctccctgaaccacctcgcctcctcgctcacctcgccgtcgtcgtcgctgcacagagttataccagatccatggtggttaaccaaaagaacttacgagtcatgcatcatggtgatcttacgcgccgtagtaggtcttgtcgcagatcatggccatcatggtgttcatgagcagctcgaacagccgcgacttgagctccacccgcacgcgccctgcagccgccccggcgccgtggcgctggcgcgacgccgcgcggcagaggcgtcgcgccgtggcgcgcgcctcgcgggcgtgggcgccggcgaactgccgcacccggtgcgcggagaggatctcggcgacggcgacgcggcggacgtggcgccagtagggcccgtaggcggcggtgcccatggtggaccagccgtaggacaggatcccggccgacggcaggcgggggcggccggcgaacgcgacgtcgtgcgcgccgaggcactcctcggcggcgggcgcggacgacacgacgacggcgacgcggcgggatcccaggcggaggcggaacacggcgccgtggcgggcggcgaggcgcgccagggtgcggtggagcggcttcctgaagaggtgcaggtggccgacgagcgggaggcccggtggctccggcggcagccgcagccgcagcctcccgcttcgccggcgtcgtgcggtcagcagcagcaggaggaggacgagcgtgagagcgatgaggagagtggaggtgtccatggatctgggaactgacgattattgtagcagttgcagttgcagatgcggcaattttttcagccatgcagacacatcgtgcacaacccgccagacgaccccatgtggtgacctgccactaccggcttgattagaccagccaagcagcaaggcccaatgtccaatgtccaatgtggaccatgttctggttctaattttgtttatttctatttttttttaatttaaatagaaaaaatatccgtgcgttgcaacgggtgaagactattttaattgtattattgttagatttttttttgtctaaaaagtatatgggatttttattttgatatgatatccaattcgaaacccttgtatttttaaaagcaaacgaattttaaaaccaacttaaatacggacaacatactaaaactatcagcggaaacaacttcacagcggaaacaacttcagttttaataataaatcacttaatcctaaatggccgaacggaatcatatgttgaaaaaattatgttaaaaagaatcatgtgtagatgaatccttcacaaaataaacggacatgcatgcaagccacccatacaaaaattagtatgtttttcatttgcatgtgtacaaaattattgaaataacacaaacaaatctgtaataaatagtatgtaacatatgcttagaagataggcaatatttttcactgagacagctcgaaataggaagacagattgtgatagacgttgggcccttttacaattttaggcccatatgtgcaaaaacgtattggatgtgcagagaaaaaaaaaaaggaaacgtgaatatggtcaaaatgctaaaaacatatatgaatcggaacaagacggcttgttggaatgaagggacggcggacgaaaattcgatgagtataaaattatcttcaatttttataataggtaaaggttacgacggaaacattttgttctcttttgaagcatttttttgtttttttttgccttttattattttggatggatttttttcacggactggtggactgccttttttattgttgcatacaaaacaaatctttattttttgtttttttgaaggaacgaactttttttcgccgctctgggggaatcagacttttcttctgggggactttttcactcttttttaattttttttacggatggtttttcacctttcttagttcttacgaggaatcggacacgttttctttttaaggcggcccaattaattcgctcagatggaaacattaaattaaaacctatttaaacacgggtgacctactaaaatctcgataaaaacaccttaaatttttataatagtagagatagagataaagaagagatagagatatatggtttagttaagatgaaacacattgtgttaaattcgtttggatatatattttgttagaaaattatgagttgtaattagagtccaatcatctcaagttaacctgcgagttttttaaacagatttcttttacgattccttatatatttacaaaagcaaacgaacttaaaatcaactcaaatatgaatttgtatttataaaggcaaacgaatttaaaaccgactcatacacggatgacgtaccaaagtaccggcaaaaacctctttaatttttataatagtagagatttagagttttttcatctcatctctgaaatttcttttccctaacatttatttccttgttcatttttccttttagcgttcactcctacgcttggatatataatcctcatgtaccttgagatattacgtactccatctatcccaaaatatgagcagttttagctctaaatttaaacaataatatatttataggtaaaagttattatattttaggacgggcttagtagtcatggtcgatcataattgataagaagtactatcattaaaaatttacacatatcatcattggtatctaacagatatcattgttgataaattgatatttatcatcaccggtacctcacgtgtatcatcagtagtacgtacatgtatcatcgtatattcattggtgtttacatgtatcattaccagtacttcgcaagaatcattactgattcctacatttagagcgtccccagcagatctttcatccggtactccatccgaaatatagcgcatgagaggagaaaacggcgctccagcagatacggtatcaaggcctcaaaaaatagaggatgcaccaaatcagggagagttcggccaaatatggcgattctctctcctcacgccaaacctcatcgcccgcgctcctgcccacatccggagttccggatcaactttcctccatcgcaacctccctttcgtcgtcgcccggaggtatggaagtagagaggagagacttactggatctggcggcggaggctcggagtagaggcggaggcccgcccgcccgctcgccgccggctgccgttcctctgtcgcgacaccgccgcccgcgcccgtcactcctccgcccgcaaacccgccgcccgcgcctgcagccatgcggccgccgcccgtcgctcctccgcccgcaaggccgccgcccacgcccatcgctcctccacccgcgaccccgccgcctgcgcccacgaccccacggccgccgcccgtcgctcctctgcccgctccgccaccgcccgcgcccgtcgctcctccgcccgcgaccccgccgccgcgcctcgccgcccgaaaccctcgcccgtgaccccgctgcctccggttgtccgctgagggaagagaagaggagagcagtagtagagaagacaagaggagagcagaagaaaagagtagtagtagctgtacacgcggctgctatattgattttggaacgtttacaaacaaataacgattttacagtgtcccatatcattttatttgtgttgctatgattttttttttgctatgattcactcaattcaaatataccaattaaaaattaccagttaaaattatcactgttaaaattatcgtgataaatagcaccgcgttaaaatttagttgttcaaaatatatcccttaaaaatagaaatgtaaagttagttaaaagatattataaaaaattggatatggtatagatgatctgctggagtaggaaaggatacgagtgaggaatcttttttggatggctatccatatgggcatatggaggatgagatttggatgagctgctggagatgctcttatggtcattggtacctgcatgtatcattactcctacctacatgtactatctgttatccgatactactctgtcaaaaaaaaaacgaattcctagctatgaaccttgacacatataggattggtcttttttttaggacggaggggtaagcatcatcactcgtatttatatctatcagaatggatgttacggtatcatataggtgtcaccaccggtacctacaaacatcatcattggtatccgcaagtatgatcttctatatctatttatatcatcaccgatatttgacatacattattagacgacattgttagtgtatagaagtgcaaattttagggtcatatgtatcatcactttatataagcaaatgccatgatgtaggattgaatagtaagaactaagccaaccagaggggtggatgaatggatgtagtacctaaaaaccgaaacttttagcagaaataaaagttaccatcgaattcaatggagagctcgacgtaatcggtctaaccgccagatctactccaatctgactgcagtgccgccgctggtctgactgccgcattgtcgccgattggattgccttcctgccgccgcctcctcgctggttagaccgcctgtattacttcagtcaaaccgtcgggacctaggaaagcacgtatcgatgaaatacttaaaagtagatcaactttattgcatcaatatgtgtttacgaagtacaccaacaacactcatcaccaaaatctcgactaaactcgaaaccctaacttttctctcaactcaactctctcaaaaaccaatcccaagaggccacaccctccgtctctatttatatccaatataggcagcctaaagctacgaaccaaccttgtacaagacatcctaatccactagaaaacatgtccgtaaaaaaaaattaaactttactaactcgaattgtatcaaatttggacaccctccaaattcaactccgctttccatacgcacacaacaccacatgtattccatatggaaaccttcacctccacgtgcattcttctctagattgaacattccgcgtgatatccttgaccgcccggacctcaacctcccgatcctcccccaagcctagtcccgatccatcaccgactatactcccatggcctcaagcaacacttgcacatgaacaacaactaaactccatatccgagtacaagttcgcactacttgactcacatcagcacataatagcatcacatacaaaaagaaaccaactagaaatcatatccatgaagcaatctagaaatcccacgagaacaacccgaaattgattcccacctagagtctgccggtctaaccgtcgggcaacacgatcagatcgctccaacactaccggtctaaccggcggcacctgcccggtctaatcggccacacaaagtcgagaaacgaaaacactattcaccttatttttataaaataattacttttgacaattgttcatcaccatgattaaatcattacatgactctacaatccctccgtgatgaacacattggcaaaatcctcaaaatgcaatttggtgtttttaaaaaatgaaaaacaaaaacaaataaaaaaaacacaaacaactcaaaaatcacaaaagcaaaaaagaaaaactctctcctttttcaaaagaaagaatttcttcccatattggcaaacaaagcacaaaatcgactattttttaaaagcaaaacaattcaaatccccccggtgacttggtaacaaaaaaaaattcaaatctccccctttgaaagcatgcattttgtatatttctccccctttgacaatgatttcatcatgcatttgcattttaattagtaatgttcaagagcttagcatcatacatagagcaattcatgttatgtgttgtaatagaaagaagatgaacccatcaattaaatagcaggcatgcactagagtataatcatgaatcaaagatattactatcaagttcaaatcaacaatcaatattcataatttcaaataatttataatgcaatatattcacaagcacataggtttaaaagtcaagcctacacatatctttctcaatattagctctagcacaaaacaaccaatagaatttgtaacatttatttgagcctttttgttttactcatttttttctctcatttattctggaaacgtccttgtcatcaagactatttttgaggattcggcacccattattttcgctcacatcgaatacgtccttgttgtcaagactgtttccaaggattcagtattcattttttttctctcatagaaattattttattctcttgcacgatgagaaaataaagagcaatttgaggaataacaattcaacaatcatatacataagcattcatcatccaaactatgtactagcttcaacattgcatttttttcttaattcaagtaaaagaattagtgccatgcaccatctcacttaaaagcaatatctaagcctcataaaaacactaaaatgcatacacaagaatatacaaaatacatggcaaaatattatgaaccttcataatattgctagcatgcacaagaatatacaaaatgcataagacaaagctctccttttcttaattttttttgttattttcagatttgcttgataacaccaagagcaaccccccctctcaaattaaccttcaattttccccggacaaaaatcaagaaggaaacaaagcttttgaaaaagacacccaattgccaacaatatcaccaaggttctcatgaattgatatgtatctacttgtattaaccaaaactactacctcaaacactagcatacgaaaagctaataatcaag

SEQ ID NO: 10985 - DNA, 1042 bp, Oryza sativa
ttctttgtgttctttgatgaccctttcaccttctgaaggtctcatactctcgtgtcaccatacaggtcctcactattgatggaggaatggtaatgtaaaaaggcttgagcggtcactggcaatcttcccggcagctgtagtagtaaaatcatcatgtaatgaacatcttttttgtgaagtattatttactgttgagatacccttacctataagagacttgtttcttgtgtagtttataatggtattggaatagctctaactctgttcgtctttgattcgagatcaattgtagagcacatagaaattttggacattggtttcctttttgcgaacaataatgatgtataatgatctcctagtttatcttcgcgttcgataataaacggattatatgatctgccatgctcgtaccatagtagcatcctgctaccatttctcctttcatctgactatttgaaccctgcaagctgttccaaactgatagtttgtttaaccgctctacaaatttcataacgacaaccaccatgcaaaagcaccacattcagttcagcacaccacataattcgtattaaccaagttaaccgaagacgacgatatgagattagatatatcaatgttagcatgcaagtactcaaacccccgtcacattgtacttgaccacaaggcatgtccatacatgataacatcaaaattcaaggaactcgagggcagataaattgactgagtgatgtgctaaacataacattctctcatgttccctgacctacgccttgatggcatacttcctcatggggaaatacttctcgcgcttcttttccctctccgtcttcagcgaaagctgtgatatggcaaccatggaaaatgtcagaagacggatgcaagtataacataactagattcattacaagacactagaaaattgaacataagtttaggatgacaaatgacttcatgtttctataagaattgaaaaaggtgagccttcatttttcaaagaatgcagcaaacaagtcctttatctacccttctctcttaatatctt

SEQ ID NO: 10986 - DNA, 705 bp, Oryza sativa
ttattggcagggggaccttttaacttactcaccaggccacacagcaaatttgcaagtgcacaaagatcccaaaggatggcataatataggttcatttgcaaaagcagcatttagcaaaacttttaaaagaagtaaaaacagtggagtgattaatcagaaattttaatcaacactgaacagcacacccatgctgcacaggcccaaccatcctgaacaaccatacccggctgtacagattaactccaaaccaggagctaagcaaattattaccaggtataacatccataattattgtgagaggtgtgagactaatcacgaaaaacattgctcaacccgcccataaccgcgggcacggctattcgaatagttttactctggccagaggtgtaccactgtacccacaagacacagccccacatcatgtcaccatgtgcctcagtaccaccacggtacctcggaaaggagctgtgacattacccctcgcacaacacaatccaccacagtgcaccattcctggatcataatcacccccctcaaaaaccagaggcatggactccccagcgactcccgtgggcttatctccgccacttctcagtctggtgctctgcaatgaaccatgctatacgaaaggtaaagccgttgcccacgctggcttgtggttggcacggttaatgtttcacaataatacctcgcgaacccgtcctt

SEQ ID NO: 10987 - DNA, 8549 bp, Oryza sativa
ctgcagcccgttatctactgcaatggtagtaagtacacatttcatgcaaaaaaaacaaaacagcccaagttaagctaaaagtttgaaggaagatgacaccatgtgaatctctatcagcatgagttttagatatcagtagtaggtgtgcacggttttatgaaatcttatacctggtgcttggtgaggcggcggcggatggcgcgggtcttcttggggcggaggtcgagggggaggaggctcttcttcttgtacgcctcacgcagcgccgccctctgcttctgcgagatcaccgtcagcacccgcgcgatcgacgtgcgcaccaccttgctgcaaaaccacagagattcaatcaatcacaagggcacacagaaagaggagagaatgagcgcgagcgcgagcgcgaagcgcgtacatcttggagagcttgttgggggcgccgccggtgaccttggcgacgcggaggagggagagctccgccttgaggtccttgagctgggcctgcagctccgccttgttcttcccccgtagctcgtcgaccttgatccgggctgcaccacacacgcacggttagatccgcaggcgagcgggaggagagaagaacggaatgttgtagcttacccatggcgacggaggcggcgcggcgggcggcggcggcggcggcggcggcggcggtgctaggaaggggaagaggtgaggaggcggcggcggaggcttatatatagaggagagagagacagcgagacgccgcggagtggaaaaaaaccctaggctgagttgagatgggctttcatgggccttgttgggctttatgatagatggctgggcccattgactgtttaaggtgagttgaaatgggcttcccataaggattcgaggatttggatttgtcggttttgatgttaacagctcggagatgacagtttaatgcaaaatttaagttttagcttgagtttttatatacttgaccggattttagtgaacttttagcttgagccggagcaataaagctgatgatacctgtggttttcgagcagttatcatcggttttgtgaatgtcgtatttcacgactatgctcgcactatcagaattgtactattgaagtacttacttgacaaatgaattgtggagatcatggataccccatacatacacggcatgtatagtttgactgggtatggagtgctatatatagatagaatatctttaaaatgacttgggttaaattctaaacttgtatgtcaaggtaatacccaagatcctagtcggttacgattgtattttatttgtaactacctattccgttagggatatggactgtattttgtaatacggaccccttcttctatataagaaagggtccaggtgcctctaggggcacgttttttcacccagatcatacgatcaataatatactcggcagatcaatccccggacatgagtagggtactacttcttgattaaaaaggcctgaacctgtataaaattccttgtctcttaaaccatccacttttccagtttgatagccaccccctttagtattgtcgaaatcttgttttgacagttggcgcgccaagtaggggtagtgtcaagtacttcgccgactaatgcgatgggtttcgtttccgacatcgacgacttcgtcttccctcctaggcaggcgttccggttcggcagcctcgacttcatcaccaacgacctcgtcaagatttctctcctcgactcggattcgaaccagtcgggaagaagccagatctccgccccgttcggtatcccaaactcggccaagatctaccccaagatcgtctccaccgagtcggcttcaaaccactcgaacgagatccaatctactccaacacgactcgatcaagacgatggggcctatccgccaatcctgatgaaactccccgatgatttggctgctgtcttcaccacaagggcatcttctccccgtagatctaggcgggatccggcctctaccccgatccagcttagcaccagagaagtcggcatcatactccagcctctcagcacggtttcgacggaacaactggatggctacctcagctcccccggcgtcgactcacggccaacggagatcattgagtacaacgacttcggctgccgctacgactaccgcaacctcgacgacttcgacgaagactttgaagataactacacgcctctctacttcggcatcttcatggctgacaacgagatggaagaacagcgtaaagcccaagaagcagaagaacaacgcgtgcaacaggaagccgaacgacgccgactggaagaggagcgccaagcacaagagcaagaataggctgcaaaagaggctgaggaccggcgatagcgcgctttggatgccgggtgacgagcacgagaacttatcgggcaacaagacgttgacggaacggcggtttttcgcacccctcaacagaacgcagttgcaacgatcaccctcctcgacaccctcctcaaggaagacgcactcaatcaagccaatcacgtcgtcaacatcttgaaccagaccaagatcatgatcgccgtctcggtcccggttaactctgcaagcgtccgcacgccgactggcagccgagttccccctcttcgatctcaagactatcaccaaccaagcctcagtgtcgtcggcgcgggatctagtcgcaggagcaggggtcacgacgagcgatctgtccactcgcctcctgaacgacacagggagcgtcgagttgaacgacctcgctccccacatcgcaggcgccctgtcgatcttcgcgatattatcaaccagcgccgcgcggcaagaggatacgttccccaccattcaccagatcgctacgacgacgacgtggatggagttgctgccttcacaagtgaactgcgtcgagtggattggccagccggcttcaagccgactggaatcgagaagtatgacggcaccactaacccggaatcttggctcaccgtctatggtctcgcaattcacgcagcaggaggagacagcaaagccatgacaaactatttgcctgtggccctagcggactctgcccgatcctggcttcacgagttaccccgtggcacaatcggatcttgggcggaacttcgcgaccacttcatcgccaacttccagggtatctttgaacgccctagtacacagtttgatctctacaatgttgttcagaagtctagagaatcccttcgagattacatcagacgcttttccgagcaacgcaacaagatctccgacatcaccgacgacgtcatcatcgctgccttcaccaagggcattcgccacgatgacctagtcggcaagctcgggcgcaagcctcccaggacggtcaagcagatgttcgaaaaagccaatgagtacgccaaagccgaagatgccattaccgcgtccaagcagtcgggcaccacttggaagccgaagaaagatacgccgactacaggggggagtggaagtaccaatcacaaggatcgcaagcccgaggaacttgtggcaactactacaccatcctcccggcaacattcacgggtcaacacttttgacaagatcatgaactcccaatgtccgcatcatccaaactccaatcacgcggccaaagattgcttcgtctatcaacagttcgcagaacaatacgccaagaatgcacgcaaggcctctgacggagatcaaagcacgtcaaagaagaaggatgatgaagacaacgccccgactggttttcaagaccatcgcaaggaactcaaccacatctttggcggacccctggcttatgaatccaagagaaagcaaaagctaaccgaacgggagatcaacgctgttcagcccgacacgccccaatatcttcggtggtcagagacaacaattaagtttgaccgctcggatcatcctgaccgagtggtccacccggggcggtaccccctggtactagacccagtggttcgcaacgtcaagcttcgcagatccctcatcgatggtggcagtgcactcaacatccttttcgccaagactctggacgacatgcagatccctcgcacggaattaaagccgagtaatgtgccctttcacggagtcatcccagggctatctactacaccactcggccagatcattcttccggttactttcggcactcgggagaacttccgcacagagaacatttgtttcaaggtcgctgatttcgagacagcgtatcacgccatactcggacgcccagcgttagccaagttcatggctgtcccgcattatacctacatgatgatgaagatgcctggtcctcgaggagtcatatccctgcggagtgacatcaagcaagccgtcacgtgtgacaaggaaagctgcgagatggcccagacctgcgagatcacgctcgcccgagaagaaatccaactggctgcgtccacagcaagcgaaggagaagtgcctgcgaccaagatgccaaagagcggggaaagcgacaccaagaccaagaagattcctctagatccctctgatcctactaagacagctgtaataggcgctgagttagattgtaaataggaaagcgcgctcatcacctttcttcaaaataataaagatatctttgtgtggaaaccatctgatatgcctggtattcctagagaggtgattgagcactctttacatgttaaggatgacgctaaaccaataaagcaatgactccgccgtttcgcacaggataggaaggatgcgatcaaggaagaattgaccaagctgttagcagcgggcttcatcaaggaagtccttcatcccgactggctagccaacccagttctggttcggaagaagacggggcaatggcgcatgtgtgttgattacaccgacctcaacaagtcttgtcccaaagatccatttgggttacctcgcgttgaccaggtagttgactcaacggccagctgcgagctactcagttttttggattgctactcgggatatcatcagatccgactaaaggaatccgactgcttaaagacttcattcatcacgccctttgaggcctactgctacatcaccatgccttttggattaaagaacgcaggagcaacttatcaacgcatgatccagagatgtttttcaactcagatcggccgcaacgttgaagcatccgcgcttttaggatgaaattaaatcctgaaaagtgcatcttcggagtaccgtcagggaagctgcttggatttatggtgtcccatagaggcatacaagctaacccggagaaaatcaatgccatcctcaacatgaaaccgctgagctcctagaaagacgttcaaaagttaactggctgcatggcggtgctcagccggttcgtctcacgactcggcgagcgggggatgccttttttcaagctgttaaagaaaaccaacaatttccagtggggacccgaagcacaaaaagcctttgagtacttcaaaaaacttctcactactccaccagtcttagcttcaccacatccgcaagagccgttgttgttatacgtgtcggcaacttcccaggttgtaagcacagtcctggttgttgagcgtgaagaagaaggccatgttcaaaaattccaacaaccaatctacttcgttagcgaggttttggctgactccaagacaagataccctcaggttcaaaagctattatatggtgttttaattaccgtcaggaaattatctcactacttccaaggtcactcgattacggtggttacatcgtttccactcggggacatacttcacaatcgcgaagcaaatgggcggatcgcaaaatggaccttagaattgatgtctttggatatatctttcaagccgcgaacttcgatcaagtctcaagctttagctgacttcgtcgccgagtggactgagtgccaagaagacatgcccgtggagaagatggagtattggactatgcattttgacgggtcgaagaggctttcaggcactggagcgggagttattctaatttccccgactggagagaggctgagctacgtattgtggatacatttttctgcgtttcacaacgtggcggaatatgaggcgcttcttcacggactaaggattgcaatctccttgggaattcggcgtctgatagtttgtggagattctcagtcggttattaatcaagtcatgaaagagtggtcctgccttgatgataacatgactgcttaccggcaggaggtacgcaagttggaagacaaattcgatggacttgagctcacccatgttcttcgacacaataatgaggcaaccgatagactggctaattttggttcaaaacgagaagcagctccttccgacgtgtttgttgaacatctctacgagccatccgtaccaaggaaagaaacaatcgaggccacggacactcaagacataagcatgattgaagtcgactggagagagcccctcataagatttttgacaaaacaagaactccctcaagataaagatgaagccgagaggatctccaggtgcagcagactttatgtcatacatgagaccgagctgtacaagaaaagtccatcaggaatcctgcaacgctgtgtgtctttagaggagggaagacaattgataaaggatatacattcaggcatctgtggcaatcacgctaccgcacgaaccatcgttggcaaggcttaccggcaaggttttttctggcccacagccgtgtccgacgctgacaaaattgtgcgaacatgtgagggttgtcaatttttcgcctgacaaactcatctaccggctcaggagttgcaaaccatcccgttgtcttggccgttcgcggtttgggggctcgacatggtcggcccgtttaaaaaggtagtcggtggttatactcatctctttgtagctgttgacaagttttccaagtggattgaagccaaaccggttatcacaatcacgacagacaaggctagagatttcttcatcaacattgtgcaccagtttggggtacccaatcggatcattactgataacgacactcaattcacgggcggagtatttaaagatttctgtgaggacttcggcatcaaaatttgatatgcctctgtagcgcaccccatgagcaatggacaagtcgaacgcgctaatggtatggtacttcaaggaataaaagcacgagttttcgaccgactgcatccgtatgctggcaagtgggtagaacagctgtcattcgtactttggtccctgcgcaccactctgagtcgggctacgggccagtcgccgttattcctagtctatggagcagaagcgatgttgccaagtgaggtggaatttgaatctctacgatttcgtaacttcagcgaggagcgctacggagaataccgagtagatgatctcaaccgactagaagaagcccatgaagcagccttaattcagtcggctcggtacttacaagggatgcgccgttattacaatcgcaatgttcgatctcgagcttttttagtcggcgacctggttctgagaaaaattcaaactacacaggatcggcacaagttatctcccttgtgggaaggaccgttcataatttttgaagtcactcggccaagttcttaccgactcaagcgtgaagacggtactcatatcgacaactcttggaatattgaacatcttcgtcgtttttatgcttaggcattacttttgtatcttcctctttgactgttaacatcaagttgtcccttgatttatcagtcgggggctactataataataatggagtgtgatttttatcaattcaatttgcttacttgatttatcattgccttgtttgattttttggcttagccaatgaggactggaagtttttaaaaaaacttttgcgggttctaggctcaataaggtttgacaaaaacttttaagaaatctggagctaagtttaaatcatcaagcacagcataaatttatcagtattgcacaaattgtgcctccatcatcatcatcattatcatcagaatacacaatcaattagactcagttctttcatcatcagaattatcagactcagtcggcttaagattgttgtcctggaatctctcaactacatcagcggctatcttgtcagcagccttttgcgcatcactgatgaggtcaagggcggcctcttcacttgtcccgtctgcaaagccgtcaacagcatcaatatcaattttcgggtataaggacttggtcatcgccagcgctaggcctcctcccatactcccagcttctttgatgttcttaaaatatgtatccggagtagctctcagcttgtcgaagatttcgacagcatcaagtgaactcagaccgttgttattgaaaaacatcgcctggacgagtggcgtagcggcattggcgacttcatctctggctccttcaagcttcttaattttgttaaccaagacgttgaactgagcctgggatttgattttgcgatctgcgcaaataaattcacattaaggactgggcatgaagatgagagtggtttttgaggtttcgactaccagtaccttcgacatctttcagagctgagtccctctgttttgccaattcggccttgtctttctccggagcttgg

SEQ ID NO: 10988 - DNA, 6754 bp, Oryza sativa
tctagaagttatatccataaagcaatctaaaaatcccacgaatccaacccgaaacctactcccacctagagtctgtcggttttctcatgtgatttggatcgaacgatgtatgcactagcgttgggacgtatccaaggtgtattgagaggcgtatcgtcgagtatcctgaattaatttttttttcaaaaatccagaaaaatacggatacatataggatacgtatcggagcatatctgatacgtattcgtatccgttcacgtatttgacacggatatgcaccttccatgacatatccaggtaacgtaggtgatcgaagaagagcatcaccaacacccaacggcttgtggcaagggatgaaataggagtaactggactgctcatttctgtattctacgtacagatttttcatgtaatctggaccacaatttggtcagattttgaaaatttcgatcaaatcagacattggtgttttcctttttataaaaaaaaatccaaaagaatttcttgggtctactatcactgccttgtgcacgcccttaattaagctccagcggcgctcatactcatttggatatgttttcacaaatccatgcatattttaaagctaaataaaatagatctgggtgccatgacgaagtgttgtgattcacgtttgtggaatcttggtagatcttggtgccatgacgaatgagtgattaagcatatatgccgtgtgaatcgaaatgacgaaccgaaaaaagtaaaagaaaatgtggatagatagaccacgcacccagcttcctatcgagaaaatttgagatacggacaaggagttgtcgtcgtagcaaggtcaatcacaaacaactagtcagtccagcaactcagggcttcaatcaatcgttactatctccccgggaagataatacttgtacttttagacaaggatcaggttaaactttaaaatctttgattataaattatttttaaaatatttatttttcaaatatgattactacatgtataaattagtgttaacacttttatacatattataatagaaaataatggtcaaagttattttttagaccgtgcttttatctaaaacgacaagtattatcaacccggcgagagtatatatgtggaatcgattggcaaatgcaaatctgcagggatcaggttctggtggagtctttagtgtgactactacaatttaaacagtcacgttgagactactgacacagtcacattgagactactgaaacgattgagatcgtttaagcactgttcatgaaaaaaaaaaacaccaggcatctactatgggagatggcgctatgccgctataacacttaatctacacctaggaaaatgaatggatgagatcacatgcagtgattaacttacggtcttgtgattgcattcgatctcaatccaatctgcagctaccagtacatcctactacgcaagtttcaaaatgattgaaaaacgagaggagtcacaggtaggtgtgttttaagaggaggaaaagagaaatgtagagaaggtactgaaaacaatatgatttattagcacatgattaattaactgttaattattttaaatttaaaataattaatatggttttaaagtaactcttttatatatatatatatatatatatatatatatatatttaaaaaaatactatttaatcgttaaaaaatgtacacgcaaaaaccgaggatcttttcactactacataacaccacatcaatgccagttgggaaccccacacaggaaccggcacaaaagaggcggcactgatgtgaatactcaaagatgccggtttaggtcccaagaatccaaaaaaaaaaaagggctcaatgcatcggctcgaacattgagtcgttccccttcaccccgagacccgtcaccccgagagatccaaagcaaatcacagatccctcaacaatttcatagaaacaatcaccgttgccgccacgtcgccggatccgtcgcgggagccaccgccgccactgctccgcccgccgatgccgatcccagatgcggctccgcccgccgttgccaccccagccacctcggctcgatttgggtgtcggttttttaattaaccgacacctataacatattataggtgctgatttttttaaaaaaccgacacaatatataataggtgtcggtttttattataattgcttaaaggtgtcagtttttttgcgatttcaacccgcggaggtaggaaaatgcctatatgccggttttaacactatcgacacctatagtggcgacacctatttaatgttttgtagtagtgtttcttgtctatcgacagtctcaaacaagtggtgaagaaaatgttacagaagtggcagggtgattataccggtcaaggtttaaatcacgtacacccaacatcctaattatttttatattttaacacagtattcaaaatgttactttgagcaaatttcacaaaacttcatatattttaaccaaactattgcaaaactatagatttaaagtgatacatcacaaaattacatatacaaatttatggtagagtatcgtaaaattacagatctagtaacaaagcaattacaaaactacatgtttattatcaactaaatcacaaaacttaaatgtttataactcaaacataatattaatattagtgctaaggatttaaacatactagtacgaagatagatagatagtacgtataagagtatagtgtacattatgctgcatgtttcatgcaattgaaagaagagatgattgggaaacaccattaatagggtggtaaaattatgagtccacgactccacctactattaggaaacaacttatcaggtttaaatcttggtgtctataaatattatgcacgtgcgagtgcgttttcaatggaaatttagtgaagtcaaaaatttatcgctggtcttcgtctcgttaagagcattgtgtgtgtctgattgcggtgtgcgtgtgtcatccgtgcaatgaaaaaataacaaggaaagagagaagattgggaaaattgacaagtttcaaagttcaaactggcataccgtctacccatgtcccgcctaccgtcttcctccccgtcctcgttgcctccgcccgcccaagcacccatcggccatcgcagccttcaaaacaaacccgcgacggacgacgcccccgcccatggccccacacatctcccaccaaaccacccaccccaacgccacctacaatctagctcctcgctccgatcgaccatccatggggaccatcaccgccgccaaagcagccgcggcggcggccgtcttccagtctccgtgctcccctgcgcctgcggccagcttccccgcccgcagcgtccggccggatcgccgccgcgccgtctcgctctcagtctcaggtaatgaccgttttgatttaacgccttattattattgatgatgaaagcagagaccatatgacccacttgtcgtcgtggcatcaacatgatgggataatggcaaactgtgactcactcaagcagtgctatgactatgtctatgttggcaattctctgaaaatgtaggtgtgttcgtgataattctattaagtttttgtgttgtggaaaacgcaccgattatacggccgttaatacgttgacagtgattagtccgtcacgtttttgcaaaacggtcttcactaatcgtttcacaacgaaaaaaatctcgtcattgccgattaatcttcccgtttgtgtctaatcggccgcataattggcctgatcaaaaggctgaaccaacccacaacgactaccctatcccatttgttgttttctctagtaggagtataaagctagctataccagtacgtgaattcctctagagtatctgatgccgctgcaacctggtctaggatgtgcacgcctaaagtttctctctgaagaacataagataatccatgcaaaatatttttccaatgcactaatactagacagatttctatatctgtataatagctctcatggttttcaccttttcctaattgtagcatattatatatgtagtgaatttccaatatatgagtctacaatatgcataacaatatttacatattcacaaccgttaaatttccgtcaaattccgattaatcgtccgtattccgattaatcgtttggcggtacccactctgtccaacatccgcattccgtcttccacaacactagttttgattatgttttcttgtaaggtttttttctatgaaattttctaggtttctcttgtgatgaaacttatattttgtatcattggtgatcattaccattaaaaagatgtgaacattagagaatgacctaatatcaaataattagtaattagaaggggtgaggcttcgaacccaggtcgtttagcccaccaccttgtggagctagccggaagacccccgggtgtttctcaatgatcattaccattcaacatcatggttcaaaattttcgaatttggattttcccacgcccaacagggattacctctggttgaaaaattttagtcgcttgaatttagcgggaatttgttcaaagtcagcaaaaatctgttcgaattttaaaatacagcactgaagtattttgccgagtcaaacactgtccaaatgcccacatgttcatgatacgacattatttttagttttaccttttgttctttttatcttttaccaacttcgacaacttcctttttgcttgtcaatactagttattcactcttacgaatatgaaggaaaagttgaatggtttgacatgccacaaatttgcttttaaatgtttaaccaatcgtaacttcctatttctcgtagaacttggctacattgcagttagcttaatttaatttcgtttaggttcggttggtgcttaaagtggagttgcgtgggaaatgtgaactggtaatggtagttcacatatactatatatatctgttattagacagcataaacttatcttgttgttttgtattttggaatatgtaatgcttaagatttatatttatactgtttcagttaatcttcttttgcgaaccaaaaaaaaaaagtgttactcacctaaactatgccgtttgcaggtgtaagaactcatgttgcagctgttgaacaagcagtggtacaagatgctattgcacagtcagaggctccagttgttgttgttacaggtgcttccaggggaattgggaaagccattgcattggcttttggaaaagccggctgcaaggttaacacttagtaattgatttatgcttatacatctatagaaattttatcaaaagggctgatgcttatctgagccactgcaactggcttatctgagttacagcaggctggaaacttaaatggttaatttatatattcaataggatcataggagtatcccaaatgactgttattgacaatctgaatagatgaattgatgaaaactttagttgcatgctaccctgtgaaagaaatttaccttttatttaccttcaagtttcatgattgtgaatcatgtaggtgcatctagaacaatacaaagaggattgtatctggaaaattgggttcaaatatttatctgttgcctagttgttatgctgaactagaataatttccctgagtataacacaagttttacaatcaaaggggaaaaaaaaactctacttacctttcaggtcttagtgaattatgctcggtcttcaacagatgctgaagaagtctgcaaagaggtaaagctttgtgttgactagttactttgttcatattttttttaaagcagcataacgtagatgatttgtaatacgagaataccacgaagcattaatttaaactaaaactgcgttatgttcttatctaaagtaaagagtaaatttcacaaaaccataaataatcaaaggaaaatacaattgaatgttgtttccggggtgcatgtgttttgaaaattttgttctgttgttctgccttaaatagatggaagaagatactgaggtttccgtattttacagattgaaggatttggtggtcaggcaattaccttccgaggagatgtttctaatgaagccgatgtggattctatgattaaagcagtaagcatagtccattcgtgatactctgtgatactggttttctctcttcaaatttctgaccacgattaatcatccaggctgttgatacatggggtacaattgatgtacttgtaaacaatgcaggtactcctagtggaatattatatcttttttttacacaaaaaaaacaatttattttacttttaagttttaaccctgaccattctgatattcaggaatcacacgggatacattgttgctgagaatgaagaaatctcagtggcaagatgtagttgatcttaatcttacgggcgtattcctttgcacacaggtactaatcacacattttctcatattttgtacttaaaatgctttatgcatcatactgcaaatgttttttttgcaggctgcgacaaaagtaatgatgaagaagaaaaaggtactccatatagttcatttctttaccagattgatatttgattgttttttaatatttttatattttttttcacgctgttctgtactgaacttcaatacggcaaatttgcaatatagggaagagttatcaacatagcatcagttgttggccttactggcaatcttggccaagttaattatgctgctgccaaggctgcagttattgggttaacaaaaacaactgctagggaatttgcaagcagaaatattacagtgagcacattttctttcattttattggttcaaa

SEQ ID NO: 10989 - DNA, 1657 bp, Oryza sativa
ttcaggcttctgctcatagagactttcatttggctggaacaaatggcaaaagttgttagtacagaatttcaatttacttgaggagaaaaggatggacactttgtaattgaaattcactgggtatttgggtatatttcattgttggcaacgcaattcaaatcagggctatggtttgttaagaagatgaagctctaactcaatcggatatgcagagagcatacctttgacgtaagtttccgtgcaccaagtccaccggtcttatttccaggcttcttcgcaacaattggcttcttgaaagaatgagttggagcccttggtgaacgaataacctcaggctcagtcttctcatttgcaacttctttagatgcctctgccagcttaagatctggaattgcatcagcttgatttgtaggttgtgaagctgcaactggggaggacggccaactgttgttcccatcttcagtggaatttttagcaacatccttagcgagcaactgccggtataagtcagcagctcttgaagtatactttgcttcaatttttccaccatctgtccaaccatgctgcttgaagaaagcttgtgcacggttgttacctccataaaccatcattttcaattgttctggggtccacgaatccaaatttgttgacctgcagattgcagcagtcaactcaacgggtttccagcaaaaaagaaggccacaactaaacaagaagttcttatattgtttagcatgtaaattctgtagtcaaatggtaagaacatatctaacgaagcgttgtagttacgtcgatctctaaaccaaatttgacagagcttaaaatttaattactcataagtagaaatggtgtgattgtgtagttgatggcaaacagaattacaacacagacaaaataacttcaagcgcaccacccatgaaatcttcagccaatttactacaagatactattgtgccagtttaattgagtgacctaaaaaggaacagtgttatattggcatcccaaaaatatatcgcccctagtagattgaaaaagaaaaggaacagcaccatgaaaatatctagctttgaagaaattatcatgagaatctagaacttccaggagaatgtagattgcagaagtacaaagagaatatgatgcaaaccgacactgcaggccatattggattttcttttagatgtaagaatatattggattatcagataccaagtaaatatctctgtacagtttaatagatatgacataaagatgataagtttgcacacggctgcgaatcataacagaatgtgataaattgcaaaggaaaacataaccggcaggccgaaattcagaatttagtagagagaaaaaaatacatgattagctcaaggcacctcagtaaatgatatgaattgtaaggcaggcagacatagaaggagtgcgggggtgtatgagggggaacctgacgaaggagacgtgaacgccgaggctacggtggacggcagagcagtcgatgcagaggaagacgccgtaggtgacggaggcccaggtcgggttcttggcgttgcagtcgaagcacatctgcaaattaggcatacgcacatataaatatagtcgactcgtaagagaaaaaaaatcacacgaattacagaagaacacagtctctctcacacacaca

SEQ ID NO: 10990 - DNA, 667 bp, Oryza sativa
gacacgtgcgctgcaagcaagtagcaatggctaaactttaatctaacaaaacccaagaaaccctgaaggggtacctaactatttatagaggtgggaggacgaccaagagggtccaagggtcgtgctccaccagattggggcgcaccccacatgggccccacatgggccagggtcccaaacaaagttacaagcccattggcccaatacaggagacgcagcaccttgcttttgtgatgcggccaaacgagatagatttccgagatgaggctggatccgttggaaggaggacttcgagagctttccgtcaagtactcacgggcccaaaacggagcacgtatgtagatttggcggccgtttgaagtcagcaatgtaacacgtggccgaatcagattgcagcacatggaggacttgatcttgatgtcttcttgttgattcatgatgtgagcaatggtcgtatccatagtagccatggtcacatcagacgacgacagtagtcggtgccggatatgtcgccttggaggaaggtgtagaactcggcggcgaggtggatggcgcgaagctcggagttgccgaggaactggtgctcgaggttgcgctagacgacgcacgcgtacgacgttggggacaggacttcctggaagaggtcggcggagatgctcccagagag

SEQ ID NO: 10991 - DNA, 736 bp, Oryza sativa
tcctgcagcccttggtgtatgggataaaaaggaaactgatttttaaccaatccaatctactatatctttccaaaacaaacttgactactttcaaaatcaaaatttggaattcaactttcttcttttcggccccaacacaggcccggccaaaacaaacacacacaaggatcggcaaccttaatgcaactaaaaaactccaaaactaaccgacagaaacttctgaaaactacaaaaataaaaccgtggcagcgagccgattccgttttcgtaggtcccgacaacaacagagacacggtggcagcgacgactgtggtacaaaacgtgaccagaactcgaaactctaaacgaactagacgctaagaccagcaacacgacgtgacgatgcaacacaaaattcaacaaagcaaaaactgaaaagaacaatgcaatggcacaatatggctaggtaaatgatacgaatttttttgttggctattttctggttataggaagataaaaactcaccgagcaacgaaagctctgataccacctgatgaaccctgagttcctctcgacactcaaggctgttgttggcccgatcttttggtgagttgtgataactacgatttgggagaaacgttgacgatccgactacaaccgtacgagacgttgtgttgcgccttagcgatcgatacacctctccatgggttgctgatcttgccggtgcagatcaaccctatttctgcaagcaaatcga

SEQ ID NO: 10992 - DNA, 3941 bp, Oryza sativa
ccaatgataagtagatgccatactctgaactgtctacctgtaagcaatctaactcaacataaagaaagacaatcaaagcaggatatgaagattgatagatcagtcctcaccatccaccaacagtatgtccccaacttcaacatcgtttatgaagtcatcgtaattcacactgacggtgtctttggtgctcacccctcttttaatagtaaaattgaactcttgaccttcctcgagcatgattggttctggaacatccccacttctcacttctggaccctgcatcactgaagttcgatcatcacagctcatttgctgcagcattcaaaatttcatgtgttcaacggcagtataccttggtatccagcataatagcaatgacattgccatcagtattcttcgcattgtactccttcaccaaatcaatcaccttctggtgcgactggtggtcaccatgggacatattcatgcgtgcgacgttcattccagtctcagcaagtttccatatcatctcgcgtgtgttggttgaggggcctatggtgcaaacaatctttgtcttcctacgggaattcgcagagaccacttgcgaagtagcgtcagcggtattctcagcaatgttctgcatgcaaagaaaggaatgagctaaccactttattgtatcggaagacaatctgaattaaaatgatggaaaatgtaaaaattcaagaataaggagaggtaaatcttgcgccgaaatactgaaccaactgtatggcatcacctgggttccacaaccatctatacatttctaagtaagcacatagcaaagcatttttgaagtttttagctggtgattcaggctagccttacaccgatcagaataaaaggaagaacagccgcaatttcccaaacacggagggttggaaatgacatgtatattttttttcctagcgaaaacttgcacccccacagtttccctccatttgagtgtgccagctctggatcaaaaggcctcttactacatagtagcaagcatgcagcaactactccagtactctacaatgtcattcacccaagcaggcaaatctaagcacgaggaaacgacgaattaatcctagcgcttgggatccaatcgcctcaacgtggtacgatacagtgacgaatccgccaaaaaaacaaccgctagtcaccaagcgcgcaaggggagaaagagagagagagacctgagcggagagggagccgttgctcccgagcgcgagatccgccgccaccctgtcggaggtggaggtcctgagggagcgcgccgccacggccctcctcggctgcgggggcgccgccgccgccgccgccgcgggcggagccggcctcactgccggcgccgccatgcgcgccgccgcggaccccacgatctcagccgccgccgccgccattggagggagagggcgcgtgtggaggcgagggtttctcgtctcttctcttctctctcttctctccttggtgtttgggggcgcgggcgaggcgacgccgcgtgcgcccggtgtttatacgccgggatgaggggagggagaccctgcaggtggggcccaccgcctgccacgtacgcgatgcgtttcctcggttccaccgcccgcctcatgggaggcggagacggtagtagtagtggcacaaagcccacgcctgcctggcactggcaggaaccagttgtgggtgggcccacctgtcagtgggcgtcgggcgctgaccgggcgggcccacggcgcggtacggaggagaaaaaatcgcgccggcggagaggaatataccacgagatgatcgacgagaggagacggagacggagggggacgtggggagttggaagttggcgagggaggctgtgggcggacggaggcagcgatgggtcggcgtcagcaatggcgccccaggcccagcccaccgtgggcgagcgcgaccagacgttcgcgtggaggcaggaggcgacaacgatgcgttttcgccatgagagctgcgtgcctcacgtgtaccttgtcgcccatgtgtgatgcgtctatctcattctcatcgctttgcagactgaaatggcctctgcttcatgctgccggccactataacaaggagaaagccgagcttctcaggcccatgcaaacatgctgaaacctggcaaaatctgcaatggcggctgtccaaaattcagcaaaccgcacctccaccaacgacgcacaaggcggaatgcagtattaccacatgcgggagaaagacttgctggcagaaacaactggagatgctaggtcagacccaaatgccaacatgactgacaacactgagtagtgtggagtagtagtaaaaaaccgagtgtgatgttatagaagacaatcaacttgtttcagactcgttattctgatgtatactactaggtcaaaaaccttgtcctcccgcgattacaagagaagaacccacaaaaccaaaggtgtgatctctcctagggggttgggttcttgggtggggaaaaggaaaaggacagggcaacggcacttgttaatgttacagattttcagtgttcccatgcgacaatatgcttcatttcaactctatcgagtatcgactggaaggagaagacgctcaccaccacaaaggtaacactcgtgtttcaagaagtgactccgcaaggaagaagtgcagccgcgactggcctcccctcttcattcagaatgttatatgttgaagccgcattcctctgccatacaacagaaggattagacatgtgcaaaagactaaacattgtaggtagagaacaaactacaaatatctgctacattgaagtttacaaacacaagtgatgatgttgtaaataaggaacatttggtcttttaccgaatcaactgcttccagcttcatcccagttgaccgaatgaatttgcggagctcaggactgattggttggatgtgtctaccacaaccaagaatcagaatctctggagaagcatggcacacaaaatgatgtcaacccacaaacggtgcttttgaatcagaaatacaaaaaactactcaaccatgagggtgcaatatcctggaacacatcttgagccccagtaggagaaagatgcttggacaattaaactattcagttaattcaaggaaggtttgcattgactgtgttctaccctgaaattcttaaaaatatttgtgcaccaattcagtgcacagctttgtagattgataaacagccaatgcctgttttagcttcctaatgaagctgcaccatgagattgatttttaaaagaaaaacagccatatggacatttcaaacatgggtgacagaatggctaagtccaatcaagataaagggagcgtatcctatgcacacaggccctcgcgtgtacacaccgtgtacaccaactaaaaattatcacaaaaaattctaggaaaattcatacatgtactttcaatagtattacatctacgtgcaaagtcgcatattcaaattcattctacatagagaataacaaaaaagataaaattctgacaaaattgcaaccttaaaactgtcagattttttgttttttttgttacggctaaaatataatgaatttgacgttaagattttaaccctaggtgtaatacaattgaaagtatgtgtatgattttttctagattttttggtgacattttttagttggtgtgcacgtgtgtacacgtgagggcctatgtgcataggatatgttgcctaagataaaatgcctaaaaatgttgaccaatagcagaattacctgggatagggtgcactactttgaagattgataaactgcattattgaatgaagatgcattgttagtcaaaaaaggataaattggaagcaatgcaaattcaatacttccagaaacctgattcaagcatgaatcctacctttcagctgttatctctgcaaatgatttgggtgcccatgtcattatcttgttttctactatcaa

SEQ ID NO: 10993 - DNA, 7385 bp, Oryza sativa
acaaatatgaacttttatgtccaaatcattatagtaggatggatctattcatattcagagtctataattaggtttatccaattttgatattaagcgctgcactagttagctattatctccgtccaaaatataacaattttttagctattacctccgccacttttgtccaaatttatagttaaaaatgcttatattttgggacggagggagtagctctttatcatcatagtatttatgtagctaaatgatcaccatatgccatcagtggcggaggcagcgtgggggcttggggtctttagaccccccccccccaccccctaatgaatcattagagtccctattaagaccccccctaaaatttaaatccatatatctattgcaagggggctaaaatatactttgtctgagattgttagaaggcccaaaaggctgaggagctcccactataattttatcctgactctgccactatatgccatacattatgtattacagttcatggtaccaagctgttgattatgagtacctacacttacaaaagctagttaattaattagccaggaatataattgaagaagaattagggcttattcgattaatcccacctataaagatattaagagagattactgaggtgtaaaattaatatccttcaatccctttcctttggattaaccaaacaaggtataaggtgatcgatgtatgcacatcatgctgatgtgtgtgtgcgtttggttaggcgttgctttcggatagactgatggagacgagatggctgcttgctccaggcagtaccatatagcgatagcccacttggagaaatgagtagtgttgtgttagtagtactagtactccacattgtaactgaacactgcagcttattttgacaatttaaacatgtagaaatgcatagtccctcctattttaacgtttaagacaaagttgagattaaacttttataacttaaactctcaatgatttttaaaatatttagtttaaaggcaatagaacaacgtatatatagatttatcttacaaactactaataaaaataataaaaaaagtatttattctatgtattatgatagaaaacatagtcaaacatatgtttttgataccagagggagtagtactacttatacgtactagcaagtacactcttcgttttaaaaagaaatcccaagtgagggttcattgtctgttatatacaaatctcaatttacattaggtttttcttgtacgaagcaagtatatagaagaagatataaaagtgggatagttctatggaaatgcatgctcctatagcttagcttctgaaattaaatgtaaagagaatggagtacgtagtactaatacatggaaaggctgaaactggttgaacacgtgggtcaattagtgagactatatgatgtgtcatgtgtggctgagaatgggatagagggagtgcatgcatgtgttgttagatgcgcatgatctcactttcactaatactcctacttaattagtgctaaaagtaaataaaggagaagaaaagggctgtggcatcggcctgccaggtttatttctctcttttctttttttttcttttcctttttttttgtagacgactctatttcgatcttttggcaacaaaaatgaatgcagacaaacggagtgctaaaaaattgattacttaatttaatctggagagtcgtgttgcagccagggtcttagttagagcagatacaataacaagctataaaccggctataaacatattttaaagagataaaaaaagagagagaaaagcagtgggtcacagatttgtaataggaccagatattaattgtatagtaagtaactattatatgaattagctatagatgatttggaactagtagttagctatactattaaacttgctcttatctcataagcaggaggcgcccatgcagatgcaggacaatgaggaaaataggccggctccatttgatgagtattacaatataatttcaaacactatatgtatattagacccaacgtagaattaaacccaccctctcatcataatatttaggagttgttgcagagaaaaaaattggttgtagtatctcctgactccaggtatacctggtctgctggtgcatgtcaaatatttaacgtgcgtactgtacgtcgtttagtagttactctctccgtttcataatataatagattttaacattttacttacactgtttaaccatttatcttatttaaaaaagtttagaattattattcttttacttactttattatctaaaatactttatgtataatttttcgtttttttatttgtacaaattttttaaataagatgagtggtcaaacagtataagcaaaatgtcaaaaactcttatattatgacacggatggagtaaaaattaaagcccttgatatgtaagtagtactacgattaatctttgaccatgctagtacaattcatgggaattaatcctttactgtagtagtagtagtgcaagatatgcctccatgaccattaattaattcatccccgggccagcatccaagtgtggaattcttgagtctcgtcttgattcaaccaaccagccattggatatatcgacatcaggcattcataattcaaccaaactaactaattaaccagacagtgcgtacgtactcctactccctccgctctagagagacaaaccctgaattttcgtgtccaactttgactgtccgtcttatataaaatttttttataattcgtatttttattgttgttagatgataaaacatgattaatattttatgcgtgacttgtctttttatttttttttaataatttttttaaataagacggacgatcaaatgttgggcacggaaaccagggtttgtctttttttgacggagggagtacgtctcagctcagattaacgtgttccacgcgctcgctcgctacgtccactaccaagtcgatcgtacggtaatactagtatgtaggagtacatactactccatactcatgaaagaagtcgtttaggataatgtttaagtcaaactttaggaatataaatcatgaataactcttaagttattgagtttgaaaatgtaaaaaattatatgtatagatttgttttaaaaaatactttcataaaagtatacatatatcacttttcaataaatatgttttatagaaataagaagtcaaagttatattttggagaccgtgtcgctgttctaaacgactttctttagagcaagaataataatatagccaactccatactattagcccatcttaaagctaacatatataatagattagctataaggttggctacaattttcttctcatgtctctatctctcacttatatatttaatgtatttgtcttagagcttgtgataagctagctcttgcataagagctaacacccttaatttttcactacctctctcctccacttaagcttatagctcactattatacttattcttaggagtatggagggagtatagtatacttaattaattcaccccctttttcccgtttggttgagaggtactagtgtgtgtgtatatatatgtgtacacacactactcgtatagtatacttcaacaacattttaggattaaattagatacatatagatatagcagataatttatctagattcataatataaatagtaaattctgtttaaccatttattatattgctatgttttaaaaagagatacaatacggagcaatgctactggaagcggctggaacacgtgcggaaattttgggtgacaagagacgaaagcacccagcacagcagtcaatctaatcatctcatctcatctgatttcatctgattagatacaactggagtgagatatttttaactatatatttgtcactcttataaatagtaggactaagcccttgtttagttcctattttttcttcaaactttcaacttttcgaacacatctaaatttttttctaaacacataaactttcaatatttttcttcaaacttacaattttagcaagggagtgttatttaactaaggataatattgaagcacataatttttatatatactaatatgttatataaattaaagcacataatattgattttgaaatttttaattggtttttatgtaaacttaatatatttattcatattattttcgatccatcttattttaaatattattttgtaagattgtgtggaaattaatagtaaggttgagatgctatgaaaattaagatactagatgggatcagtattgtttcggcctgttaagatcatagtatcgtaaaataataggataaggatcgagatactaacaaccttactactcgttatttagctataggtatataatagaattacttaccgatataactatctaagcctcgaaatacatgtaattgtgggatgtaggtagtagttatacggtgtagtattatgtgcagctgccacgaggggaaacactttcaattccttaaggggacgttgaaattaaagaaaaacgtacggaagagcatttgtcgattaatcccgaactaacaattaagatgaaatttctatatagaaagttctttttaaagaaatatatcatataacaattaaaaaaaatgctcacagaatagaggtagtagccaaattgagaagttgtttaaacgcagccgtagtattccttccgttgcataaaaaaccaacctacgatggaatgggacagtgtcgacaggatacccataaaccggatataaagggtatatattggggtccgttggtacgagaatttacgtagtacgacatcaagcaaacaaaagataaggattatactgattcagactccttggtaggtaataatccagttgatatgggattatatgatggaaaccacagattacaaatgaaataacagaactcgatgataccgacgagaccgtagtcgagttgattcgactagatctcccagcgactcggctcctgcgcgcttcgtaagctgtggtgggtgtgttggcagtgatattcgatgccttaggtcctgctcagggggtccctcatataccacgggtcaattgatccctaaataggactcggagatatcggacccctcacgatatggtatagaccagtcttgtccgagtaggactcctcccatccgtagataccatatctatcacgtgatagattgtaacgtcccgcctcgcccaggccgggcccacttggcccacttacatctgatagctttcataggtcatagacttccaacacatatccaggccaagcacgcttaaccctggagttctttggagattgacttccggaaaagaagttgcaatttgttgatatgagtattctattaatcctattaagccctaggccgggatgttacaccctcacccccttaagagtattaatcctattaagccctaggccgggatgttacaccctcaccctcttaagagagattgacgccccctaagccctaggccgggatgttacaccctcacccccttaagagagattgacgcccccgtcgatcaaccttaggccaggaacgtccttccaacacatatccaggccaagcacgcttaaccctggagttctttggagattgacttttccgccctaggccgggatgttacaccctcacccccttaagagagattgacgcccccgtcgatcaaccttaggccaggaacgtccttccaacacatatccaggccaagcacgcttaaccctggagttctttggagattgacttccggaaaagaagttgcaacttgttgatattctattaatcctattaagccctaggccgggatgttacacactcacccccttaagagtattaatcctattaagccctaggccgggatgttacaccctcacccccttaagagagattgagagattgacttccggaaaagaagttgcaacttgttgatattctattgagagattgacgcccccgtcgatcaaccctaggctaggaacgtcctctcttggccacgtccatgtgtccagtgccagcgcatgtgccatgctgtgtaaccactcccggtctacaccagccatgcgcaccatgcctgcgcaactgcgacacatgtgtgcacccgggaagaatttcccggtcggtcacccatctcaaattgctccaggccaagcacgcttaaccctggagttctttggagattgacttccggaaaaaaagttgcaacttgttgatatgagtattctattaattctattaagccctaggccgggatgttacatagatttccttaacgcatacggaaactatctgtatacgcgcggatataccgtatcagtatacaacgtacatctaaaatatagcgcttactttatccgtaaccctgacagacagactgagtatataaaagcggcgcttgttgtgcaggtggccggtcgatgcgtccgctagatggatgcacaacaagaattttcatttcaactaaaccaaccgagagattggaacacgctccacgcatgcatatatgcgacgactaacatcattttctcaatcaggtctgttagtttccaagttacgtgagggattagtattatgcagtgtttaacgactgagcagcaagtggcgacaaaacaatgaaagctaacggtgagagtatgtataactcatccaaaattccttatattttaagactaaaaagatatattttagtccatagaaaaacaaccctaaccatgaatctgaatacctgatttatatagttaaaaatatctcttttattgtcagggttacggataaggtataccctcatatacgctatacatcgatatggtttatctgtgcgtattaaatgtagaaaaaaaagagaaattacgagacgaatctttatgcctaattacgctatgatttaataatgtggtgctacagtaaatatttgctaataacggattaattaggcttaataaatttgtatcgcagtttcatgacggaatatataatttattttattattagactacgtttaatactttaaatgtgttttttatatccgatgtgatatgcaggtgtaaaattttttaacaactaaacaggcctatagctccagcagtactaccagtacgatcaaacaaaataaaagcaagaaatcaggaaggggaggagaaaaaaaataaaaaaaaaaagaaggagaaggaagcgcgtgcgtgctgccactgggtaacgaggttcacatggtgtttgacgtttggtgggtgcgaagggccacaccacgtgacgacaacgcacactgactgacactgccagcggagcgtcagccaggggcccacgccacaataaaaataatctaatctaatactccctccgtttcgaaatgtttgacgccgttgactttttagcatatg

SEQ ID NO: 10994 - DNA, 680 bp, Oryza sativa
aaggttcccttgttaagctaggtactcacccaggggtgtcccattccacccatgtggtcgtacttgtcttatgttcggatgaaattccaaggaaacggtccttagtgcaagagcgggaaacgtacacccggtacgttccccggtccgcggttttggaaattcatttagttcgcaagcaccgaccaggtgtcgggttttccaagtcttttataaaacccaagttttacccaagatgtttttcagattttaagtttgaaggcggccgtcgatactcgtgcagagcgaagggtcctgacacggcctctttccggtatgtcgtggtggcatatcggcacacgggaacgtgttgtggggctgtgtcttgtgggtacaattgtacacctctgatcagagtaaaactattcgaatagctgtgcccgcgttatgggcgatcgaccagattcaccgtgattagtctcaccctagtttagtctaatggaattgattagttcaaatggatgtttgggcctgttgcaacgtggtgtagcattggacagtggatagttaatattgattaattactataaccgttttactgctttcaactactgtttataaatgccagcttgatgcaaaggatcccctttagccttcctttggttatattgcatcataccctccgttccggtatgacttgctga

SEQ ID NO: 10995 - DNA, 16507 bp, Oryza sativa
tttgcttgatcaatcaactctattatctcatcagcactttaatgtttagcaactgcaagcaaggagatgaggaggaatggtggttggttggttggatggatagttattcatcctgttcatgtcctgccatagcccgtaatgatccatctcttcttcaacggagagcagcacggagaagacgacctgcacacacatgatggggacatggtcttgcagcacatgtgagttgggtgggtagatctcgccatcacaaacaggcagtagcacagtacgattagcgaccgagggagaactgagaagcaagcaaaaagcaaagtaggagctgctcttcttggcttggcagcacaaaaacgaaacagaccaaaacaaagctggatgtgcgtgtgaatgatagatcatcaaagctaggtttagggcacccgcaatggttatctatatgctctctacaagatacccatgtcagcatattttcctatatggaagagattaaatgaagagagagagcaaatctatctactaacttgaagatagtctatagaaaaacgaggcaatgcattagatagctatagatacctatgtagatatactattgaggtggtttattattaatttaatttattatttaggtatatatgttttatggaaagcaccttagtgatgagagataaaatgaacgttgacatgaaggacatggcaggccaggaccaaccaaccaacccacctcatccatccatccatccatccatccaacaaaacaaagcaaatcaaacgcaacaagagagatactgtactagtacagcaaaataatgataattgattttttaatttggtccgtgggatggggcagaaaaatgcgtgggtggcgtgcggcttttgttatcgcgcatgtgactcgtgaacaaacgggccatcggtgtcgacaaaagtaagtatctggccccagctcgctcactcatcactattcgctctaatctccacatgcgtttcaacatgtcttgctccagtagctccttttcttatttttatttttttattaaaattctttgcctgttgaattctcgtaagcaaacagcaaagactagaaaactcctgttgtttatgcttgtttcgggttgatgattacgcacgttttcgttaacagtaaaattaaacaagtaattaatactaattctctcaaataacaagcaccagtggtctagtggtagaatagtaccctgccacggtacagacccgggttcgattcccggctggtgcaaattcgtcttttttgccacgatttcagtacaagcttcgctcaattattggtatgagcatgtgacaatcagctaatcttgtctgcttccatctccagaaaagaaagccgccatcaatttggcacccactgttgatgccagactgatatctttgtaaagaatgacggttagtgtattaaaatcctataaattcgtttagactttttggattagcatttcagcatgacattgactggtacccctaaatgtcaaccgacaaccggcacaatttgattaagcatccatcaattcatttctcttctaaaaaggagaaggcaaaccgcacccaaaatgaatcgatacacattttcagcttgcatattctatggacaggtatgttacagtgtaaaaaaaaacaaaacaacaatatgctttacattctcaagaaactagcatgaactcgacctctatgtaatggaaaactgtacaggctatgtactggcactgcaacgcaggcctcctgccccaagttgcgagtaatgtatgggtgaaactgtattttgctgttgtagcaagtcccctttgtggcgctctggcctgtgtgcgaaattgctaggccaaccaagccaaagaataaaacttgaaatgatcacaccgctaatgatctgagcttaacgtggttcatttcgcacgctatgaatgctgataagaatgccgcccactgggatttgcaggagccgatggtagcgctggagctgtagaaggtagccggaccaaggcaggctgaggtggtggtgcagtaagggcgtaggtcagtcttgacgatgagctctcaatgagccctgcaactccagcagcagaagactgtgcattggatgggaggaataaatcgtgcttctggtccttgtaagcactccatacctaagaaagaacacattgttattttactcacgtctagtgctcattttcatttagtgctgttacttctaatgatcccaacttcgaatatgaactacggagtactcgagatggatgaactcatcagtaagttacttacatcagaagaattcagaatttcacgaactttagcacagtgtgcgccttccgttgcaaaagcatgaagcacctgcataatttaagaaaaaaaaatataaaacaaggggccagcagacgtacaagcagaagaggccaaatcaaactaccaaaacacatcatttaaccacaatgagataaaacaattgcatcctcttttaaccattcatcaaaatatcatatctatgccctgaaaacccttgttttttcattctaaatttaatttatgaaattatttctcaaacgcttcatgcattttcaggttttcaatctttcagggctagtgtaaactcctggtttagtttgatggatacaagtcagtccatctaggtactgaaaacaagcataaaaggatgactggttcttagttaaggacacttcctaacttatggctatcatctgcctaaataacatatatgatcaattcaactttgttttgattgcaccaagctgatgcggaagtcccatgataactgagaaaaatggcttaagacggtgcttacctccactgccaaaacacgcccaattgaagcctctgattcattccacttcatttggttacacagtccctgcctgccaccagctcgccaatcaagaataccaagcagtacttcaacaaggccaaccctgttttcaatcatagttgatgaatatgtgttaattttttgcaagacacatgattccatgcaaaaactaggatgaatgaacgtaagccttgttatcatttgttttgcctcagaaggactgaacacatcagatatgctgatttaatttaaacaaaagattactagcttttccattttcactcagcagaaataaaaagagattcagtacaatagaatttctttggtcatgttagaagtacagaaacctttttttttttggagagatcctacatagtgccaaaattttcgtgttaaaatcaaacaacattgattccttaagttatccctacatatgtatgatttgaacagcttactttagcccctgtgcaacaagtgcatctctagcccgattgccagcaccaacaacacgctttagtgtctctagtgccagtatacttccaccttgccatccaattgctttcataagcaatggaacaacctgcaaacagttgaagcaagaaaatatttaggtaggtctttatatgccattcatgaaataatgtgctatgcgtcaattggataggacttcatttttggtttctcctccaatcaattgtgagaaaagagaagtaacaagttattggaagtcaatattcaaaagaccttgactaataaagacattgaaatagagccaacatgactattcaaagttgtaggttttgcactaaatcaataaatcattcaagaaatggaatcttctcaggccaaaacatttgaacactacagggccaaatgtaataattacattgccatgaatgcattctagatgaccaggttcacactaaacttaagtgccatcatgtcactaaaaactgtactaagtcaaaccacaaaccatactgttggataagcaaagaaattagtgtgtaaaaaaaaaatcaatacgcaagtaccaagaaaattaaaacagaaaaaacaagggttgcaattcaatacctgaggagttcctgcacttgtggctgccatagcttctgcacaagtagtgctggaagccagctgatgcagcactcgcaaacaactaagccggacacgttcttgtggagtctgcacggtagagtccgccgagttctcttgattgctaggttccgcttgcaacctacttgtggtttgtccggatgccatagtgtcccgtctaccctcatatgccatagctgaaaccagctttggaacataacctaggtaaccaacatggtctgcaagggctggatgaacacgcaacaatgaaaccaatgcagcagaaagcagcaacggaagctctggatcaacagcattcgcctcatagtgtgtggcagcaactgatgagacatactgatctagcagcccttctaggaaccttttagggtttctcaatggaaacttgggatcctttaggaagagtctcacataaatacctccaacctgaaatttgcacagcatgagaacatatagcccaatttcaggaaatgaaaataataggatgattctagactaaacactacctgtggctcatccttcattacatgctggccagatgcttgttcaggcacatcccaatcaacaacacgccctttcatctgctcttggtagaggtctgtggccatggttgacaactgcgcagaaagagaagctgccattgcgggtgtccatacaagttcaggggtttctgtggtctgttcaagacatgaaacaacagcttcaccaggcccatctctaattgcagaaaccaaaccatcaggtaagaatctagcaagtgtgattgccaccctgggaccatgcattggctgcccaacaagtttgcccaataatgatgcagctgcagctctttgctgcatagggatttcctctacacaacataaaaaaaagtaagtaatatgttgcaaagaagtagatctaaagtattgggagtaagttaaaacatgaaatgatgaatacaagtgaaaagcagtaaaaacaaagcaactctgtcgaatgttcagaaactttactggaattgagtctggcaatgtaaacatgagaagttttttggatttttttaaaaatggaataattagaggagaaattatgcataaaagcatcagcttgtaaagaatgctagaaacatgtaaaaacattaagtgtttgaaataatgacaataagcagatcatcagctcatagactcaaaatctcatatgaaacaaaacacgctaaagtaaatattatcaccttcaagtggtaacataagttctagaatgtacactacaccaccatgcttggcagcagcccaggccagctccggtgtgctggctaaagaatagaggacagtaagggctccatccctgcaagaacgattgcagtgcagtatctggaaaagcaaaatgagacttgttctttctgcaaccatggcttccaaacaaggcgcatgcttcgtcaggagagaaagaacgcttaggcaaatttgtgggatgttgctttcaggaggaacaggtagcgcaagacattcaaaaagaggtgtcaaccgttccttggaagcaaaaacagcagccaatcctggattactggttagaagattctgcagtaaaaaaataaaatgcattttaaaatgtgcctcataggtataacacataaaacttacaaaacttctcctgaaatggtacctgtagtgatgttagcccacttcggaggttcataatcacttcagaatctccatctgttactcctctattgtgtttttccaatgaatcttcttcttttccttcattcgttgaaccactgatatcaccattttcagtgactgatgtctcaatagctgtaccacattgatgcatcatattttcatccaaacttaatgaattccacttctgtactagctctgctataaatttaagcagcgcgatgcaaaaaccttcctggtcacttatttcataatctggttggttgttgtaaactctcaagtacacattaccaacattcagttcttttgataaagcttggtatgtgaaacaatgtgattccgtcaaatcatatgaaccatcaggtccttggctagcacgctgctggtctacaaatttgaggagctcgcctctggtggaagaattccatatgatctgcaacaaggagagttattaagctaaacatcacatgcatacattcatctaatagtattatattattgttagataaaagtggtgttgcatacagaacttataattataatttctcattgtcacatacaataaaatagtactagattattgtgaaatattacctccgccccaaaatataaggagttttaaggttggacacagttattaagaaagttggtggaattgaatggaggaaggttgtgattggttgagaaaagaaggtaggtagagaatttgaatggtggaaagttgtgattggttgaaacgagaacgtaggtggagaagttatattttgggaaaatttttgaaagctagaagtagttatattttgggacagagggagtaactacattgagcagaaggagaagaacttatagttgccccatataaagcaaatattgatgaagcaacttataatcaagaacatgataaatattgatgaagcaaattgtatggataaatgaattagtcggtcttatgttcatttcacaaagagaaaaacaagagtgccatgcccagtcaggagtaatctgagaatgtgtattcaactatcatcgctacgatttttagcatgtcgaaaaaaaatccactctaatgataattccctaaattgagcttaacacgctcttgcatgtgtttgtctgcacataacaatcacagatgatgcaggttatggtgaggaacaaaatgcaaaaatttcaaagatatactaatgacaatgatcattggattgatggaacactccaggcatgtaatacaaatgaaatttaatctattacctctggtgactccaaatttgcattcagatttgacaacagttctttaggtgggtggtttctcagcatatcagcaagcttcggagtaagaagcgctcttagtgcatcaaaagcagattgattagatgggcttattccatcaccaccaagaccacaaagccttgacagagcctgagttgcatgtacagcatgcagatttttagcaatctgcacccttgcaccaacaccatgtgcttcacttgttgcattctcttctgctgttgaatcgtactgaagcaatagaggcaacacatacctgcgagtaaatcttaattagatatatcattcacataacttgggatttcagtatgccattccctaatctatctatccagattaataatagtaattgcaattaggatagcaaggcattaccataaaaatccagccgcgagcagagaactttgcaattctgatgacactgatatattagcagctgtttgcagtgcagcatccacagccgatggaacaaattcaagttctgtactgtgcacaatatcctcaacaaggccaccaaacttaagaatctcagcccttcctgactcaaactggctgagaaccgcaaatgtatgcattatgttggtgactattcttgctgccggttcatttgctggggttgtgggctgaacaatgcacatgcaacgagaaagaagtgttgccaacaatgggataccaccatcccgtatgagctcttcgccatttaatgaagatgatgcgcatctaacaaagcatgaagcacataatccagttgatattcaatcaaagtaaacattatcttaaaaaaacataggtaaagtcagtttgtcttcacttacgtcagccaaattagctctgaagcagctatcaaaagaggggctctctcagatgaaagaaaattgctatcatccttatctacagtgactgcatttagcaacattggataaccagcatacttgaatggttccaagacatgtccatatctcttgtacaagatgcactgtgccctgagtaagagtagcagcctccaaacttgtggtccctgcagtccctgcatacttgcctgcatgtagataatatatttagtgattacccagcagtgtaaaaccatatgttaaaagggtgcattgaaaagaaaaaaaaaacttaagggactctcctttttcacataaaaaccaagagttccaactgcattcatttgtagttaagcttagctaatcaataagataattcaactttaactaaaaaaatgagtatgtgaaagattgcaggatatcatccgaggaagaaatgagtatacctgcaatcgttcgtaagccttttgcacagcaacaaacttttctcttccctcaggattcttatctggatggtattttattgccagcttacggtattggcgcttaagcttctcttcgtcaatgttttcaatgttgtttgtcaaattgcccgaacttaactcagatgactgcttgctactgccgttctcaccaaggacaagatcatcaagagagatctccagtatcttacaagcatcttcttcagatagatccattggacgacgagttaactcttcacgccacattgccaacaatgactgcaaaaactctacatgttcaacaatgggccagttaggaaacctaatctcgtcacataggttccggaggtagtatcggtggcaccacatctcatctttcagattcgggtaggtcacaggtggcataggagcataatcatacaatgaatgacaatgttgagccaatttctgaggaaagtcaccgagatgctgcaggacctgagaaagccagtcgtatggacagaacaatttgaaaattagattaaaaactcatgatctcaaagtaaacattttaacaaataactagggtggtaaatacctgacgaattagatgctccgcccgcatcttgtgggtccatataatctctggcgtgtcagaatcagacaccattgcggcagcaaaagctgaaggtccactgcgttctaagacatacaacaatgattctgggagcagtccacctagtacactgcgctttgccaaaggcaatgatgaagatactgctgcctcttcaccaccatgaaatgcctgatgagtatgtgtggctgaaaagagttgtgcgatcgataggagatttgaaccgggatatgccaatgcaaagtaaaaggcaccggtactatatagtcgaatcatagctttggggtttcttgtgacaatagccttaagtaatgaggcagctgcttcaacaatgcttggttccccagtaagcatagcctataccatttcaaatttatcatttcctgtcagtgttcgataatagaagtagacaaaaataaaactatccaaaagcaagaaagaaataatatgaaagaatgaacagaacattgaggagttaaagcatgaaatttatacatgtaagaacagcttgtcgagaatataaccaagtctccttgggactattggttgtctggcagtgccaatgaactataatttattgtttgactgcaaatttgtaaattctgtaaattacaatatatatacacacactataggagactgtcctacagtaattttccaaaaaaaaaaaaaggagctataattttcagcactgttgtattaaggaaagatacttcatcagcatatcttaattgttgcattatgcttaacatccatgcttctaaccatagcctaagctatcagttgtaaattaagggtatgaaagctcttcttatacacatggccaaataataatatagctaggtcatcatacacaaactagtccccgcatgataggggaagcaaatttggaactaagtacctgagcaacatgaggaaggcatcttggacttgacaatatacgtttcaccctaggagttggtgtcactatctctcctgcatcatcaagatcagaatgtgcagatgccatactgtgtaatatagacaatgcagcatccccaatctgtaaatagaaatacattttgcataagtgttaattgatgagtaaaataaaattgtcgtgcatgtttgcatgtcggtttgataccaggctgtagattcaatacctgactaggagtaagaacaggcactttaacagcaagtgcccaacggagttcccggatatcacgtaatcttttccagtcagacataccagaagcccaacatttggtggtccaatcaattgacttctttgaccatagccttctgatagcatccttttctagagggccaacttgtttaccgtctttgtcaatatacatccactctttcagaggttccataaatgcagttgccgcgatcaggttagactgcaaaggaatagctgtccgctcagatgcttcatgagcgacagttaacatatcaacagccaaaacacatcctccaaccaaaacacacacttcaacatttgaaaggtcgttcatcaaggcctacaaaaacatgaagaaacttactcaggcagatttctcagaaaaaaagtatgttaggtcagcaaaatcatattagttttttatagtagtctgaagtcatgaacatgttctagagctatatcatcgcgtttatgaattctggacttctggtgtacgtgcagcaaagtccacatgaatagaacttgtcgacattcccatatctagtatacttatgcccatcttatttgctgatacaaaagaaaatgggagaagtgcaaagaggtaattcagctagagtacaaccaacctttaacagtagtagcaagcgatgtcttaatgccctatcatctgttctgtccaagagaacagtaatatgtgctgtgccatcgaaaggtccaataactttgttatgttgttcataaactatagccattgcccttgaacaaagttctcttacagaagaacctcctcccccaccaaaaccatccaatcttcccaagtcacaccaatcatcagatgaacccagttcatcagggactgcaccatccacagtaagaccaatgtctgcatcgcacaagaagcggtgatacagagctctaaaaaaggcaacaggatcacgcagtgggaaatcctgtgctcggtaattgcttccactttcaagaagaagccgcagatagtattggcccacacagacttctttggacaagctagggtagctaactgaaaactcaacataattccatgaaattcgtggtaaggtttcactatcactggcatcctcagtgactgaacttccagggacaatgtcatcagttcgttctttctcaacatcaaggctatgaacttcagcttgcaatgcctcccttaattcttgtctagtgcgttcattccatatcaagtctgctctattgtgatcaagactgaatgctctccaaaatccataccagttgcacagtagcctgccagatccaacaggtgtgttttccaccacaacctgtgcagggactgaaaaatctaaatgtgcagagttagcaaggtcaccattgccattggagtccactaaataagcatgtgaatccagctgtggtgccccagtttgatgattattttcatagaaggcctcaggtacaaaaccatgtggaactgcctgagaaggatcaatacttatgcctggagaaggggtatatgcagtagggtactgattagcatgcctctgatggacatctgctccaaagggaccaacattggtgtgcccaaaaaaatccccttcattgttatttgagggcatcccttgttctggtacagccatactcttgccaccacgggacctcctctgctgaagtatccgtttctgccttctgcttaatggtacttcatcatactggttctgagaatcttcatctgatcgtgtgtgaagataagcaacaagtccagggggaagtattcttgacagcaaatccagtgcaggttgataagaatcagcccagagagcaacaagctgtcgactaacatcacgtcgctcaccagcagggtagaagaaagcattcagtaaatgcctcagaagagcaccatccttcaaggcagcatcacgcatggactctgctgctattgcatcttcttcagcaattgtacgcataataacagaaacagtctccctcacactttcagcaggatgggcaaataatgcaaacaaacgacggcgcaaaccagcgacttgacgtagtagctcaacaaatgtagcatgttgggttgtttcaccatggggttcacaaagcatagcttcaaggacttccacaatggacaatgacagtaatggtgaaactgatagtggccttaatctgttaacaaggattggaacatagactggttgtgagaacagtacagactttgcatgcatgtaagtagcatgtgactctccccttgtatccgttaacatggatgtatcaccaggaccaccaccaattagcatagccacaagtccagcagcctcagctgctactccctctgaaccatttctaagcaaacccattattctccctacagccacaggaaatgccatcacgtgtgctgacacacttcttgatgtgaggagcctccgtaagcatgcgacaaatcccattattgtcgctgctgcttttggtgatggaggtggaagaggaggagcatcagcaggaaggttctgcggtgtagctgggagaagactaattagagccattaggaccacttcaggtacttcaatattgacgggcactccagtatagggtatgcatgcattgaactcccttattctacgccacaatctgatttttgctccaggaacagtgtcggatgaaactacagcctctttagcaacagtagctaaatgttttatgtgcatgctagcagcttccatatcaacagtgtgatgggatatgtgaacacgggctactccacagggtggatctatgcgatgaccaggcatggtcaaccttggtagcactggaatggcacactggctctgagtaaggagattaaaaaagaatgtgaggtgccaatgtgagcatggtaatggtagcaaacaaatgcaagatgagcatggcctaataagtaagcaaggtgaatattttgctatcaagaagtcattatggtcgcagtcttcagagcagctttgctcaagtacaattctgagtcagtatacaatcccctaaaagaaactaagaaacagttatacaattacatattacatataggaaatagcaggattaaataagcactcattacaaaggggacatatatggtgtttatctcattacactgttcagtaaatttctggctttgacaaattagatgtgtcatgtaaattgtactcttacatacaacttctgaggtgtaactgaaattgtcgaacagaaactatgacttaaatgctgaccggaatatgtgccttcatcttctattttttaaaaaagtgcatcactaaatccatggtgaagtacaaataagacagtcatgctcgccacacaccataaatttgagcattaaaatacatcaaggtggacctcagtcattttgtatctttgcaattccatattgaactcaagtgatataaactgactaagatcgaagtcatacctggttttgtaaaacatcaagaactgttgcaagtaaactatcacgggatgtacttgcatatacctgagtgaggaaacagccaagaattaggaggcattcgtggtattgtgcatagagactatgcatgcatacttacatgaatcgggcaaccatcattgaattcgaatgcaaacatctgcggttcttctgcaaatcgcacaagggcacttactgttgagagaggtcgaacaatgatagcctgaaaagaaaatattcagagcaaagaagttagaaccctaacatgctaaagataaagggagcaaggaaggagaagcggtcttgcaaaagaaactccagaggagacaaccatgtagagggtgcaacaaaagacttacccatggcccatgggcctcatcccttgaaactacaattactagtaagttgatttggcaaggggtgtagaaagttgatgcatgttcatatgtaatcgaaattttacgaatagtttgtatgagaacaggtgaaaagaagccaacatctacctcataattctccggtcgtctttcgacaagtgaagtgtttgtaagaacaagctgtcgagaaacggaatcaccatgatctccaagtcccccccttggtccaatacccaagctcaagctctcaatgctagcagtgccatgtgcagcaggacgcaatcttgttactgaccattctccatgccgagtttcagcagctccaacagcctcgtttgctgggaaaagaagttacaccagtttaagtttctgctccctttagcgcaatagatacgggattatggagctcatacatgacatatacatggaattcattgacagttgaaggtgacatttcatactgagtcagttcgtaatgatttggaaccataaccccagttaaggtgttgcctagcatcaaaatcatatgaatggcaaggtgccatacgaagatgatgcacgacagtcacataaataggtgtagaaaaatggtagcaccaaggtgaagcttatcgttgcaagagattcaaagcctacctctctttgctatgaagtcagtagctgtcattgactgtgaattgtccacatgtagtgatactccaaccatcgagttggctgtttttgtctgtaagataaccggcattaggatgttacatcaatatgtgtaatctgcatatcatgtagaaaggaatggaacgattggacaatgggatgacagaagggtgtaccaaatatgatataatcagagtgtttgtactgcctgaagcagccataaatgctttggacttcctcccataaagggggcatagcacaaaacctcctccttcagcagtcctcttcccatagctatcccccaagagaatgatagcaggagaatccatatctctaaagtccaagcaccagcgcagatcaccagaatgtccttcaaggagctcaatgcccactgaagtaaccttgagtttctatagagagtagatcaaaaccaggaaccaagaatcagaaaccaacaactggtgattaaacaacagtatattcctttgaaacagctttgagtgagtacatttcattggagatatgctgaaagtagctatctcatctaactatgcatcaagttaataaattgttggctgcagatttcaaatatttctagttttctaccagctagttatagaactcagttttaattaataggtgttgcagcacctgattccgaaaaaaaaggtgccatagataagactataacaaaccaggaaaggaagattattgtaaaggcacattgctttgtttctaatagtagtccaattggtagcatgttaaccaaatttggtgctgtgacagtatacagcgatttgtaacacaaggacatatcataagcaaccaatttgggcataagcttaaggcttcagttcagagcgatgaaaccgctctgtttgccattccactttgtttcactaattagccagttcagctacatgaggtagcctttaattataataaatatgaggataatgcagttaatagcactgctgtggatccgaaaactagagagaggattgggctctctgaagcatgaatcattcagcgcagagtgtgatgcagaaatatttgtaagggattgaaccttgcattgcaatagtagtgcaaataatacacaagacagcagaggtgagagtacgaaggaagatcagatttgggataagacgatggaggagagcttacgaagggcgcccactcgtgggtgcggcggcggaggtggaggacggggaagtcgaggacggggtggacggggcgcaggcggtggagctcggtgaggatcccggcacggagcggcgaggagaagcgcagggccttgaacttgccgcgggcgtcggtgcggagggtgagcgtgaactcggtggcgttgccctcgggcgcggcgcggtcgaagccgtaggaggcgtcgtaggagttggtgacggcgagggtggccgggtcgagggtgacgaggccggaggaggcgatgcagaggatccgcctgtacctgcccctccacgagtgcttgacgacgaagtacctggcgaggtactcgggctcctcggcggcggcggaggaggaggaggaggcagaggaggcgcggggcgaggaaggggaagacgcgtcgggcgccggcggcggggcggaggcggcgtggcggctggcgaagtccatggtggagaagtctatgcggcggcgagcattagggttccaccagtggaaggggaagaaggctccgggcggcgggggctgcgccggggagtggcgcgagtgattcgcccccagcgcggccgatctgagcgacgagatcccccacccgatcctggccggcgatcgcccgttgggtgggtcggtcggtgcccccgctctccggcggcggcggcggagagattatcctcttctcggctttgatcgatcggattgattgcgttttcctcctcttcttcttcgtgcgatctcgtctcgtctcgtctcaggtagaaatcctttctttgttttttttttaatttaacaaaaacacatgcgccggcttggctaatgcccttctccttcgtgttggtgtcgtgtcgtgtcgtagccaggaaggaaggagaaa

SEQ ID NO: 10996 - DNA, 8404 bp, Oryza sativa
gtcatttttttctttttactcgagagaaaaatgttttttttatttttttcgagagacatttattttattcttaaaaacattttttctgttcaccaaacttttatctaagcaaaactcatacagggctgagataaagttacataacatagcagagaagcatttggcaatatacgtaccatgcaccttgagaggtgatatgtttctcctttgcctgttttggcaattgatttgttcctggcccttgacttacctccagtgtgactcgtgcttaagaactcacccatcaaattgaaaagttttcctataggggttagtacatgaagggtatacatccgaagtccatgaaagtactatctctacggttcatttaagcaaacttgacaccacgtcaactttgattaaagcaagctatttatcctaagcatcatgcttaatttaaaaagcctatgaatgtcgacgaccacccaaaccatagcatacgaaaatagaccgaggacgcataaccatgcatgatcaagctagactcaactagagataagtatgaataaaagtaatggtgaatcttttgttgtatacctgagtgtgcttaccgccggcatgatgtatatgttgaaatctctagagcggtggcacggtcaaatgtgattgtcgatctttcctccgtcttgatgcgggttgtggcggaggaaggcactttgattatgccaactcaggcaagtggttcggttatgcacacatctcgggtgcaagaaccttatgccttgaaggcatgttccgtcggcataatgctgaagagacgtaggatgcatctcttttcgggcaagtatgcaagtgccaactggagtagagcagcaaacacctagaaaagaagagggcatttcctgttgcttgtatgcatgtaggtgttgtgggagcgacaagttgtccacacctaggagtggatgaaggctaagtcaaggcggcacatgagctcaagagaggggctgggtgtagcctagcagcatggttgctaatagcaaggtgtatagccatattttaaagactcgcagatatctattgaaacattccaatcatattcctttgttccaaaagataacataggaaatcctttccaagcattccaattcttaaaaatatcctttaaagttccttcaatgcgagcccttcgcggagccaaatttaggcatgttcaaggagcttatggtagtcacaacttcttctagaatctacatctctccaaacaatgacaatataaaagtaagaaatacgtgagtggtaccaaacgactctccaacacgtgtcctcggctccaccatgctacaccccacgcttgctcgccttgctagtttcaactctcccatctctctctatttacatgttgatggagggggtggtggaagggataaggctggctcatggagccgtatggtgttgggtcggtcatgctattaccaatctggctagtcatgggagctagataatgttgttgtatgtttttttcttcttaaccagagattgggttttcgtcacccattgccatttttcatcctcatgcgcacagtggaaaaaactagaccagaccgacgatccaaccagaaaaaatggaaaaattgttatcctcggtttggttttttcgtcactcatcaccactcatcgtccttggaccttagcttctttactccgacaccagcatcgcctatggctttatctccatcttgccgccttgcacatcatcggcttgatcacccgatcaagtgcctagctacaacgatgatttcctcaactggtcgtgttcaagaacgagcgtcatctgtcactaagcttcagggtgcctacccatggatcacacccattgttttgtcactaagatgtgccctttttagcatggcctcaccgcttgtggacttcttgtcactgcttttacatggaacgttgctcgccgtagctgttttgttctactcggactttagtgtcaccactctcttcatcttgatcgccgttcacacgacatcctcgttgtctgcatcggtctacatcacccacttgaggtcttcttcacctacttcaagtatcgctgccacatcttcttctaacggacattgttgctactttagcacggtggtccagttgcccttgaattagccaccgacattgcggtttggctttctcatcatttttatccctgactttggctacatcgaccacgactgctttacacaactcgctcaaccacagcttcttcgtgcccttagatttgggtacctcgacaacatcacaaggattatcgttatcgagcactctcattagtttattctccaatgacatggatttggtgccccacccaaaaaggagacccaactcctaataaccctgttaagtgataattcaatagcataatactccctctatttctaaatgtttgacaccgttgactttttaacacgtgtttgaccgtcgtcttatttaaaaaaatttgtgaaatatgtaaaactatatgtatacatgaaagtatatttaacaataaatcaaatgataggaaaagaattaataattacttaatttttttaataagatgaatggtcaaatatgtttaaaagaaatcaacagcatcgaatatttagaaacggtgggagtatcttactataccattcaaggctagtgtggttggagtatagtctggatgtacgggcgaagctaaatacctgagcacgagcacgtacataactcataagtggtttcgcaggttcgttatttggagtgagcgaagcattttttttttccgaccgaaatgaaaaaaataaaaacagcttgcatgtgctcggcataaatcaaatataaattaaacaacactcgaattattattcattttgaatagcggtgttgatcgatcattccagtagggaagggcgtggatagggacctgtccggcacgccggccacgctacacccaccacctcccatgtcgcgattttatttgattcaaatcacggggattaatttaaaaaagcacaaggggcaaaagcacgcttctgccctcgctaaacacgtgaacatggacggcccagattttctggcaggttttaaatgataagatcgatccccaactagcacagtagtttatcattcctgtcactgcctcgtgggcctcacctgcctttcctgcacgtggcccaactcatcgatcgggtcaacggtcaaatcgggcggctgggtcacttgctgctagcgacgacgaggctagagtatttatataagcaacccaaatcgttgttatatctactctctgcagccacatttattagcccagtagttacagtgacctgagtaacaccttaaaatcctaattttaagtgaattttagattggattatttgggagctaaattccgtacttcataggctaagtttttaatttaaaattactgtatatatccagttggatgtagaggcacacttctcttaaaaaactctctgcaaccacatgtgctaagctagcttaattagcactaataccactctacttacacatgcaaacatgtttatattaatacaccgtactatttatatactcactccgttcgtaaatatttgacgccgttgactttttaaaacatattggaccgtttgtcttatttaaaaatttaagaaattattaattatttttctatcatttgatttattgttaaatatactactactattcaagtttttgaataatatttacaaaagttttaaataaaataaacggtcaaacatgtttgaaatggccaacagggtcaaacgggagggagggtatagtagcacaacttgtgtgttacggccctcgtggacgcacatgtacaaatatcttcatcatgcacgggcacgataaaaaaggtgcttactaggaacaatttacttattttttattcttccttttgcacacaaatttttccccccaacttgtctaatgtactttgttggaagatatacaatacatatgtatggtatgagttaaatatgcgcctaaatttgcccacgtcagaatgtggaatggtgtaactaatgacttgtgatggtgaaacaaattaacaacccctattagataatagtactagtgtactacaatgaaaatgaacttttaccactcttacatcgatctctttaagagcatttatgcgccgtaattcctttccatcttagagcaaggaacaaggataatagcgagttataagtctactataattttacgtgaagaaggtatatagaaaaaaaaaggttagctctcatacaagagatagttctaacacgtgccctaacacaaatacattaaatgtatcattgagataaagacaaagagaaaaattaaagctataaccttataactaatctattatatgtgttggttttaacttttaatatggactattttttccatttcaaattgatcatcatcttacgtagatgtaccaagaccaaaggaagcttctctcgtcctatatttactccagtaacaaacttggtgtatgcatcatccccattattcttagatgcataaatcaatatccatttactctaatgcacaaaaacgaatatacttaatgaatgaatgcaaatatgatatcatttagaaataacatcaataaaattatatgatgatcaatttaaaacggatggagtaacaggtagcagtgagttatacttatgaaacttgctcttatgaaaataacattgctgtcagtcaattgatcttttttttatgacaatagtacaaaactgcccgcaagttaaggaaggggaaaatagccttaaggcttgagtaactcttgataatgatagaattcgtcttaaacttaaccataggaccgcatgaaccttctgggagaagcacacgtgattttatatttttcttcaaaggaatacgatgtgatccacaaagtcctaaaaagatttagtagtagtataaaacattgtcaaaattcggatcgagcgaaacatatgctccaccactgcctcctaacatgtaatgtaaaatctacaaagataagggatcgtaaaacacttcccacgagaggaaagcagggagagagagcatggtatggaggggaggacgctgacatgtgggatcgagcgagagcggaggctgattacccggagggaggttacacaaacaggagataggagggtggttgcggcggctaggcgagcgatcccataggcccaagccaccatgtgagcgcaccgatgatccgaaaatcgctctttcaaattctattttttaatatatatttttagattatcattattttataactatttttactataaattatactagataaattcatcctaaagatgtcaaaatcttttataaatttttttaagataattataaaaaaaatttatttaaaaaaccttctgtttttttaaataaaggtctatatataaattcacgatatacaaaatgcatgcaaactttctatttataaactttattatgtataaatactcgttatttcagggaggctgaaaagaaaattagtatatactgtactttattatttgcagtatacaaatcgtggaggctaatcacggaatgatgcgcatatgcatgatttgtgtggaaacatgcataccacacgttgatagcgaaaaataggaattgcgggcgatttaacatggtatggctaaaaaaaggaagatgagtgaagcggtgatggtgcggctggcggacgcgcgaatgatcgctaattaggagtgtagacataggaggagtgataataccgaaaatacccctggacactaaatatgatttgatttgagtgattagccatgggacccatgtgggttttgttatctcctctcctcaccaccaaaaatccattccaccccatacccatccccacctttcctctcctcctattctcttcttctcttgtaggagtcctcttccaaatcaaatcaaatctagaagaagaagaaatcgagatcaaatcgatgaacctttggacggacgacaacgcgtcgatgatggaggcgttcatggcctccgccgacctcccggccttcccgtggggggcggcctccaccccgccgccgccgccgccgccgcctcaccaccaccaccaacagcagcagcagcaggtcctgccgccgcctgcagcagctccggcggcggcggcgttcaaccaggacacgctgcagcagcggctgcagtcgatcatcgaggggtctcgggagacgtggacgtacgccatcttctggcagtcctccatcgacgtctccaccggcgcctccctccttgggtggggcgacggctactacaagggctgcgacgacgacaagcgcaagcagcgctcctccacccccgccgccgccgccgagcaggagcaccgcaagcgcgtcctccgcgagctcaactccctcatcgccggcgcaggcgccgcccccgacgaggccgtcgaggaggaggtcaccgacaccgagtggttcttcctcgtctccatgacccagtccttccccagcggcgtcggcctccccggccaggccctgttcgccgccagcccactggatcgccccggcttgtcctccgccccctgtgaccgcgccaggcaggcctacaccttcggcctccgcaccatggtctgcctccccctcgccaccggcgtcctcgagctcggctccaccgacgtcatcttccagaccggggacagcatccccaggatccgcgccctcttcaacctcagcgccgccgccgcctcctcctggcccccccaccccgacgccgcctccgccgatccctccgtgctctggctcgccgacgcgccccccatggacatgaaggactccatctccgccgcagacatctccgtctccaagccaccacccccgccgccgcaccagatccagcacttcgagaacgggagcaccagcacgctcacggagaatcccagcccgtcggtgcacgcgccgacgccctcgcagccggccgcgccgccccagcggcagcagcagcagcagcagagcagccaggctcagcagggccccttccgccgggagctcaacttctccgacttcgcgtccaacggcggcgccgcggccccgcctttcttcaagcccgagaccggcgagatcctaaacttcggcaacgacagcagcagtggccggaggaatccgtcgccggcgcccccggccgccaccgccagcctcaccaccgcgccggggagcctgttctcgcagcacacgccgacgctgacggcggcggcgaacgacgccaagagcaacaaccagaagaggtccatggaggccacctcccgcgccagcaacaccaacaaccacccggcggcgacggcgaacgaggggatgctgtccttctcgtcggcgccgacgacgcggccgtcgacggggacgggcgccccggccaagtcggagtcggaccactcggacctggaggcgtcggtgcgggaggtggagagcagccgcgtggtggcgccgccgccggaggcggagaagcggccgcggaagcgcgggcggaagccggcgaacgggcgggaggagccgctgaaccacgtggaggcggagcggcagcggcgggagaagctcaaccagcgcttctacgcgctgcgcgccgtggtgcccaacgtgtccaagatggacaaggcgtcgctgctgggcgacgccatctcctacatcaacgagctccgggggaagctcacggcgctggagacggacaaggagacgctgcagtcgcagatggagtcgctcaagaaggagcgggacgcgcggccgccggcgccgtcgggcggcggcggagacggcggggcgcggtgccacgcggtggagatcgaggccaagatccttgggctggaggccatgatccgcgtgcagtgccacaagcggaaccacccggcggcgcggctgatgacggcgctgcgggagctggacctggacgtgtaccatgccagcgtctccgtggtcaaggacctcatgatccagcaggtggccgtcaagatggccagccgcgtctactcgcaggaccagctcaacgccgcgctctacacccgcatcgccgagcctggcaccgccgcccggtaactcaactctagcgaggaaacccaatcgatatactctctactctccccaagccggcgtagccatggccagagcttcaggaatgccaagaagacgacgagacgatgatcaaatcatgttgttgttgtaaaattaagtttaaagatctgtgttaggatggatggatggatggagaggatgattgatatcaactcgcaactcaagctgaagctgctgctgctgatcgtcgtcttgtttttgatactgatagcagcggttggtatttcttttcttcctttctttgttagcaggaaggaaggaagggaggaaagaaatcatcggcgatgggctgcagg

SEQ ID NO: 10997 - DNA, 634 bp, Oryza sativa
tccgccgcttcgactgcccccaggtgtacaagcacttcatcggcaggtgggtcttcgggcccgacccccaccaggaggacaacggcaacgacctccgccccggccgcctccgcgaggtcagcgtcatctccggcctccccgccagcaccagcaccgagcgcctcgacctcctcgacgacgcccaccgcgtcttcggcttcaccatcaccggcggcgagcaccgcctccgcaactaccgatccgtcaccaccgtctcccagctcgacgagatctgcaccctcgtcctcgagtcctacatcgtcgacgtccccgacggcaacaccgaggacgacacccgcctcttcgccgacaccgtcatcaggctcaacctccagaagctcaagtccgtctccgaggccaacgccaacgccgctgccgccgccgccgctcctcctcctcctccaccggcggcggcggaatagcctttttcttttctttttggacctctctgcaatttcacttctattcagggaggtgcttcgaatttgctccatgtctcatgaagttggaggaggaagggtcagcttctaatacatctcattcctggtggtgctgcctgtaataatctcttcatcttcttttttcctctcctcct

SEQ ID NO: 10998 - DNA, 708 bp, Oryza sativa
atcaggaagtgagacacacacacaaaggtaagtaaaaattccaagcaaaagaaatccaggaagagaagaggaggaggagaggaaaaaagaagatgaagagattattacaggcagcaccaccaggaatgagatgtattagaagctgacccttcctcctccaacttcatgagacatggagcaaattcgaagcacctccctgaatagaagtgaaattgcagagaggtccaaaaagaaaagaaaaaggctattccgccgccgccggtggaggaggaggaggagcggcggcggcggcagcggcgttggcgttggcctcggagacggacttgagcttctggaggttgagcctgatgacggtgtcggcgaagaggcgggtgtcgtcctcggtgttgccgtcggggacgtcgacgatgtaggactcgaggacgagggtgcagatctcgtcgagctgggagacggtggtgacggatcggtagttgcggaggcggtgctcgccgccggtgatggtgaagccgaagacgcggtgggcgtcgtcgaggaggtcgaggcgctcggtgctggtgctggcggggaggccggagatgacgctgacctcgcggaggcggccggggcggaggtcgctgccgttgtcgtcgtggtgggggtcgggccggaggacgcagctgcggatgaagtgcttgtacacctgggggcagtcgaagcggcggacga

SEQ ID NO: 10999 - DNA, 1217 bp, Oryza sativa
ttatagactcattggatgaggaaggtttgcataatctagataatgcaatggaagctatggaagtagatttgggaacaggaaaaaggaaaagatacggagagggttctgtaaaaaatgaaggagaaagagaaagaccagccagggcagcaggaagatggcctccagaaaaagaagaatattcatatcattatatcccaggacagtataggcacatgggcactaaaagaagagattttgagaaaccaataaaatttcaaaatcaaaaaagtgatggggctatactaaatctagcagcacatgatcccatagactggccaaatatcattagtatttggaaggggttaatagttcaaaaatacatacaaaatcagcataatatagggaataaggtggaggatatgataacttatttagaaacatttttgggtgaatctgctaaagtcctatgggaacaatgggttgaaaagaatcctaataactatgaagagctaaaaagagcaggaagtaatcctcacaactttgaaaatatagtatctaatattatcatagctgaagacccagaattaggatatacaaccctgcaaaatgaaagattaaaagaaatagaaaaattaactttaacaagctggaaaggtataaaggaattttctcaacattatctatataatgcaacaactgctaagcaaggatacaataagggaatagttgagcgatattttaataaactacctgacccattaggtagtatgatttttgaggaatataaaaaggaaactgaaggagctgaaattaatatttcccaagccataaccttcgtgttcaaacaattaagaaaaatatgcacaggaatacaagcccaaaggtcaatgaaacattctgattataatttttgcaataaaataatacaaatacctttatcatatggagaagataggcctagaaataaaagaaaccatagatatcaaagtagaaatagcaataatataaagacaaagaaaaggtacttcttaagaagatcagataatagagcacctttcttacataaacgaaatgtaagaagatataacccaaagaaaacttatgataagacatgcagtgtttcatatgtaattcaccagatcatttaagtagaacttgcccaaataaagatcaaaaaagatattctagtacatatgaagaacaagagagagttttaattatagatagcgtaaatgaaa

SEQ ID NO: 11000 - DNA, 19727 bp, Oryza sativa
acccctcctcctcctccaggcccatctccatctccgccgccccgtccgacctcctcgccagcgtccagtctgtcgcctccgccctcaccaccatcgtcctcgtcacgagtcaggccacttccttgccgccacctccccgatgacgacccggactccgacttcgcgcccgacaacccggacctcctccgcaacagccccgtccccgaccgcctcctcgtcgtctccgggggtgtcgccgccaacctcctcttcaccttcctcatagtctacgccctcggccgcccgccgccgcccctcttgtctccggcctcctcggccgtagatggggaagggggagagaaaggggagagagaggggggaagggaagagccagacgggttggagagagaggatgacatgggagccccacatgtcagtgggtcccataatatatatatttttttgtgaatgacagatgggtcccataatttttttttaaaattctaatgccacttaaggccacgtgggacgaagactgggtcaacactgccacgtcagcgccacgtcagtaaaaccgccctccaataccgctgagggagtcaaatcgcaccggtttcaatagttcggggagtcgttctatccggttttctggttgtgcgatacgaattagattcggcgtacaattaagagagtcaaagtggactttttcctaatagcaataagccaatttttcaaccctaggctgagttaatagccacccatcttggtaacaaattaggcccaagctcagatcaagtcgcattgtcctaggttgcccataaataatacttaggatatgtttagattgtagccaaaataaatcttactaaatttgacatttacaatttggcaatattggaaaatctttgagatgactctggcaaaattccataatgcaaccatagacaatcaaccatccattaaatctgcttgattattggctataaattaagcgtttaatgggctagacaaaaggcccaaacaggaattgggtgtttgttgggcctgatcaaatatatattccttcctagaaattaaatactccctccgtttcgaaatgtttgataccgttgactttttagcacatgtttgaccgttcgtcttattcaaaaacttttgtgaaatatgtaaaattatatgcctacatgaaaatatatttaacaatgaatcaaatgataggaaaagaattaataattacttaaattttttgaataagacgaacaatcaaacatatgctaaaaagtcagcggcgtcaaacatttcgaacagagggagtatttattattgggtctgcaaaggctgagtgctactgtggtagttcaaatattcaactcttcaacttcaaggcctcgtcaaatccaacaatattggcactcgagtggtttttttttaactgaagcactcgagtggttagatgtggttagactagttcattgaagatatggagagaagggccggagaggaagacagagcaagaagaattacaagcccaaaaggaaagattttagaggaaatacatgctccgaagcaaaacattttagaacatacctggttcaaagtgaaaccattttgtgagaaatacatataagagtggtataaaaaaagatagtccaaaatataattcactcaaccttaaatgtagctagatcgaccgattagtcccatcccgatggaatgattatattattctctgccagcatgaaattaagctttgaattcaaacccagacttcaaatctagaattttatccacctctcggtattgtaccgatcgatttcaaacctccccatttacttaatcgtatattttgtccgacatataatcccgataagtcctgtgactcgatccctatcccttggtgcatgtacacgtccacatgcatgcacgatcgatctacccaccacgtctcaggccaccggcgataatgggtcggtcgtacgtacgtttgaccttaattgtgtgagtcgatcagttagaattgaagcttagctaagctcgctgcctagcttattggacaagtaaattagcacgccactcacatgatctaaatatctgatcccaaacatttggagtatatagatcaggatgggacgcccaaaccacgcatcagtgatgtggcaacgcgccatatgcataacacgtggtccccaccctatccacaggataagaagtgaagtagtacatgccaacgtttcaatgcaaagggcacaggaagatatacgtttaactatttaccttatttaaataatttacataactataatttagtttattgtgagttgttttaccataaaagtttttaaacatgatttatatcttatacatttgaacataaattttaaataaaataaatagttataaatgtgtgtctaaaagttaacggtattacatatgttaaaaattaaatgaaagaagtagtaagtagattaaaagaaaggagtagtaagtaggtagcatatcgtgtacgcaatcattcaatcgctcgagaggatagatatttatgatttctatataaaggcaaagtaaaaaagacatcaagtctaaaattatagttgaaaatttaaaattgctttgaattataatccaaagaacaaccaagagcatatacttgcagcacattcataatccacacaggaccacacagtctggttggcaggtgagcgtgtagccgtgtacccatgacgatatgtttatttcagtttgtactgatcaatatgtacattgcacgtggcagtaggtgccatgagccatgcatgtgcccaagaaaaaggccaggtgcgcgtgcgtagtgcgtacgtcgtcagtacgtcggagtaacttctagttattctacctgtcaaaaagagaaaagagagagaaacttctagttaaccggcggccaccctccccttatcatacgtaccttaccatcgattcgtgtgctcgtcgtgttcatttttttaagcaggtacaatagcatactattaaccagtaagtatattttaataagataaaagatgagatagaagagcagtggcctacagatctatagccagctgcagcacggacttcaagacgtaatgtgtgtatgataggtgtgaccatatattaatagtacagtaattaactattttataaattagctattagatcagctatagatgaattagagctaatactcttagtagtgggctatactattaaacttgctcttacggcaacgatgtcctacaaggctacaacgttatctgagagtaaatagaaggtacgttgtggatgtacagctttatcacacctcatactggattacattagctgggttgttagcgtactttagcacctactttagctgggttatcacacctccaactttagcacctaagatgaaaaaataggaaaacgcaaacagctttaagaagacccggtttgccatatgaggtcggtctaaccgctaccacagggccggtcagactgacggtgtgggcccaatctagccgtcagcatgaggccagtcagaccggcagagtccaacttcgagtctgatttatcggttcttgggttttcttgtttgggcctgaggttatcttcaaatcgatctaaactggcctcaaggctgatttgatctctaaatcggctctggtagccagtttaatcttcaacacctatcttgatttagagttatctagatcatgatagtaggcgactccattaacaccgcaaatctttacgtgagtctcatgttgggactgaaaaaggtggcaatagaatgcttacccaccacatccacaaattcaccctccccaccgctcattgtcctattagcacagtgtattctactagcactaattgtactaagtaggccagtaaaacataaatctagctgtcaatgcaatagacaatttagacctactccctcttttgttactttcggctataaatttgatgtaatctatgcctagttcttagctattttttttctagagcgaagggcgtgtttttcaaagaaaaaactagacctattcactatgttcaaaaccattgcacaagttggagggtagcactcttgcccctcactaggccgtcatcatccatgactctacgccaccgcttgtcatacctatatgagacatcctatactaaaattaagtggctcccctattttagtcctcttattatgcaagttttccctactattcagttagggaagtccaatagcttggagacctaaagtactcttttaatcacattttttctatgtatacaacttactactatttcttctattttggaaacttttttttttaccttagcgaagcaaatagttctagctagtagaaaaggatgggtttgactaaataaaggacaaactttagaaatgcctttagtaggacactggacacacactttagaaatgctttttttttatgggatcgtttcatctatgatggatggaatgatcccatttttgtaggaatgatagggtatggcccgcaagtcaatgagataaaggaagcggattggaatggtccttactggattcggttaagaaaagaagttgatcaaccgatggaagcatatccagaagagaccgagttcaagaaggaatcgtgaagaccatggcatggcaatttaattaggtaggatctagtaactttcctttatctttaggaagttttgtctagtgtccgatcggaccttttatcttttcttttaggcaaaatttgctatagggcatcgaaaaaatgtgtaattagcttgtggacaccgcaagaacgagaatttgctgtcgggcataaaaaaatgtgtaattagctgatggatactcacggccttattttattatttccgatggatttggagagagaaacactggtgagagtacgattttgcccctgccatcgtttcacttacagtagactgtgtctggttcgaaccaagacccagtccagtctcactcccctgtagccatcgcgcacggcgaggtgatgttgatctgcctagacttgtaccttgttcaagaggtgacgagcacggaggaaagcagagtcttcgtgagcggtcgccgaagccaccgaatccgaccccaacttgatgtccgcgctcgcaccggcgggctgatctaccaaggagcgggctttgcagatatcccgattccgaccatgcatcgccacaagaggcagtggtggtaggtgacaccaggttcgtgccgccgacgctgcagctggagagcgcctagagaatggacggcaacaggatggtggtggcctggcttgcactgtgcgcgccggcgagcatgacgaggtcgcgggggtgaggtgggcacgccgccttgcgaccggtgagggagagtgcccggagtagaaacgacggaaacatgcttgtacggtacggtgaccggcggcgatcgagtcggggatgaattggggggatcagcgtctaaggtttgcagggatgaatcgaatccaatccaccacgcggtgctcgccttctcactccctcgttgtaagtggaacaatggtaggggcaaaatcgtactctcaccagtgtttctctctccaaatccaccggaaataataaaataagcccgcgagtgtccaccagctaattacacgtttttttgatgcccgacagcaaattctcattcttgcgatgtccaccagctaattacacgttttttaaatgccctgtagcaaattttgccttccttttatctttaggaaacttgtatcgtgtccgatcaggactagtatcaatccgagggtataaatatgtacacccgggttctttgtaatctatctccacaggacaattacataattacttttggactatcgcaacccttattccaccgagttcttaattagtttcgagttgggttgcacggtttcgatctccagcgaggaactaagtttcgtcaacttcgctagtatcggcgtggctagaactatctcggttaagtccgatattctatctaggttgatgcaacgttgcctatctgatatattgattcgatatttaactgcattgttgtttagagtcgtatcaacttagttaagactttctcggttaggtttgatattttgactaagttgatatttctctaatcatactgctgttctagatagatttgttatatccatcatgtttgtgtaaatctatatactaattagatttttcttattatcttcaatcttatattgtctttgttaggtctgatctattagattgctgctagtaaggttaattctagtaacccgataggtttttacgcaacgttcatcggagtgctagccaatgagttatcattattgtgggtttcagctatcagatatatcaattagttagccgatgtacattttaatttacttacatcggatctccaaccaaggtatgctttaaccatcagatttacatttatcacattatatcagtatcggttgattggttcatattatattaactcgttgcatcttctgagttacatcaattcatactcaaacgtgtataatctttaattaaatctatctttatcaacttcaatattgtactgtctcggtttgatccgatctatcaatattgttttttataaagaacggtttattgatgattatgcatactttgattccagccgatgacaacataaatctcattgtttatctggtatatttgaatctacattgagtctatagttgattgatcaaaaccttatcgacatcagctgacatcgctacatcacatcggcctactggctggcaactccttgatcatcaatctatttccatcttgttagttgcaggatcaaactaactggcacgccctgaaaccgattgattaaacctgcactggagctaagcaaatctcccaatccttcgtgtgaatgatgaatttcgcgtcaacaacaccctgaaaatgggttcaccctaacccatcccatcgccttgctccgatcaaacacatgcttagggatagggatgacaatgtagggcccaatcaccaatccgtatggtgaattcatcaattaggcctagatatgacgaaatcttttcaccacgagtcaattagtaggcccaactctcatgtcggatctatttaggccatggctgatgaagcattcactttccccgctaaccatcaggagacctaataaaactgctcacacgtgggattacaatataccatgtataaaacctgcttcaaaccttagatctcaccatgttttgtgaattttgtcttctccaccccacatcaccctctttatttccatttcctcctctttttgctcctttcacctttcgctcctctgacgctagcgcctccactaccatatgctagatcagtgttacccaacattcttccagcaatcccgcgtgcaccagattatcgctgctaccgctacacatgacctctaggcgtgacaacctcattgcctctcactctcagtaattgtgatggcatgtctcggtgagtttctcccttgcaattctcggcagttgttttgggtccctttgataagtgcatggtttgttgggaaagatttagatttctaattgttttgaccatatttttacttgattggtagtgttagcgttcatttgttgtttaattgtaaattttgacacctaaaaattcctacacccccgcttgcggggtatttgtcaggagaatttactatttgccatcctaccaaaaatatatgcccaaatgccactcttataaattttcattcccatttgctatccgagtctacatgtcagccttctttccgggtccacacatgttcacaagcttaataaatagaaatgaaggctgacatgtgagcccaggtaataattgaaaataaaaatttaggaaagtggtatttagccatgtgtatttgggtaggatgacaaataataagtaaatcctcctggtttttgcctgttcctagccggggacggctgcctgtgattccagtagtaatccacggaccagttttgcatcctttaccaattaccagtgaaccgcgttcacataaacccgccgcgccgtttgcgtccattccgtgagaagcgaacacgacccacgggactcgacgcccaccacacggcccagcatgaccatgggcccacttgatccacagaacctctccccacgtgacgccggccaagtggggccggggcccccttagtctaagggccccacctgtcagtcagagctttgccgtgtcacagtcgaggtcgggctctctcccctccctttatttaggccgcgcgcgggccgaacgaacgcaacacccgccacaagctaagctagagcacgagggtcaggcaacgcgtttctctctcgctgaaaagtttgctggatttgctcctctccctctctccgccatggaggaggcccagtgtacgtctctgtctcccttctcttctcttcatctgttcatggtgagtttgattggtggtgtggtgtggtgtgggactctgaggctgtgattgattcgattctgggcgctctctctctctctctctcgctgctttgggagtatcgaaaccgagaatcgggatcggttcttgatcctgttctgttctgttatgttctgggtgtcatggggcagagccccattgggatgtgtgatctggtgtttgagggggagaggttgttacaagctgtttgttgtttcttgctgcctgaattctcggatgaatttggcactgttcttcgttagaatgcacgatgctcgtttgagatctcgtggatagccaataatcatgccgaccaaatcaggattagtataaactctgagaattccggtgaccaccgggttcgattctccatattttgtggagctttttctgttgcaatcgttgttcttggggtcccaaatctgaaacctttttgcgctcgcttaatacttttttttaatgtccattttcaccggaatctgccaaaataaacgcacgttggcgactttattagagggttggtggatgtagatgctcttttttttttctttctctttgacaggaagatgcgtgtgagctgtggcaatgtcattagaaaagtacgcctttttcttgcgtgtaggttgttctgttgagagaaagaaaaaactgatgagaagactatctcgggctgggcatcgcatctttagaattgattgagtgatcaaccggatcaagtaggatatccttgtgagttggcatccctatcacgccatataaggcaaatgcagaactcgtgttcggctggaaacaactgaaagtagatgagagcgatgtcatgctgtctaccggttgtcacagtaactctgttctattgatatgcgtgtaccaactggccgttgatgcctttggatggaaagaagaatctgcttttatgtttctctgccttcttggcatttgtagtatgtctttgacaagtacaactaatctgcctttctggacttcttgcctgatttagtttggggtaaattgcaatactccggatgttcagagacaataagagaatttactcgaattgtcaatcagataacgtttggtagcgatcactatacttttagtacttgttgttaaacttcgttgaaggttctactcttttaggtctctctgcttatgaagttgccaatgatcatgtcctcaatatgtaaaataagctaaaataagttacttttcctgtagttgtggagtcaaaggatggaaccatctcagttgcttctgcatttgctggtcaccatgaaggtaagagtaaaataatgcttctgcattagtcttctcagtttgatctgcagcccagctttcactgtttgggtgatttggggcgcttttaaggtcttccagaagaactgcttagtgttaacttgagttttggaaaaatttacagctgtgcaagatagagaccacaaattcttgacaaaagcagttgaagaagcgtaccggggagttgactgcggtgatggaggcccctttggagcagtcgttgtccgtaatgatgaagtagtagtcagctgccataacatggttctgaagcatactgatccaactgcacatgctgaagtgactgcaataagagaggtgaaatgctttatttatctgtcactgctcgtaaatcatttgttcatgagaatatgtgtatccgtttgggccttttgcgtgttaaacttcgaattgtttaccacaccattttcggatagctactcacattgtcgttctgttaaattttcaggcttgcaaaaagctcggaaaaatcgagctctcagattgtgaaatttacgcgtcttgtgagccatgcccaatgtgctttggtgcagttcatctctcccggatcaaggtctgcacccgtcaattttcctacgcataacctcatcacaaatatctgacgattttatttaacacaactgctaattcttcactacagaggctggtgtatggagccaaggcagaagctgccattgccattggatttgatgacttcattgcagatgctctgagaggcactgggttttaccagaaggccaacatggagatcaagaaggctgatggcaatggagccctgattgcagagcaagtctttgagaagaccaaggagaagtttcagatgtactaatgtgcaggatagagtctcagatacgccaaagtccccctgatgatctagggaggaataaaactacaatgttcagcttttccattatttctcaaactgccaattcaaatgtattttcatcctgataacatttcaattgtctgcatgttaatatcattcaatgaatgggtacctacagaaacaattgcaaaacagagtttgcatgtctatttactcttaaaccatgaaaacgacagatgatggatgctaattaaacatgttgattgaaagcaacgggttactctacattatagctaaaataatatggaaatgactcaagacttgggtggtggcatcagatttgtaaaatccttcttctggtactgaaagaacagaatactcaactataaattgtttctgaaactatcaactcaaaggtgtatttacattctgatgacactcaatatctgcgaattctgttatgtgctcttgcatgaatgttcagtttatacaataaactttctaattaattttccatagatcaacttgctaaaggttagaagtccttgttttcaggttgtcagtaatggttccattgcactggtgcctaaataattctcaattaatcaatttacatcaatgatgtacactaggaatataacactctcagaaaatgtccatactattttgagttttatttgtgtactccatcttttgttgatttcttgattgatatgtagcagactatcagtgtaccaccttctcaggtactcattccatcccaaaatagtttttaaactttgtctcaaaataaaccaatttctaccttcttatctaacttcagcttgcaagtttagaaattgtatcccttcaatacccctcacctaccaaccaaccaacattaattctatattaataagggatatttttgtcttttgactttctccacattggacaagggtagaagttactgtgcatcaacagaaattgtcacattgttactctaatagaaagtggtaactgtatcttttacactcctttgaagttataaacatgggttgcttttatttagagtaagaatccaaacaatacaggacattgaaataataacatcacaccaacagttatctccacaaagctctatacacacgactacacaaggcaagccttaaggcaaaattggaagtcttcaacaatcacttgcaccaaaaataaaaatctacaaggacatagttgatgattggggcgtctaactgtatagagaaatgaacttgaggaaaggattttgtaaccgggtagcgcccgacttatatggctgctgtgctgctggcactgggtagctattaccatcatagcatacttggcctggcccagggctgggcctaagttgctcacatatctcaggagctacagaatttgagaacccttcgatgagcgaacaattccaaggatcagcagatttgctactgagggacacatttgataagcaaatgttgctaaagatatccccctggatgcccagcaacattcctgcagtaccaatgtttacccccaccacattttttatcgttatgttgctaatgactggaagcgcattcttgtcatagttgtcgtcaggatgttccccatagtttccagtgatcctgatggctattgagacattgtccatgctcacatcagctatgtatatgtttttcacatacccaccgcgccctggggcagtcttgattctgattccatgcaccgagttgatgaaacgaaggccctcagctcgaacgtctgatataccacctgacatctcgcttccaaaggctattcctgcgctgttccttgtctgtccagtgatgttgcggatgctaatgttggagctaggatgggcaaaagagataccatactcgtcccaaccgctcttgatgacgacaatgtcatcgccgtttctgatgtagcaatcttcgatgcacacatttgaggatgagtctggatggcattgaagttgcattagcatcagctattgaaatctgctaaatgaatgcaaacatacaaaacaaggggaaaaaaaaggggaaaccaggtatcagagcaaggactactctaaaaattatgcattaaagtggtcgctttatctaggggtgcatggtacattcgaaaaaactgaatcgaagctacatttgaggcaaatatctcaggaagatgaactggtatgctccatgctttgaactgttattccatcgtatatctgtccacagttagtttgtgtttactaaggtaatgagaagttctgtacattgtatcggacagtaactatattgaatcatggttaactgcaagttaattgaaattacatgaaaaatattatagaaacattcagaattttggtcatattaactcaaataaagcaagcacacctggatcaatgccatcagtgtttggtgaactgataggtgctaggatcgtcagatgctggacaagaacttggctgattattttgaaaaaaaataatcaagataagaaataggtgcaaccacaacagctggcactgttaataatgaagcagagatgtagacaaaccaacctgcagtatacaggatgaatattccaaaatggtgcattcatgaaggttaaattggaaataacaaccctgtcagagtacatcagttcaagaagagggggcctggtataatttagtgtgtgattgtgaaaccagttccaccaaagttcaccttggccatcaatggtgccattagcacctgcaagagcacagcaatatgaaatgcatcattacaatttacaagtaggctaataaatacaagagcacacatgatataaatatgatacttactaaccagttattattacatcagtaagattggatccaaaaataagactctggtgtcttttaccagggagttctctgccacgcccataagatggcagaggatcaataactggccagtcagatgaatcctgcaaaagaattcttatgacgatcgcgattgtaatacttcttgcactgtttgttctagtgtaaagtattttcatgttggaacatgagaaacagttactgtaagttccaataatttgttttcaggaaagaatgttatgaaatataaaacatttcacgttattctgcaattttgttagaatgcgatttatgtaaagcagtataaagttgaatgcactagttttgttaaatttcataagacaataataaataaatcacttctgtgaaatgaatcaaataatgcataaagttatcttacttgagatccgattattactgcatcggcgtcaagtgacacagtgagatgactgataagattaaaactcccagtcaaccaccttccagcaggcacaaagagctctgccccacccttatctgcaaatgagctgaggtaaaagattgcattcttaaacgctttcgtgttaagagtaacaccatcattaacagcaccaaactcagtaattgacacactgtgtggccgatgcacgcttgctgtcaagtcgttgcagtacatggcagatgaagtggcccattgagtcgcagcaaaaacagttgcaaaaaccaaaaggacttgaagtgcctacaacaaattccagaagatgaacgtcaaaaaatgttgttcatgagctgaatctgaatagtgcatttttaaggaaatacaaagcaaatgaaacatagttcaaacacagagtaaacactatttgggggggggggggtgaacttgtttagtttgccacaaagattaattcaagttatccatcagtctttgtccttacaatgggttggataaaatgtcagcatcaactgactttgatttccgtagtgttgccaatgctgacttctaagttctaacaaggccacgccgccttctgcaatgtcggaatccatggtataggggaaggaatcacaggtaaaagcaaagcatggagctcctccactaggagcaaaggtctcacacatcatcctcggagaattttcccaaaagaaaagtggccaaatgggaattataaaagtcccacttgaatccccatgcaagaagacagatgtctccatcaaaaaaagacaaagacagcagcagtgcacttatcccgtgatgcacccattaggctgtccatcacagtgcccgatcttaaaagaactgaattctaagcgaactgccaaattctacccaaataattcttggatcagttgattcctatccaaatctatagctcaattctaccaccacattagagttcttggccaaggcaggacatgctactacaaggtaatcaatcagagcaaccgaaacgggacccaaaacaagaaatcgtccacttacagatgcggatcggctcatcattttctctagcagcgagtgaagaaactgtcaagtcagttcttcctccctcaaatcgactcaccagcaggcaccacaccagaacaacagccaagatcgacgacctgcaaccagccgccaccaccactaaccagggtcaccatggacggaaatcaagaacgaggagcgaccaaccaacaagaacacagcacacaaaacaaaacaaaaaaaaaaaacgcaaacaagaagccatactctctacttctccgggctcgccttctcgggccgcgaacgcagcggcgtcgacggcgacggctatgccgatggcttcactcaacacactcactccccatcaccttctccggctccaagcggcagcaaagagaagagtaggactggaccaagctacagtcacgaggtttattcactttattgggaggtgtgcagaggctgctggctcatcgattgttctggtcggaggtcggatagggggaacctggtgctgctgctgcccgatggaatggaatattggacggacggaacaccggttcttgacttggaatattgggtccgtcaaagtctcattggttgccaaaacgttttaccagggaataaaattaatttttaggtaattttttttatattcttcatagtgacttaaaagccaacactaaaaagaaattgcattaaaaatatcttaaatacaacttcaagtccgtaaatttaaattttagtattttactttggcttattagatcaaccgatgagacttttaagcgtgtgtttgatttaagggatatgatagaataggtttaatttaaaagagaatgactaacataagttaccatctttcttaaaaattgttgggtcaatctaaccgatcttttttttttcatttttttcagtgactagcgaaatgtccgtgcttcgctacggataaattatttcttagactaagtattgattagaaattttaatgataattaggatggataaaaccaccattacatattgatatactcatgttctcataatactcaagatgggcatggatggtctgatgatcaaacggcgatgaggactgtggtaggatgcatatcacaattggactcatctattgatggtggacactggcaactaagaaaatcagaacagcagaaacgcgactcacaatattgttccgctagatagagagagaaatgacaatggcgacatccgggtctgatttgagttgctcatttttttcggttcgatctggtttttcttctaataatacacatggtttttgctgagttttttttgcccgatctgattttttaataatacacatggttttttccgggtcgcttattttattattttatttttaaataataaaatagcatatattttattttattttttctagaaaaaagtccgtgtgttgctacgggtgactattttaatcttattttgctacgatccaggtcgccgagttttttccggctgatctggtagtttttgtccgggtcgctagtttacggttttttttgttcgatctaggcttttggttgggttgccagttggttgttttttccggtccaatttagttttatacgtgtattttatttttaaataataaaatagcatatattttattttattttttctaaaaaaagttagtgtgttgctacgggtgaagactattttaatcttattctgctacggtccaggtcgccgagttttttccggcccgatctggtagtttttgttcgggtcgctagtggacagtcttttttgttcgatctgggcttttggttgtgttgccggttggttgttttttctggtccaatttagttttatacgtgcctaacctagatgacggatgaaaattaagataagtacggaatcatcttcaatttttataatagataaagatgaaaattagttaactctatttgagattcaatcctttcgtgtgcacgaagaaaaaaactaatcggaaacagccgtggaaaagaactgggcccacaaaaaaccgcaacaaaataaaatcgtgacccactcagaaaaaatcggacttaaaaaccgggcccaaataaaaaccgcatgcggagaaaaaaccacgtcggaaaaccgaaaaaaaaccgcgttgcggaagtaaaaaacgtcggacaaaatttttttaaaaacagtaacaaaataaagtcgtgacccactcagaaaaaatgggacttaaaaaccgggcccaaataaaaaccgcatgcggagaaaaatcccacggaaaaccgaaaaaaaactgcgttgcggaagtaaaaaatgacggacaaaagttttttacggaatcattacttatattttaattagattttaattaggtatagatatagatatacggaccatatcgttcaattaaaaaatatttattcatctcatccctatatgtgcaaatagatggttggaatcataacattttagaaagaaagggataagtcttaagccatctatctcattgtcaaaccaaacacaaatacttaagttgcatcgtattgagagaaaattcgatgcacaacacagaaaaaaagcttgtaccataaatagtatatttttttcccttttataagaagcatatgtcatttgtttttcttcgattcgtagcactcccatcacatttgccgtaggtgcccttctacaattccatctttctgttgggctaaattccctccacatggacctttgttcttagcccatttgcagtccaaaaagtctaacaattgtgagccattgattcatgtcttgatcaatggttgagattacctcatcctttagtggtgggaagaaaaaccctagcctttattggagggagagtgagaagtagctttgaggtgaaataacaacctagcaaacacaagagagggagaggagagtagagaagaagaagggcagcttgttcagcttaggggctcttacctgatcttcatcaagtcagcgattggaggatcaaacatggttggattggcactaaacttggtgagtttgttcctcactttgagcacttcaatctagacagtttggatgaggattggttgagtagagcaccagatttgggtggtggtttgtcagctcgagttactgcggttacagattgtgcagcagttagtaaagtgtcagtttgaggggtcaaacagtgtccgatttggttgttttttggatagcctagaagggactcatagaccatcacttctgccatgtttcgtgcaatttgcatttgtggtttgggagatctcagctaagaaccgaagaggacaaaatctgccatttctctgcttgttgttatgcctcttgttagttgctatagttgatgttgatgatgccaagtttgtaacttgatgttatagttgctgttgtcatgtgcctctagatgttctaaagaagaatccatttgtacccattgttgattagtgcggaagcttggagtggaccgttggtcccgtggttttttactcctcacaccgaggaggtttttctatgtaaatcaccgtgtcttgtgtgcgtgtgtttattgttgttccgctgttgatttgatagttgaaactatcctcaaagttcatggcaagataaggggttgattgtgttgtggaaattataagcacgtaatgatttaatttgttccataaataaatcatgacattgcagatgtaaactagcatgaacgcatcattagatctacatatgtaaactaagcagtaaaacacgaacagatcaaatatgtgcaacatgttgaacacgtaccaaggttgcggaaagaccggttgcttagcaggaaccactcgcggttgcgggcgtcgacgaaggcacgcagcacgcgagtggagaggaaggcgagccgtcgtggatgaacagggagcagtcgcgcgaagcgcttcccaaaaaccttattgccgccttgtcccggtgtaggacgtcgaaggtagaggttccggagacctgctctcccgatcaccggtacacgccagcgagcgagatggagtagtctacgagcggtggcgtagcacagagtaggaggcaaaccctaaattgatttcgtgtgtgttgcgtgaaggcggcggctcagtttatatagagataggtcgcttgatcaaggcgcctgcacgatctccactccgcgtaaccgaaccggataaatctatccggactccacgccgttttcacgcaccggttttttcggaatgtttccaaaacaaaacaaatccaaattttcccgtagcaaaacaaaactgcaaaaggaggctgcatctgcgcaagggtgaggtgttggtatttcttacgatcacagatagaatccgcaagcgcacggatataccgatgtagcacttcccttatggagtattccaagggtatcgaatcaagggaacgtgtgtgattatctcctcgttaggttcatccaagggcacaaagctaatgtgggcagagggcagagaggatttcctaatgagaaacagtgtctaaggaaagcttaactttaatcctaatgcaatacttcaggcactggtaacccgctgttcctagatgtcgctctactacgtacccggacaaggaggacttaagtgctcttgagggttgtcaccacctctacacccacctcaaacgtactgtgggatacgcagcaaccactgaagattaattacccagacatcgcgtctatgcaattaataactactctagtgccgatcaaacactaaagcaatcactataaataaatggactatagtgaacaatgatcccgtatgctaattaggaactaaccaagaagtaattctcactaagcaaatcttaattactcaaaatgatatttctattaaagcagagtaatta

SEQ ID NO: 11001 - DNA, 28834 bp, Oryza sativa
ggctttggtggagaacccctcagcccaaatgtacttgcaattggcccatttgaatgtgcttcattatgtttgtgggtccaaaactccataggtttgaatatggaagtttaattcacttcctcctctatgtatcttttgtctcaactttggtggttattgatggcgttaatttggtatttaacagccgtcaacaaagaggaaccaattttgtggaccattcgacgcgtacgtcgtgcacgtgcgctgcctgcctccgaggcgaggcgagcgagcgtgcgcgtgtgttccccctcttctctccaccacacatgcttcaagtggctaggagggcatcctcccttttaaggaggtccccctctcctagaataagcaaggtgctactaaactccccatgcatgccatcccatgaggtgggcttttgtgattttccaaagaattaatctttgagtgggctaaggcccatctattaattccaacatgtgtaaaatatgtttaccggttggtgaattgtagtttgcacattaaaagtgtttggttcagccccaaaactttcccctttccttcagttcttcccattgatcttgtgcagcacgtcgatgtgtagccatggtgcagcatggctgccgaagctacagacaatgcggcggtgcggcgcgacagccggctctgcggtcagcccaatagttacagcgcatggtgtggatgcacatggcacagtgcccaagactgcagcagacgcttcagctagcgtgtgtagcacggtgggacattcaatgtggcggctcgccatgggggtcttgtagcttctcggtagcttgtggcatgcagcctcatcagccattacttctattggccacacatcatccttctccgccctcgctgccaaggcatcggccaccacacccacacccactcgccatcgccgttcatcgggatcgagtcgaatcaaatagccgaggagcccaatttcatgtttggttagaataaagggcaaatttgtcttattaagcctctaatcatggctaaacaattgaactctgatgaaaaatttgatgggagtgctacgaatctagaaaaaaaaaacaagtggcatgtgcttctgatcaaaatgtaaaaatgttgtacaatttttggtagtattttcctgtgttatagatcgaaatttctcgtgtgtggattaccacgctcaagttcgttctactattgtgccaaccctttttgcgaggtacattaatttaatgagagataataaaaatgttaaaagatatacatcaataaaaaaattgtacaatattagtccctcaattttataatataaggcaaaagttgtttcataatatatggcatacatgcatgtatgccattaactaacacctcttctccactaaaatattattatttaaattctccactatcaagatctctaattttattagatgcatacattacatttattaggttaatccaaactatgtgatgataataattatttcttgatctttgggttaagagtggttatgccttatattttttaacggaggaagtacatgttgtcagggttacgggttaggcataccctttacccttcgatatacgttacatatcgatatgacatacccacgcgcatgcggatatttcctgtatattctaaggaaacctttcacggaatctacagaagggaagaatcctactcgggcagaactgggtcattggcgtatcgtatggggtctgatacctccgagtcctacgtggagacctctcgatctacaatataaaagggacctcccggggagggtttaggacatcgaatctcagagccaacacaacctacacagcctatgaagccggagcctacgaggagccaagtcgtcgagggctagtcgaaacaactcgactacaatctcgccagatccgacaagttcccttgttccctttgtaacctgtgttttctaccgtataatcccacatcaactggattagggttattacctatcaaggggcctgaaccagtataattcttgtcttttgtttgcttgatgtcatactacgtagatccttgtaccaacgtaccccaataccctctatatccggtctacgggtatcacccgtcgacagtggcgcgccaggtagggggccttggtactcaaggttctactactatgtcatccagtttcgtcgacaacaacgtcagcaccagcctcagccaagtactccctgcttcaacaatgctggtatggactcaagtcggcgaaatcgtcttcccggtttacaccacgacgccgatctcaaccggtcctccaatgaccggagacgagaacgcagtggctacgaaccaaggcgattccatgtcgaaaaatcctcccgtcgagacggagaacggaatatcgacgacatccaatctcgagaaggattctgatacggccaaaccttgtccttccgacatgaaccacgagttgacaaagataacttccgaagccacaaggtcttggtgtcctatccacaaaactaagaaacacactctgcaagattgctgggttttcctcaacgtctgtgctgaaattcgcgcctgcaaagaacgtggaattcagcgtacttctccaactcgggatgtctattgtcctattcacaagacaaagaatcacgacctctcgagctgcaaagtctttctcggcgccatgaaagctccgtctcctaagtcatatgtccccatcagggataacggcgaggaacaaggagcaactccaacttcagatcgattcgttggggtaatcgatatcgatcctcacgaaccatcggtcttacatctcctcgaggactatgggtcatcgacaacgagcgcgccgcgggaggtattggctatcgatgacgttggcacgtcagctgtcacgtcctgataaattcattccgaaataaaaatcattccctaaaaggaataatagaattaattaaaattcgaaaagaaattggcaaacactaaaatacgtacaagaaaaaaattcgaatgtggcccagagaatttttgttaaattctccttggtctaaaatgagccctcaaattttacttgaattttcagagcaccggaaatatttattaagcaacaaaaacaattatcaaagtttaataaaaagaaaacctaaaaataatcctcttttctcctttgggccaagcccagccaaagtctccctctcctccctctctttccctcctctcccgggcctctcctcctcctcccggcccacctcttccctccctctcccggcccagctccctcccctcccctctctctcccgggcctgcctctccctcctctcctcctgggccgcctccgggcccaagctgagcggcgccctcccgcccgtgccgcgcacgtgcgtgcgctgaccgcgcgcccgcgtggggcccacgtgccaggtcgtcgtcctcctcctgcccggcctcctcctctctcctccgtgaaccctagccatttcctccctcaaatccgcttgattcatttggctaattccaaaattgattaggggttttaatccccattgattcctcttcaattcccccttgattcgtgcccccaatcgtcgggaacagacgcgtcttccccggccgctttccatggccgccggccgccatttccaccgccgttccccgctcctcccgtgctcggctcgcttccctccgctataaaacggaatcccctcgctccgttctatcgttttagccccctcccgcgatctcctgtggtccctagccacctccccgccgtcgtcccctctctcccatgccgccggccgtcttcagccgcccctgccgccgcgttagcacgccggccggctgtgccgtcgcctcctctagcatcgcagccacctactcttcgccggcctgccctctgtttcccgcgaagacctccggaagtgcatccccgccggcaacagtggcgttgccgccactgttccgcctccggccgcctctgccgcgtcccctgtgcgccggccaacgtcgccaccacctctcccggcaccggaactccatcctcttccccggccaagccacggcatcgcccgtatttcgccggaacgccgtcgcgcgcgccgcctctccctcggtcttgtcggcacccactccggcagcccctttcgccgtgccagtgcgccggccgacgtcgccgtctccacctccggcatcgcagcggcaaggtcgccctcggcctcgcctccccttcgaccgaacccctccgcggtccatcgttgtcgtctccgttcgttctcgtcgtcgacgtcccgtcggtcgcccggctcgtcgtctcgcggcgccgcctccgtcgtcggcatcgcagcggcgtgttccacgccatccttgtctttatgcagccgttgtaggctgcccacgtcgcctcctcgccggccccggtcgtcgtcgtcgtcgccctctcgtcgttcccggtcgtcgtggcgttcgtccctccgtcaagccgttctcgttcatcgtcctcgcttcgtcaagtgccgcagccccttcatcgtcttcgtcctcgcctccgcgtcgtcaagcctcgtgccggccgtgtcttgccttcgttcaaggatcgccgccgaagtcgttccctcgccgtccgtctctgccgcgcccgttcgtcgttgtcgttccgacgcctcgtcgcgtggcggtaaggatctctcctctcgctgccccgtcctcatcctttcggtgtcgccccgtacccgttgtgcggttgtcgaccccgatacccgtgtaccggtgtcggtagtcgttcacgtgtgcgggtggtgaccgtgtagtgtccatgttagtgtgcccgctcggtagccgcgtggtttccacgtgtgcagcccgtgtggtgtctagtggagtccgtttgtcggccactcgcctcggttgacacacggggtccgcttccgtcgacccgtggaccatctctgtgtactcggtctaccgcggtcctttaggttgacatgtggggtccgcatgtcaacagcgcagccttcctgtcttttccaggcttgcgcttccacatgttttatagttgcaaagtttaattataataatccgcaaatctccatataacagcattaaacttcggatgatcatatcttggtcatacgagctccgaatcgacccgttcaagtctcttaatgtttgttataacctaaagaaccgtgtgctttctttttatgtattgttattgcttctttataggcttgtagctttgcttgtgtgcttcgcgtagcttctgtcgttccggaggttcccgaagcgtggttcgcggccgtcgccgaaggttcggaaggccgttctctctgagcaaggcaagtcacatcatccttgaacatattgaatcccaatttataaaattattctgatttaaattattgcattatcgctttatttaaattcacgcgttatcactgttttatctagccatgcctatttacctttgttatgaccttattattggtgttattgttattattaccttgttcaccctaggataaacaaaaccccaactagtgggtactctattcatgggtccactagtatgaatttaggtagatgcttcgctgattaattaggcaatattaggtggttttataactttagactttgggaattctcatatcatttggacactatggaatagttggcttatgttggaattggacacacacctccccctctattcaaaacccacaaaatagttttaggctgggctcgaggtgcgtggttgggtttggttagtcgtacctcgggtactataaggattaagctcgggcctctgttgcaaagcactaccgtacttccacatgtctagtgggtaaggcttagtttgtggctcagtctggttataaacaaaagtacacggatggagatggacgaagtcgggggtcgatggacatctctaggacaaatgaaggctacacgagctgcggctcggtagtcgagatgtcatggcacagggctggtgtcctgctgctaggggctcaatcctgcctgcctatcccgggggttccggccgtaggtggggttgggtcggtactcttgtttatggctaggatgggttgggaactatgtcacgtcttccgtccgtataccgtggtggtatgtggcacgtggttacacgtgaggaagatgtgtcttgtgggtaaagatgtacacctctgatcagatgtacccctcggttatgggcaagcctagcaatgcacccaagttagtgttttaattcttaaaatttgcttaacaactaaaatgtggaatggttggcctgggttggcttaggacgagctaggacctagggtcgggttgccagttcagtctgaatcatcgtaggccttgggttaaggcaggttcgtgagggttcacggccttgattaataacactgtgtaactctaggatcgtctttataaaatggctttgggcaactaagtgacttttaaatgctgttttctgcaaaacttaacccctatattcttaccccttgtacccccttgcattaatcatgcatctgccggtgtggcttgctgagtactgtggttgtactcattcttgctcaatctttcccccccttcagtaagagaagctttggagaagaagtcttaggtggagtcctggcttataccccagttgagcgcctgtgaagatggagccgtaggcccgctagtccgctgctgttaaattttgattgtcaggccttaagtgcctttgtaataatgtaaatattatcgatataataaagatgtgccttttgtatcatgtttgtttggtgtaccccggcttttcctgggacggggattaatacactagcgttcgggaaaatgtatttttctcggtcgcgacatcagcgcacgccaatgcagaagcagggaatcaatcgactactccagcccagcacatcagggccgttcaagcgatactgagggaaactccttacgatcccgttttgaacattgacctcgagcgttggacagaacgactacgggaatcggtgactaacctcagcaacgcgtttgaagaagccgctaccgcagcacaccatggtgccccatacacaagacggacagacattctccagaagattggcttgttttcaaaaagttgctcgagaagcacatggcatttgaaaaaggcaagcgagtacgcgttgttgagacgaacgaagagacggctcctcacgaaccggactcaacgtatccagactctgacctccacgtctcacacatcttcggcggttccacaacgtactcctccaagcgagaatacaagaaagtggaacgtgaagtctgctcgacatggcagggggctgcgcccaagatgaagtggtctgagcagaagatagagttctcggaagaagaccaccccaagaccgccgttatcctaggacgatatccgattgtggtcgaacccactattcggaacatcaaggtagtgcgagttctcattgacggtggcagctcaatcaatcttcttttcgccagcacttttgacgcgatgggaattccgcaaaacgagttgacaccaactgatcaacccttccatggaattactccccaatcatcgtccagacctttgggcaagattattttgcccgtgactttcggccaagccaacaacttccgaacagaacagatcacctttgatgttgctgaattcgatacagcttacaatgccatcatcgggagaactgcacttgcgaagttcatggccgcatctcatgtcacgcccggaatttctatccaaaattccaaacgcttacatgtgtgtgaaccctcatccaggaatcagccgaggcacacaataacaaattgataatagagtgcaattattactctaattaataagcgaataaaatgtcattacagaggtagatagttcctctcaatcaataaatatgtaagcagcggaaaataaaataaacggcgcagacgactccactccacaggcagcttgaccagggctacgcctaatcctccacaccatcagcatcactgtagaactcttcctctgatgaatgattgcaaggtgagtatatgacatactcagcaagccacgcagcaaatatgcaagtgcacagggataccaaagaatggcataatatagggctcatttgcaaaagcagcatttagcaaacatttgagaattataaaacagttaagtaataattaaacaatattaaaccaacactatacaacatacccagttgcataggcccaaccattctgaacaaccatcccggctgcacagttctatctccaaaccaggaatataccattccaaaccaggagctaaataaattattaccagttatagcatcttctattatgatgagaagtgtgagactaatcacgaaagacattgttagacccgcccataaccgcgggcacggctattcgaatagttttactctgatcagaggtgtaccactgtacccacaagacacagccccacatcatgtcaccatgtgcctcaataccaccacggtacctcggaaaggagctatgacagtacccctcgcacaacacaatccaccacagtgcaccattcctggatcataatcacccccttataaacaaggcatggactccccagcgacccccgtgggcttatctccgccacttctcagtctggtgccccgcaacgaaccatgctatacaaaaggtaaagccgttgcccacgctggcttgtggttggcacgattaatgtttcacaaccgaaactcgtgaaccggtccttaattgtcatgagcacgactctcaaaaccatgtgctcacaacccaccattatcaagttttagttggcaaataattaattaaccaatcacgattgaccatcgtgaactataattaagccatcattaaataatagtgagtcataagttatcccactagtgtgctaatgtttctaagcatggctaagcagtcatatctaatatccagctgaaccaatatatataaagctcaactagtcaagttatattaacctaaggtatcaaggaataaagtaatcaagaacaaaagggctttaacaaacaataggttaattccacccaatgacattcgaaaataaatgcaatagttgaatataaacaatagctttaaacgggatcaacatgctcaaagggttgtttgggatctgtgtgacttgccttgctggccttggaactattcaaattcttctcctgcgaaaacggactctccggaaacgtcggaatctaaaccgaaaagagcaaaaacaccaaaaaagcacataacaaagcatgaacagtacatgtggatatttttaacatgtagatctcaattttagaaaaatttagaaacttgaaccaactaaatccgagctaagatgaattagttatgaatttttaaagattaaatcggattaaaacacttatatggattttaatggaattatgacgcaataaggaattatttttgaaaaggaaaagaggtttattgtgtcagcgggctcgagttcacggtggacggggcgcacggcagcggttcacgggaacgaacggccgagatcgatccatccaaaacggacggccgagatcgatcgggtctacggcggctcacggcagacggccacgatgacgtcagcggtgacgtcaccaccggcggcggctcgggcggcgcaagcttgccggcgaacgacggcgcgacgacgtgaacggagggctccaggacgatgcgggcatcgcggcgaactcaccggtgaccaaagcaacggcggaagatcaacggacggcgacggcgacggcgacgaggaagaagcggcggcgacctacagcgacggcggcggtgctccggcggtctacagcgacggcgaaggggcggacgaggacggcggcgacttggcgaccacgatggtgaccttcccgagcgacgacgacgaccggaacggcggcggcgcacggctgaaacggcggcgacgacggcggcgcgaggttacacggcgctagggctcttccgacggcgagagacgaaggcaagggtggcggcgggtagagaagacactggggatccttttataggggcaagaaggcagcggcgaaggcccacggcgaccggcggcgagaaggaaagtttagggttcggaggagagagatcgatccgaatcgaactcgaatccaacactttccaagcgattttagctggggattccaaaagagaaaaggtagaggagatctcgggaaacatttcccctctattgatttcaccggaaacggaaaggatcgaccgaatttggaaggagacggcggcggctcggcgctagggtttcgggcggcagcggccggaggtagacgacgaccccgacaggcgggccccacctgtcagcgacgggaacgcgcgcgcggctgcgacggactgggccgacttgggccggggagagagagaaggttttgggccgactttcggcccaaagccaaaagaagacatttaaaaaccttttcaatttaaattattcatgaaatgcaattccatttattaaaaatactcccttagctcaaataaatcccagaaaaatctaggaattatagaattaagcaaagtatttaatgaaattttatctggccccattttatgttggaatttattaattaaaattagatcttctcttctaggctttttaaaataaattctaataattccatttaaacaacaatttatatatttaggatttttagggtgtgacatctcactacgcatatcaagtgcttaagatgccggaccgaagggaacaatcaccattcaggggaacacaaagctggcggtgcaatgcaacaagcggagcctcgacatggtcgagcaaacgcccagcccacccgccacgactgagccacccaagaaagtgaccaagacaaacaagacgccgaaaccagacggtgccatcaagattgttccactctccagtgccaaccccgacaagaccgtcaagatcggggcgacactaaacgagaaataggaactcgcgctcattaccttcctccgcgacaatgccgacgtgttcgcttggcagccgtccgacatgccgggggtccccagggaggtgattgagcacaaactcatggtgcgacccgatgctaagccagtaaaacaaagactgcggagatttgcaccagaccgaaaacaagccatacgagaagagctcgacaaacttctcaaagctggcttcatcagagaagtacttcatccaaagtggctagctaatccagtcatggtgcggaagggcaacggaaaatggagaatgtgtgtcaacttcaccgacctcaacaaggcgtgccccaaggatcactttccactccctcgaatagaccaactggtggattcaacagccggttgtgagctattaagcttcctcgacgcttactctggctaccaccaaatcagcatagcaaaagaggacgaagagaagacagcattcatcacgccgtttggggtattttgctatgttaagatgccgttcggactgataacagctgggaatactttccagtgcacggtccagggcgtacttagcaaccagcttggcaacaatgtcgaggcttacgtcgacgacatcgttgtcaaaaccaagacaggcgactcattgattgacgatctgcgggaaacgttcgacaacctccaacgatatcgcctcatgctcaatcctgagaagtgcacgttcggagtaccatcgggcaagctgctcagattccttgtctctggcagaggaatagaagcaaaccccgagaagatcaaggcaatcgagaacatgaagtcgcctacaagactcaaggaggtacaaaagctaaccggatgcatggcagcactaagcagattcgtcgctaggatgggagaacgaggacaacctttcttcgctctgttgaagaaacaagacaaatttgtatggacacaggaagccgaggaggcattcattgcactcaagcgctacctatctaacccccctgtacttgttgctccccaacctaatgaagaattattcctctatattgctgccacgccatattccgttagcactgtcattgttgtcgagagagagaaagtacagcgaccagcttattacgttagcgaagctctccacgacgcaaagacaagatacccacagatccaaaagctgctttacgcagtcatcatgacatcaaggaagctacgccactactttcaagcccatagagtcacagttgtctcctctttccctcttggcgaagttgtgagaaacaaagacattgtcggccgcattgcgaaatgggtagtcgagctgagccagtttgatgtccactttgtgccacgaacagccatcaagtcctaggtactcgctgacttcgttgccgattggactatgccagataacaaatcagacaaccaaggcgacaatgaaacatggacaatgtcgttcgatggcgcactcaacagccaaggagcaggggcaggatttatcttgacgtctccctccggagatcaattcaagcacgcaatccacctcaacttcagggcgaccaataacactgcagaatacgaaggactactcgccgggatacgagctgcagctacacttgaggccaagggactaatcgtcaaaggggactccgagctagtcgcgaaccaggagcacaaagattataaatgctctaactccgagttatccaagtatctcgcagaagtcaggaagctagagaaaaggttcgatgggatcaaggtccgacacgtctaccgcaaggacaacgtcgagccagacgacctagcacgacgtgcgtccagatgagaatcgctcgagcccggcacttttctcgacatcctgacgaagccatcggtgaaagaggttagcggcgaagtcagcccgaacacccccgacattatctcggaggtcaccgaggcagaacgcgccgttgccgacatcgaaacgacagacgactggcgcattccactaatcaaattcatcagcaacgaggagttgcccgaggacgatacagaggccgagaaaataacccgtaaatcaaagatctactgtatggtcggcaacaatctatacaagaaagcgccaaacggggtacttctcaaatgcgtatcgaccgatgacggcagacaccttcttcttgacatacatgaaggcatatgtgggtcacacgccgctggtcggacattggtcggcaaagctttttgacaagggtttttttggccaaccggccttaaagatgcatgcgacatggtccagcgatgtgaagcctgtcaattccacagtaaacacacaaagctacccgcgcaggcgctccagactatccctctgacttggccattcttgtgctgggggctagatttacttgggccattcccacaaggacaaggcggctacagattcctattcgtggcgatcgacaaattcaccaaatggatcgaagcagtacccacgggggaaatcaaggccgacaatgccatcaaattcatcaaagggatattttgcacgtacggactaccacaccgcatcataactgataacggctcccagttcatcagcgccgatttctagaactactgcatcgggctgggggtcaaaatatgcttcgcctcggtctctcaccctcaaagcaacggacaagtcgagagggcaaacggcatagtactacaagggatgaaaacccgcgtctacgacaggctcatgtcacacgacaaaaagtgggttgaagaactcccatcagtactatgggccgtacgcaccacaccgacaacgtctaataaggaaacacccttcttcttcgtgtacggctctgaggccatgctcccaggcgagctacaacatcagagtacatgagtacagaagtactccaacgagaaccaggatgagcagcgagatatcgatgtaaatcttctcgaggagcatcgggaacgagttgccgtccgagcaaccaactatcaacagaccctccgccgttatcacgagaagcgcatccgtgcacgcatactttcgatcggcgactatgtcctccgacgagttcaaagccaagcagggcgaaacaaactctcacctaaatgggaaggaccttacacgatcacacaagtcttgcggccaggcgcattcaaaatcacagacggcaacagtcgcgaattagcaaattcttggaacattgaccaactacgtaaattctatgtatgagtcaataccatccatacctataagcacccttacagtatcaataaagcctatttctaggcccatatcacaatcaacgtgtttcgcccgatgatccctcactctgatgacacctagcgttgcaacctgtccttatgtccctttacaccgtctcgacaaggcctccgaggaacctaagggatcttcggctagggacgcccagagccgataaggccttgtcagatcctgtagagacgaaagaccatgtaagatctggtcatgtaagagttctcgccgtgcgtattaaccaagccgtgaaatcggaaatcaactttccaacttcatggctgggggctaggatcagagcttattcaaccaaggcaggtcaaaggtccaagagccttatcctccgagaaaattcctccgatgacaaggctgggggctagggagagtgtacgactcaaacggctgactaaagtcgttaactgagaacgcactcttacacatgacatccagagtaagagacatttgtcaaagatagatttctttattcacaaaatactccttacagttttttcacaaatctttcgctacattacatcttttcctaagatatttgtcacagggtacgagtactaccaagaaggccaacgccagtccatagactagaagatcttctcggccaacgacgacattgactttgccagatggtctatctccgccggagtcctccgagaacgagcaaaaccctcacgaagatattcaaggtccaggcgcgggtgatgatctcgtaggcaagccaacacgtgccccccggcatatcggctcgatcgacgacactcctgcttcaaggcctcgtcgatacgtttgccgattccatcgagttgggcacaggccccattaagccacgagatgtacccggccgccaactcctcgggatctccgcggactactcgaagctccctgcatactctggccatggatgtgcagcaactcttcaagtacgagttaaaccacacctcacgacctcggagcgtttccacagcctgctctttcttcacggccagcatggttttctcgagctccgccacttcaaacttcgtcttccagtattggatatgacgatcttggctagcaagggcaccctcgagatctgctaaacgtgataaccactaagtcaagctatacatctctgtcgggaacatggctgacctagtcaggagggcattaaggggtgaagggactactaacctgaggaagtcgtcgccatccttccctctatatcaaggggttgatccacatggtcaggcgagacgtgtggttcaaactcgagtaccggaattactgccagtgactcgggctgcccgcgctgctggacatcctcgtcatcagtatctctacagaggacaaaagttcccgaggtcagcataccaaagtaagccgggatagtaatcgcacgcacgaaggcggtcagagttcgagttttacacattaaagggggagaacagactcccccagatcacctccttacgcatgtcgctggccgccccctggtccaagatctcgcgcagatcaagttcaggatgtgacagccttacacacgcgaggacatgacacgccccggtgtagatcccgtttgacgtctcctccgcaatcctggccgcatgcttggaggggatctcccccatcgccgtcgccagctccgcgagagaggaggttagcgaaaactcatcgggattcaccgggatcgtggacgtgacgccgcattccccagcgagctggtgaaggccagtgtaggtgaccctcaacgagccccggatctcggataggttgttcccgagttctgacattcggtcctcgagccccttccgttgtcgctcgttgccagccgccaactccctcatcttcataagctcttcacgggcttcagccaactcgcgcaccagtctgtcagcacgcgcgttcgccatcgccgcttccgacctcgcctccgcaagcaccagcttcgaggaggcgccctatctcgacttggagctcctcccaggagaggacagcagttggcagatcacgacctgccgcgcggtcgctgactggggcactgggcgtcgcctcccggctcccggctgcgggcacgacatccgtcgaggccacgacaggcgacgcactggaagcttctccggacttggctcgcgcagcctttgcccgcgcctccctacaggacgaccacgagtcagacaacaatcgaataagaagcgcggggattcaagaattcatctacttacttcttgccgatcgtcacaatgcgttgttgtcgtggacgtgggggagacgcgtccgaggcctgaaagataatcaacgcaaagtaaggaaaaatccttcatgctgcatgatttaacgacaaaataaattaccgagggggtcgacgccttgcgacgatgtctgcttacagacgagaatttcctcggctttgtcggaatattgccaccgctagtggtggcagcatcagacacctccttgacgaccttcacttttagagatgacgccacctgatggtccgcgagcggtccgatgatatcagtcaaaggaagggcctacgctcaatcaagtcaaaaagtgatttcgaaaggagaatgcgggatgcttatcgaatatacttacgttgatggcttcatcacgttccgccgcccccttttcacaaaggggcacagggatgtcactcgccgtggtcgggccactgatcatcacttggccgactcggcgctccacggtttcgccgctcagacctgttaatccagaaccaaccttcgataagtcaagaggaatgcgaacacaagcatgtcaagataaatgcgagaaagataccccgaggagaaacccgggtcgcgtcctctggcccggaatagttataagctggatgggcccgagcctgaagcggctggatccgcctaccaacgaagtatgcaacgacttcatatctcgacaaaccccgtgctcggaaatcgtcgatgatgtcgataaacgactgaagagagggggtcaaggggggctttgcggtccaagacggaatcttgtccggttgatcttcaggaaccacgaagacagggttcgagtccttgatctcaagataaaaccacctattccgccacttgctgcgagatgaagggcactggaagggaatgtaacgcgacttcaggccatcccgaagtcggaacccgacgcaaccagataccctgttggattccatccaacgcagttcgtagtaaaagcaaaaaagatcaagaaaaggctctaccccgatgtaggcctcgcaaagatgcacaaagatgctaaggaaggcgatggaattggggttcaaatggagaagagaaagaccattgaaattcaaaaccaggagaagaaattcggaaggtggagggagaaaaccgcagagaacataatcttcgatcgcaaccatgcgacccaagatgggctgaggattagtacatcctgcttccctctccatggttccacgaccaggaagagcgccatcctcctggggtttcttcaacgttgcactagtggaagccgattttccgaggtccattgctgatcgaaggtcgccggaaaacgagcctaggttgatgaactagggtttcttgcggcggcgaagaaggcaaagagtgcttgcaggtggtgtgtgtttaacaggtttggcggacttcaaaatggactcccaaaattccctttaaataggcgcactactgacggtgcgaattccagggaacagagagagatgcccgctgaaaatttctggtcccgttacgcgcggcggttttctggacttcagtttaaaattcgctcgtgaccgttgggcttcaaatggcgtgctcgactacggtctatctccgcggtcctcacaccgggaatgacaatagtctcgacacccgaagtcgcaaatggttgcacgagttcattttaagcagaagtcgggggctactgtcagggttacgggttaggcataccctttacccttcgatatacgttacatatcgatatggcatacccacgcgcatgcggatatttcctgtatattctaagaaaacctttcacggaatctacagacgggaagaatcctactcgggcagaactgggtcgttggcgtatcgtatagggtctgatacctccgagttctacgtgaagacctctagatctgcgatataaaagggaccccccgggagggtttaggacatcaaatctcagagccaacataacctacacagcctacgaagccggagcctacgaggagccaagtcgtcgagggctagtcgaaacaactcgactacaatctcgccggatccgacaagttcccttgttccctttgtaacctgtgttttctaccatataataccacatcaactggattagggttatttcctatcaaggggcctgaactagtataattcttgtcttttgtttgcttgatgtcgtactatgtagatccttgtaccaacgtaccccaataccctctatatccggtctacgggtatcacccgtcgacacatgtgagctcataaaatagcgattaaatttatcatgtttgtaggtggatatatatcataatatgggacagacggatggatacaactcttcccatatcctaacccatatttttttgcgaatttggatccgaactcggatagtaccagatatatcccattctctctcgcatattcttcctgggctgcgagcctcaagtcggtgtcgaaacattgcgaaccactgggtccagtaccagggggtaccgccccgggtggaccattcggtcaggatgatccgagcggtcgaacttgattgttgtctctgaccaccgaaggtattgaggcgtgccgggctggacgtcgttgatctccctgtcagtcagcttttgcttcctttttgactcataagcttgcggcccaccaaagatataattgagctctttgcgagaatcttgaaaaccagtcggaccgtcatcttcatcatccttcatctttgaggtgctctgatctccatctgtagccttctttgtttgctttgcgtattgctccgcaaactgcttgtagatgaaactatctttggctgcatggttagagtttggatgatgcgagcattaggcgttcatgatcttgtcgaaggtgttgatgcacgagcgctgtcaggaagatggcgatgcaagtgctacaaggtcttcaggcttacgcttgtgatccttatggttgttgcttccactccccccggtgactgccgtatctttcttggacttccaattgctacccggctgcttggaggcggtgacggcatcatcagctttggcatattcgttggctttttcgaacatttgcttgaccgtcctgggaggcttgcgtccaaattttctgactaagagttcgtgacggacacccttagtgaaagcggctatgatgacgttgtcggtgatgtcggagatcttgttacgttgcttagaaaaatgttggatataatcccaaagggattcactaggcttctggatcacattgtagaggtcgaagtgggtgtcgggacgtttgaaagtgccttgaaaattggcaatgaagtgctcacgaagctctgcccaagatccaattgtgccacggggtaacccatgaagctaggaccgagcagaatctgctagagctaccaacaagtagtttgccatagccttgttgtctcctccttctgcgcggattgcgaggccatagacggtgagccaagactcaagatttgttttgtcgtcatacttctcgattccagtcggcttgaagccagccggccaatccactcgacgcaggtcacttgtaaaagctgcaactccatcttcatcgtcaccgtagcggtctggtgatcggtgtgggacataacctctctctacacggcgtcgattgagtgtgtcgcgaagattgatgggctgcctgcgacatggagagcgaggctatttagcacggtgcactctgtgtctgtcggcaggcgagtgaacagaacgttcaacatgatctctgctcctgcgattagatcctgacgcggcaacgctgaggcttggttggtggtaatcttgagattgaagaggcggaacccgactgctagtcggcgtgcggacacttgctgagttaactgggaccgaggcggtgatcatgatcttcgtttggttaatgatgttgaggacgtggttgggcgcatcttcctgaagcaaagtatccagaagagtgattgtcgtgactgcgttctgctgtggggtgcgaaaaaccgtcgtctcctcaacgtcttactgtccaatgagttcacgtgctcatcacccggcttccagggtgcactgtcgttgatcctcagcctcctttgcggcccgctcgtgttcccgctgcaactggtctcgctcttgcgcttgtcgttcctccttcagtcggcgacgctcggcttcttgtcgtgtgcgctgttcttctgcttcacggagctgacgctgttctgcagtctcgttatcggccatgaaaacgccgaaaaagagaggcgtgtagttgtcttcataggcttcatcaaaatcgtcgaaatcgtcgaggttgctgaagtcgtagttgtagctgaagtcgtcatagtcgaggatctccattggccgtgagtcgacaccaggagagctgaggtagccgtccaattcttctattgaaaccgtcccgaggggccaacttccctgaagctagattggatcagggccgatgccagatcccgtctagacctacgggaagaagatgcccttgtggtgaaaacagcagccaaatcatcaggaagcttcattaggattgatggataggtcgcatcgccttgatctggtcgtgtcgaagtagatgagatctcatccgagtggcttgaggccgactcggacaagataatcttggggtagatctcggccgagttcgggagaccgaatggggcggagaccgcatctctttccgactggttcgaatctgagtcgaagagagagatcttgccaaagttatcggtgatgaactcgaggctgctgaatcggaacgcctgccctggagggaagacgaagtcgtcgattccggaaacgaatcccatcgcactaatcggcgaaaagcttgacgcaacccctacctggcgcaccaattgtcgaaacaagatttcggcaatacaaaaagggggtggctatcaagcaggaaaagtggatgggtttggagacaaggaattttatacaggttcaggccttctcaatgtgaagtaataccctactcctgtccggggattgattcgccgagtgtgttatagatagtatgatctgggagaaaagttatgccccaagaggcacccggacccctccttatatagtgggaggaatccgtattacaaggtacagcccatattcctaacggaataggcaaataaagataaaatacaatcgtaaccgactagaacctcatgtatttccttgatacacaagtaaggaatttaacccgagtcccttaaaggtattatatctgtatatggtacccctatacctagtcggatatacatgttgtgtgggtatgggtatccataatctccacagtcgagcacgtgcttgggaaatatccatctcactttcacccctagtgctaacgaaaaatttgaagttgaagaaaaacggggccttggtcatagaaaaatttagcccgacggttgtccaagatgatgtctctaacataaacactgaagtataaagtgggacatggctttgggccaagtgcacttcttgtgctagctgagccaacctagtcaagataaaagaagggaccgagagggtatacatgtgaaaggaataagtctattttacctccctcatctcttgctcgtaattgaaacgcttccttcaaacatcgatttgtacccatttcgaaaataagggagttgtagttgagggatgtgattgtcacatcctgatttttgtttcaggatttataaattatttaataaattattattagaatttatattaaatgttcattaatttacaagtgaagttaaatgtgggaaataaaatttcctaaatataaagcatggatggatttaattttgattaaattctccatgattaattacactctctgaaattttctcagatgtttcggagctcaattcttaatttttaatcatacaaagagaatttcagtaattacccacatattaaattaatcattaaatggtctgtttttaatattgttaaatactttgggtgtccaagtatgttcaagatttttcttggaattatttgagcataggaagtatttttaacaattcaaagatcatttcattgattaatttaattggaaaagtaataataatcctcttcctagtcttgggccctttccagcccatctccctcttttgtctgcacggccgtgcagcccaagtcggcccagccgagcttcccccttctctttctttctttgctttgttttcagccagcccaagacgaaaagtctatttgcctccctcgacactgtttatcttctacctctagcagccgaactgagaccgatttggctcggtttttctcctccaaatctgacctttccccttgtgtttttctaaaattagttgaggggaaatattcctcttatcctcctctatctttatccccaaaaatcggagctaatcgttgagtatcttatccgaatcgaactcgttttcgagtttatctccaaaaccgagtttttgatttcccggatcgatttcttgcgggaggagtccgatctcttcaatccaaggctataaataggaccccctagtcctcctctttcgtttgccccctctcccgtggtctcccgtgcctcatagcgccgccgccacgtgctccaccccgccgtcgtcgccggccgagctccatccgcgtcgcgccgccgcctccgtcgtcgtcgccggccgtcgtcgttcgtcgtttggttcgagggtgagtaccattgggttcgtctcgtcgtcctctacgtgttcttgtcctccaaagtcgcagccgaccatccaatctccggcgaggtcgccatcttggtccggccattgatgaggtcatcatcatgacgtcatcatcgttttttttctttttcctgtttttctaatagattaaatcttcggaaattcataactaaatcatcgtaactcggttttgagtggttcaagttgctaaattcatctaaaatcatgatctacatgtttgtttactttatatgtactgtttatttggtttttattagtctttttcttggttttgcgtgttagcttgtcgtttccgtcgttgcgaaggttcgtgagtgcgtcaggagtgttcagaagattaattgaagaccgattattgcaaggcaagtcacacagatcctaaacacaatcctttgagcatgttgatcctatatttaaattctctatttatttcaactgtgcatttattttcgaatgtcaccgggtggtgtgaacttattcctttgttatggccaatttgcattgattattttattcctggataccttgggttattataacttgactagttgggctttatatattggttcagctagatattagttatgattgcttagccatgcttagaaacattatcacataattgggataactaatgttacactatcacttatgattatatttaatggtagctcacgatggttaatcgtgttatgataattaattgataactaaaacttgacaatggtgggttgtgagcacatggttttgaaggtcgtgctcatgacaattaaggaccggttcacgagctactgttgtgaaacattaaccgtaccaaccacaagccagcatgggcaacggctttaccttctgtatagcatgattcattgcggggcaccagactgagaagcggcgagaagtccgtgggggtcgctggggagtccatgcctctggttatatttatagagggggtgattatgatccaggaatggtgcactgtggtgagtagtgttgtgcaaagggtattgtcacagcctctattcgggtactttccagtatcgcgacgcatggtagacatgatgatgaggctgtgtcttgtgggtacagtggtacacctctggccagagtaaaactattcgaatagccgtgcccgcggtcatgggcgggttgagcaatgtttttcgtgattagtctcacacctctcacaataattatggatgttatacctggtaataatttgcttagctcctggtttggagttagatctgtacagccgggtatggttgttcaggatggttgggcctgtgcagcatgggtgtgctgttcagtgttgattaaaatttttaattaattactctactgttttactactcttaactctttgctaaatgctgcttttgcaaatgagcctatattatgtcatcctttggtatccttgtgcacttgcatatttgctgtgtggcttgttgagtatgtcatatgctcattcttgcaataatcaatcaacctcagttgaagaaaaaggatccagaaggagaagacgtttggcttataccccagttgagctgcctgtgggagtggagccggagcttcgctagaccgtaattccgctgcagttttcttttcttttgaaagtatgtaacactattattgatgattctgtatattaaattgtcagtttgtgtacctcggctgattcctggacgaggattttatgcataaataagttcggaaattactagtgaatttctgggcgtgacagtgatttaatcagaagcaagaaatgagagagaaaatatagacttattcccacatgtgatgtggaagaagagagagtgaaatatgggctgggttgctccaaagttcagcccaacattgatgtgttttttttggaataggttcacatcaggtccctaaaccaagttgtcgccgagtctaaaatttgtcctaaaccgcaataccaaatatgacacatccctcagctttcaaaaccagtgcaaataaggtgccaaggcggtttgggtggtggtttcagctgacatggcacctatgtggcattgatgtggcacttaagtaaaaaaatgtgggacccgcatgtaagtgactgttcggttaaaataaataaaatattacagtgggaccctgtcacaccctgaagttctcctcccaagcctaaaatttaatttataaatgaccctaagaaaatgccggtgtacatcaagagaaaaccctaagaaagtaatacaaataataatcgaatctggcatgtggaatttttcttgagttttacatgtcgaaattcactaacaggatttttagtggaattttcagagccctagaaataattttaaccaattaaaattgagcaagcaatattttaattccagggaaaatccttttcttcctttttctttttctttttccctcttttcttttcgagtgggccgccggcccattctccttcctcctctccactccgctgggccggccgaaggccaaggcccagctaggcgggcagcctccctcctccaacgggatgccgacaggtggcgcccacctgtcggcttcgtctcctacttcgcgcccgcacagcagtaccgcaacctgctgtcgcgccaaagccaccccctcctacgggccacgtcggtcacgcccgagcatgcgcggcacctcccgcgcccactcccctctctctaccgacagcgccagcgaccaagatgaccggaattcgatttttagaatcccgcctctctctcttctctcccactcccccacgttggccggcggaatctcgcccctaccggccacgtccgagccgagccgggtcgccgccgcccgtccgatcagccccgggggtgatctgggccgttggtcccgtggaccggcggtggaccacccgcgtggtcccggtccacggtggaccgcccccccttgagccgctgccgagtggggcccgcgtgccggcgccccttttccctctctcccgagccgctgaccggtggaccccgcatgtcggcgccgcactcccttgatgacgtcagccctgggaattattgcgcaataaattatttaaggtctttttgttatagtaataaacacagtgaatcttctaaaattcataactaattcatccgagctccgtttaagcccattcaagtctcagtaaatcaagaaaaatgcgtagaatccattaaaaatggttttttttctgtttcagtagttttgtagcctgtttgtattgtttgctttgtatgtcgcctagattccggttcttccgacgttccggtgtacttcgagatagtcgccgaggttcctccagctgcaaagcgttttataatgttattatgggatgtttacctattgttacagccatgctattttggtaccttgctcctttgttagcttgggttataacatgaatagacgttggactaggagttgcttagccatgcttagttcaactaggatacaatagggaaaatcttattaatgtttagactgttggttctaatggtattattggattagtgccaccgctttggtgttggttaattaaaataaatcacatggtgggctgtgggtgcatggttttgctggtcgcacccatggcagttaaggaccggttcgcgggatgccctggaagaacttatcgtacttaccacaagccagcgtgggcaacggctgggcttgtagtgtagcttttctctagctgacgcatccaggcaagggtgggcgtgatggagtttggatgggccctgcgacggcctatgcggcttccggattcacctaggcacgagaggggactgcccgtcgcccgctggggacggtggtgaaacctgaggtgtggtgtgcttggctagagggggttatgcgaagggttctgtcacggcctctttccggtatgtcgtggtggcatgtcggcgcacggaaacgtgtcgtggggctgtgtcttgtgggtacagctgtacacctctgatcagagtaaaactattcgaatagccgtgcccgcagttatgggcggtcaaccagattcaccgtgattagtctcaccctagtttagtctaatgaaattggatagtataggtggatggttgggcctgttgcaacgtgggatagcgttggacagcggatgatcaatattaattaattattgcaaatgtttaattctttcaacttctgtttataaatgctcgctttatgcaaatgaaccactctagctctcctttgataattccctgcatcatacccctattccggtatgacttgctgagtacagtggatagtactcagtcttgctctattttttccccaaccccagagtgcgagtatgtgtccgatggcgggttctccgaggagtaggcttcgtccgtgccgtcgagggtgcctctggagtggtattcccgctgcagttcaagtccaggcttagccccagttatcttttgtttttccgctgcatttatgtaagacttttatgatgtttgtaagacatggatctgaatgtcaacattgtcgtttgtgtacccggccggtcctagacggggattttaatgcacattctgcttggaattctattcaggaatttctaggcgtgacaagttggtatcagagccgaccttgaccgtaggacaagccaaatggaaaaacctaagagccctctgaatccttttcattgcatatgttctttgcaattggatttgttccgggaaaattgggatctgttcttgtggttcaagggaaaaatcttggtcgcttgtttaagtgagatttggcaaaacaagtcagtctagggttttagtaaaattatttggggtttattcgtcagtcagttgggatttgatgggtgaaatgcattaggtcctagctcaggaatatgggttgcaaggtatttgtacctttattgttattattagtatgtatctaatttccccattattttatcgttatgtaagtctgtcttatttattcgctctcatgcaaaattatctatgcataaaatttcgctcttattcgattctcttatttgagtcctttattgctttatttaaatttggatttaagcatgcattgatcctactcctttgtcttctctagatggccggccacccacccaaccaccgcggagaaggcatgatcgactttgtggcagagttagcacgtatgacgctggtggtgggctaccccaacgcgccagagtacacgactgttccaccactcagcggcgagcttcctcaccgtgtccgcctagaggtccatggctacgtcggtacctgcctagctaatatggtggttgaggcatccgaaggcacagcagatcacgcctgtcaggaggcagcatacctgatgatggccagactacgggagcgccacaactacatcttccacgacacggcataccgatttcaccctcgtcgagccagcggtgatgatgtcagtactttccgtccgacagccggcgagaatgacaccacctttggtcacatgtgcactgtgatgagggggatggacaggatgcactcggacctgcacaaggcgtccaaggccttgaatgatgggaagctcatgaggatcgtcgctctgaaggacgagatagcgcgcctgaagagggagaatgctctgttaaagggtcttcacgcgccaggaggagtccggatccgcactacaccccgcaagtcgacaacggcacccatgcgcatccagcttgcgcccaggaa

SEQ ID NO: 11002 - DNA, 6569 bp, Oryza sativa
cgcccgcagctccagcagttcctgcagctccagcaccagctccagctcccgttcccgtgtcagctcctgcatccgctctctccttcgcgcctacatcagccgtcagggtccctgccagtggcaatggaggttggttgccagctactcccagtggcagtcgcgacctcagcagcagcagctccagtggctcagagccgggcagcggcgagacttatccgccaggctccaggagtcgctcagagggacctggtgacgagcaggaggacgccttcgactccaccgaccgcaggagccgttccgagcattaggctcgttttccattagtttatcgactgtctagcatttatttgttagtttgtgtgtttaggttgcttgcttgtgggtcagtcgacggtcgatatcatgtgcctatgatatggttgtcttaataaggatttttgcttgctttttaagtgttttaattcagatcagaacaattgcagtttaaattcctatataataaagcttagttcttgagcatctgtttttcttcttttccccgtctgctcttcctccagatggtctacaccaggaatggtagccgtacaacaggcgagggcaccaacgacgaagagcgcactgatggtgtgcatcccaacagcgattccggcaatggtccgccaccacttcccgagaatccgacgctagcccaagtgatggcacatcagactcagatgatggcagccatgatgcagcagatgcagcaacagcaccagcagatgcaccagaggatgctgcagcacgccgaacagcagcaccagcagtttggtccccctccccctcagtccaagttgccagagtttctacgtgtcaggccacccactttctccagcaccaccaaccccatggaggcgaatgactggctccatgccatagagaagaagctgaatctcctgcagtgcaatgatcaggagaaggttgctttcgccacacaccagcttcaaggtcctgcgtcagcttggtgggacaatcacatggccacccgcccgccaggcactgaagtcacttgggcggagttctgtcgtagcttcaggaaggcgcaggtgccagacggggtcgtggcacaaaagaagaggaaattccgggcactccatcagggaaacaggacagtgaccgagtacctccatgagttcaatcgcctcgcgcgatatgcatcggaggatgtccgcactgacgccgagaagcaggaaaagttcatggcaggtctggatgacgagctgaccaaccaactgatatctggggactacgcggattttgaaaggctggtggacaaggcaatctgtcaggaggatcagcgaaataaaatggacaggaagagaaaggcggcacagttccggtccaaccaaggaaaccatcagcgaccgcgcttcgctcccgggcagcagggtggacctaccaccatgatcgtccgccagtaccgcccgttcaactctagcaacttccaccagggcgccagtggcagtcagaaccaccatggaggtcagcccaaccgcggtgcagctccacgcccaccagtggcaccggcacagtcaggcccgtccgcgcaagccaagaaggagactggaacaaaaccagggtcttgcttcaactgtggcgagcttggccactttgctgacaaatgcccgaagcccaggcgtgccgggccaaggtttgtccaggctcgtgtcaaccacgcgtctgcagaggaggcgcaagcagaaccaaaggtcgtactgggtacatttcctgttaactcaatccctgcaatagtactttttgattccggtgcaacgcattctttcatttcaaagaaatttgtggggatgcatgggttaaggaaagaagagcttaatacaccaatgagggttcataccccgggaaatagttcaacctcggtcagttttagcccttcagtgctaatagaaatccaaagatcaccatttctagccaacctcattcttcctgaatccaaagacctagatgtcattcttgggatggattggctgaccaagatcaagggagtcattgattgtgcgaatcgcacagtcaccttgaccaacgagaagggagaaaccgtagtgtacaaatcactagtctcaccaaagcaaggggtctccttgaatcagattgaggcggaaatcccagtggtcacgaaggagaagaatccgaggaaattggaagagattcccatagtttgcgagtacccagaagtctttcctgaagacctcactaccatgccacccaagcgagagattgaattccgaattgatttggcaccgggaaccgcgccaatttacaagagaccgtacaggatggcggccaacgaactagcagaggtcaagaagcaggttgatgagcagctgcagaaagggtacattcgaccaagtacttcaccttggggtgctccggtcatttttgtggagaaaaaggataagacgaagaggatgtgcgttgattatcgcgcactcaatgaggtcacaatcaagaacaaatatcctttgccatgaatcgatgatttgtttgatcaactgaaaggagctaaagtgttttctaagatagacctgcgatcaggctaccactagttgagaattcgggaagaggatattccaaagacggccttcatgaatccatcgaacggttatgtctttcggacttaccaacgtacccgcattcttcatgaatctgatgaacaaagtgttcatggaatttctggacaagtttgttgtcgttttcatcgacgacatacttatctattcaaagtctgaagaagaacatgagcagcatctccgtctggtactcgagaagttgaaggagcaccagctatacgccaagttcagcaagtgtgacttctggttgacggaagtcaaacttctgggccatgtcattacagctcagggtgtggcagttgatccatcaaacgtggagttagttaccaaatggaccccactgaagaccgtgtcgcagattcgaagttttcttggactcgcaggttattaccgccgattcatcgaaaacttctccaggatcgcccgacccatgactcagttgcttaagaaagatgagaagtttaaatggacagttgagtgcgacaagagttttgaggagctcaaaaagaaattagtatccgcaccagttttgattctgcctgaccagatgaaagacttccaagtctattgcgatgcatcccgccacggacttggatgtgtcctaatgcaagagggcagagtggttgcgtatgctcgcggcagttgcgtccacacgaagggaattatccaactcatgacctggaattggcagcagtggttcatgctttgaagatctggaggcactatctgattggcaaccgctgtgaagtatatacggatcacaagagtctgaaatacatattcacccaaccggacctaaatctccgacaacgaagatggttggaattaatcaaagactatgatatgagcattcactaccacccggggaaagccaatatggtggcagacacattaagcaggaagagttactgcactgccctatgcatcgagggcatgtgtgaggaattgcggcaggagtttgagcatctcaacgtgggaattgttgaacacgggttcgtagccactctggatgcacggcctacgctcgtggatcaagtcagagcagctcaagtaaatgatcctgaaatagcagagctgaaaaagaacatgagagtcggaaaagcccgggatttccatgaagatgaacacggcacaatctgattgggagaaagattgtgtgtacctgacggcaaggaactgaaggatctgatactcaccgaggctcatcagacccagtactccattcatccaggcagcaccaaaatgtatcaagacctcaaagaaaagttttggtgggtcagcatgaggagagaaatagctgaattcgtcgcactctgcgatgtttgccaacgagtgaaggcagagcaccaaagactagcaggtttactccaacctcttcaaatcccggaatggaaatgggaggagattggaatggactttataacaggactgccccggacatcatctggtcacgattcaatctgggtagtcgtggatcgactgactaaggtttctcacttcataccagtacataccacgtatacgggcaaaaggttggtggagctctacctctcgagaatcatgtgtctacatggagtacccaaaaagattgtaactgatcgagggagtcagttcacctcaaaattctggcagaagctgcaggaagaattggggacccgtttaaatttcagcacggcctatcacccgcaaactgatggtcagaccaagcgagtcaatcaaatcttggaagatatgttgagagctagcgctcttgattttggtggagcttgggacaaaagcttgccatatgcggaattctcgtacaacaacagctaccaggctagtctacagatggcaccgtttaaagctttatacgaccggaagtgccgcacacctctcttctgggatcagataggcgagcatcaactgttcgggacagaggtattagcggaagcagaagagaaagtcagaaccatcagggaaaggttgaggattgcccagtctcgacagaagagctacgcggataaccgccgaagggagctcacttttgaagcaggggattacgtgtatcttcgtgtcactccgctccggcgagtacaccgttttcagacgaaaggcaagttggcaccacgcttcgtgggaccatacaaaatcttggaacgaaggggggaagttgcttatcagctagaactttcatccaatatgatcggcatccatgacgtgttccacgtgtcccaattaaagaagtgcttaagagtacccaaagaacaagctgattcggagcatattgatatccaggaggacctgacatatgtggagaagccggttcatatacttgataccagcaaaagaagaaccagaaacaaggtcaccaggttttgccgagttcagtggagtcaccattcagaggaggaagcaacctgggaaagggaagatgagttgaaagctgcccatccgcacctcttcaccagctcctccgaatctcggggccgagattccgtttaagggggtaggttcgtcacaccctgaagttctcctcccaagcctaaaatttaatttataaatgaccctaagaaaatgccggtgcaaatcaagagaaaaccctaagaaagtaatacaaataataatcgaatctggcatgtggaatttttcttgagttctacatgtcgaaattcactaacaggatttttagtggaattttcagagccctagaaataattttaaccaattaaaattgagcaagcaatattttaattccagggaaaatccttttcttcctttttctttttctttttcccccttttcttttcgagtgggccgccagcccattctccttcctcctctcccctccgctgggccggccgaaggccaaggcccagctaggccggccgcctccctcctcccacccgggacgccgacaggtgggccccacctgtcgggcccgtctcctacctcgcgcctgcgccgccgtaaccgcaaccgccgccgcgcccacgcctccgccttctccaggccacgtcggtcacgcccgcgcatgcgccgcacctcccgcacccactcccctctctctcccaccctcggccgcgcccgagatggccgggattcgattttcgaatcccgcctctctctctcctctcccactcccccacattggccggcggaatctcgcccctaccggccacgtccgagactcccctaccctatttaagctccgccgtcgccctctctctctttttccccatttcaccgaactccctcgtgctccccatcgctcccgcgccgtgcacccacccgccgccgcctttcctaccgctctggccgccgctagccgccgctaggctcgccgccgcaccgcgccgtcgccgccgtcgggttcgcaaggacgaactccaccccgtccgcccttcctccgtcgggattcgtcgccggaattcgcatcccctcgcgctccggtgagttctacctctaccgccgccttcggccatggatgccggccgccgtggttcatctccctctctctaatctctctctccttcttccttagggcaccccgaagcccgtccgccggttgccgtcgtcctcccgtggcttgccgtcgtcgttcgccgtcgtcttcctccgcgccggccaccctcggtgaggcgccctctcccctatactcccctccctttccttcctagccgccggttagcgccgccgcctctgccgctggttgccgtcgccggcaacgtgtgcccgcgcgtcgtcgccatcaccgtggccggtcggccggccttgagccgagccgagccaggtcgccgccgcccgtccgatcagccccgggagcgatctgggccgttggtcccgtggaccggcggtggaccacccgcgtggtccggtccacggtggccgcccccccttgagccgctgccgagtggggcccgcgtgccggcgccccttttccctctttcccgagcccctgaccgg

SEQ ID NO: 11003 - DNA, 1762 bp, Oryza sativa
tgagtacagtggatagtactcagtcttgctctattttttccccaaccccagagtgcgagtatgtgtccgatggcgggttctccgaggagtaggcttcgtccgtgccgtcgagggtgcctctggagtggtattcccgctgcagttcaagtccaggcttagccccagttatcttttgtttttccgctgcatttatgtaagacttttatgatgtttgtaagacatggatctgaatgtcaacattgtcatttgtgtacccggccggtcctggacggggattttaatgcacattctgcttggaattctattcaggaatttctgggcatgacagacccacttctcctcctcctgctccccaatctccccgtctcctcatcctccccaatctagtgaaatagcggagggatccatgcggcccgcgtcggggctagcgttgccgttgaaagtcctttcggacatcgagcactcatcgatccaacgaaggtcccctcgccgccatcctccgagcactcatcaatcctggggaaaactctgcatgggatccttgtttgcccatgcccaccacccacctcggtccgccgtagcaacgaatggggcaacccagctattgagtgaaaacacggcggtctagaagatctgcttaactccaatgcaggtcctactcgagtgtgtcaagggcaggctaggccggctaatttgatcatgcaataagcaataaagataaaagcatagttagtcagccgataggccgatagagtatagttggtgatctcagctgatgtagtagaccaaataggctatggactggatagattagtgaataacaaaccctaaacatgcctcaccgacgataatactgcctattaggtttgataaagaagcataaagacaatattatgaaaatagccaatggaacaatatttagagcagaatctatagataacgataaagtactagctaataatttagtacgaacttatataaacaaatcaatctatataaacatttgaaatcatgatcagttactaattcaaatagcccagccgatactgatctagcttgatataattatataggatgatctgtctaaataagtggcaaatatacataaaaccagtaaagaagcatgtatattagggtggcgatgcgctgaagttgtattggattctctctcgtattacagtggtatggggttcatatttatactccgagtacagacttagtccattatggacacgattcaaacctttctaaagataaatacaaacaagaccatagacggcggtctcttgccaaatctaacacaaaccgactgaaatatcctaattaatagatacaattgtattattcgagctctatctctaattgataatgacgggtatcccgatctagacccaaaccgagcccaagttataccatatcggctgtatcggccatcaacttcatcaaccttgatcaacccatattctatttttagccgatacgatatctagccaatgcgtagtctgactccaaatccaactcgattcaacaccaaatccgcttcgatcttcttccttcttctccgaatctaatgcaaaattccgttgttaacaccagccaccggcagcatgtgtcgctcgctcacgcctcctaggactcgtatcacagaagctggaagctgggagcttgggactcgtagttccccttcgctcggatccaatagcggttgggaattgcggcaacgagagcgacgggctcaactggccgggcccctaccacgtac

SEQ ID NO: 11004 - DNA, 15067 bp, Oryza sativa
ccacccccccccccccctaaaacccaccccgatccgcggccgctattaagccaaggccgcgcttccgccgctgcagccgatacgggagattggatcggaagcttctagaagtttccgtgggcgatggcgatccgcgcgaggtcctcctcctacgccgccgcggcggtcgcgctggcgctcgcgctggcgtccgtcgccgctgtcgccggcgaggtcttcttccaggagaagttcgaaggtgaatggctgacctgctcccgatcccgtctcgatcgatctgatccggttcgctgcgcgttgcgggtctcggctttggatgtagtggaggcgtcgcgtgggggtgtttggtggtgggtttgtttggatctctggggttttcgggatttctctggggtttatacgactaggaggcgtgctggttgttagggatctggagtgttaggcgctaaattgggtgctgatcgtggtttgtctcgccatttttggatggttgctgctgcggtatggtgggatctgattgatctgacgtgcatttgctcgtgggaatgggatctagttgcgtcgtctagtaagcgtgcgctgtgacgctgtgtcgatctgctttatgtgaattggttatggttttttgttagattgtgggaaaaaaaacgtggttgggttgattcggatcgaaaaatgttaggtttgtttggtatatgatccgcaggtttggatacttcattgtagggagtagttggtattctgctgtataatgtggtgaattttactttactttatactgcgaaatgggaaaatttagagcccagacttggtgatgttttgtgattgaaccttatgctttatgtatgttgtttaattctgatgtttcatatgtttaacctgaatatgaataaatgtttaagatctgcctatgctagtgctacatttgaagcatactagtgagaattggcagcttatgatggttgtcacctgtccgtgtccattagaatgtgatttgccacttatctgcatatgggatatggcattatgaaccaggtgcattttacacttcaggttttggcgtatagtttattagttctatacggtatgtctggagatccataattcgaatgtgttgatctgtattgctaatgtcgcctgttaaaattttgtctgtactactatttaaggaaatctccgggcagataatgaatttgcgtgatcatttgctggttctgcacatgatgcactgaacatggagttctgtgttatctaaatgtattctattgtgtgcacagatggatgggaaagtcggtgggtcaagtcagaatggaagaaggatgagaacatggctggtgaatggaaccacacatctgggaagtggaatggagatcctgaggacaaaggtaaattggaagatcaatacacctcattcagacactaacagatgatttttactgaattatttttcttgttgcaggtatccaaacctctgaggactacaggttctacgctatttcagcggagtacccagaattcagcaacaaggataaaaccctggtgctgcagttctctgtaaagcatgagcaaaagcttgactgtggtggtggatatgtcaagttgcttggtggtgatgttgaccagaagaaatttggtggggacacaccgtacaggtaatgattttcttctattgtagctctgattctcacttttctcaagattagtactagttatctaacttggtacttttgaatgcagcattatgtttggaccagacatctgtgggtacagcaccaagaaggtccatactatctttactaagaatgacaagaaccatttgatcaagaaggatgtcccctgcgagactgatcagctgtcccatgtgtacactttgatcatccatcctgatgctacatacaccatacttattgacaatgttgagaagcaatctggcagcatctacgagcactgggatattctgcctccgaagcaaatcaaggacccagaagctaagaaggtattttgcatattcctagctttcttggaatgccttgcttttgtgtctcttgaatgttaagatattaccttatgattacagccagaggactgggatgacaaggagtacattcctgaccctgaggacaagaagcctgaggtacttttcctttgttctgacttccgatatatcttgtaaaaatgactaacttcgtatcttgcatgaatgagaaacgggaaccttagctgacctgaattagaaaagttcacactatattgtactcttgtaatactatatgtcttaatagatttaaacgtgatgctagaaactaggaagaagctacatgtttttgttgtgtaatgacttgtggtatgctgtttccagggatacgatgatattcccaaggaaatccctgaccctgatgctaagaaggtacttaattgttataccattttatggtttatgttatatatgatgagcgtcattctaggttttaaaatttctttgatgtgatttctgtagcctgaggactgggatgatgaggaagatggtgagtggactgcaccaaccattcctaaccctgagtacaagggaccatggaagcaaaaggtgtgaatatctgtttactgatgcagatgcacttgaaacacttgcatatttctggtttctgacataaacatgtttctttttccagaaaatcaagaaccctaactaccaaggcaaatggaaggcaccgatgatcgacaacccaggtataattgcctttaattgaacaacttggtattacacatttttcagatgttgaactctgcattctgaactgtttcctttgtggttcacagacttcaaggatgatccatacatctatgcttttgacagcctgaagtacattggcattgagttgtggcaggttagttaagcaaagtacagtacgcctttagttctgatttattttgctgggtcaggaagacagacataaatagttatgaacttatcccttctctcttctatcaacaggtcaaatcaggtactctgtttgacaacttccttattactgacgaccctgagttggccaagacattcgcagaggagacatggggcaagcacaaggatgtatgtcgttcttcacctagcttttaccgtgtaatagtttcgttatcgacccaacattctctaacattagtgaatcttgtaggctgagaaggctgcttttgacgaggcagagaaaaagaaggaagaggaggtaaattccttcaccttacaatgttctaatatgaggatgatggatgtacaactgtccttgtcattgcatttcagtctgtgctccatttcactgtctttgctatacgttttgatttttgttggcatgaacaccagttccttgatgatcagtgggccattgcttccacttaattatactatggtgtgatcaaaaccttttaactcactggcatggttctgttatttgtagttttacgtattatcttctgattgttacaccagcatagctttaagcaactgaaatattctcctttgctgaactgccatcactcgtggttattgtggatgtaatttgcttaccattgattatcaatgtccttgttaacaggaagctgccaaggccggtgaggacgatgatgatttggatgtaagatttgcatccgttcttcctccatgttctatattttccttttgggcttgatctaaacctcaacaacatttatatttcacaggacgaggatgctgaggatgaggacaaggccgatgagaaggctgactctgatgcagaggatggcaaggattctgatgatgagaagcatgtatgtaacactcctgcgttttcttgataccttctggattctggtgatgcatttcctgttaacctccatgtgtcctgatcaccgtccttcctttccaggatgagctctaagatggtgaggatgaagaatggaggccgccttcgcgacgatgccaggatttgctagttctcccattgttatgaagttccctttttcgtgatcagaaacttgacaagaaagtactctgtagatgagcattgctgaggaactttaatttggtctttgtagctctctctgtagtgtcatttttcccaccacaagaaaaagaactgataacttattgaacaagagaaatcttttgcacaatcgctctgcatcctgctgtgattgtatatgtgcttgtgccatttcccattgttttgccatagggaaagcgtcttcagtcgttactcgttaggcacctggtcacctatggcatggagtcgaatcgatgagaaggccgagatagaaatgctgggcaagtttgcgttccaaacttccaatgccaagtctttctggttaatcaaagaaatccctcacattgcctgtttattgataccatcagaaatagtttgtttgcattccgctattgtggcaatattctcccacgaccgcaaataactaaatatgggttgatcaattgagcaagatccaaagcaatggtggaatatgcttgtccgaagagtggtattgctttttttgaaaaccaagggggttaaccacaaaattagccaaaacaacctaatggggatataaagttaactgatactccatccgtttcacaatgtaagtcattctagtattttccacatttatatattgatgctaatgaatctatccacatttatatattgatgctaatgaatctagacctttaaaatgtaagtcattctagtatttctcacattcatattgatgctaatgaatctaggtctagaatgacttacattgtgaaacgaagggagtaggagataagattagggcagacagcgcttggatcaggcttgtagttcgtcggtacatgatatcgctatatccgcatatatttagtccttaactagtgcatagtattttaattatatcaaaattattcgtatttactgagttttttatttagtgtttcttattatactaattatgattaaatagtaaatttaaaattattaatatgatataaatgagatataacaactagtgcttagtattttaattatatcaaaattattagtatttaatgagtttttttggttatttagtgtttattatttatactaatatatgataaaatagtagatttaaattattaatatgatatgagatatagctcgttgacgagattgctatctcgttaagataatgagcttaaacgagtcttagccttaacaacccgagctagctctttatccatctcggataagatacctactagttaggtcataacctcagtggcttagagtaagtgttagtagctataccttttttgactgataatacttatcattttgtactatgacgaggttaattttaaaatctttgactataaatattttctaaagtatttattctaaaaatatagagaccatattaataaattggtcttaaaaggtacttcaataaaataatatatttgttgatatttctatatattataaataaaaagtggtcaatgttgcttttgagaccgtgtaattgttcaaaacgataagtattatcatcctgaagagagtaagggtttaacttttcgatttggaagtgaaaacgctcatcaccggtttaccaaaatttaaccgaaaaccattaaaaactgatgactttcggtcaaagccgtacgaaaaccggctaaggctgtgtttggcagcccctcttcccaacccatctccctcgtttttcgcgcgcacgcttttcaaactgctaaacggtgtattttttgtaaaaagtttctatacgaaagttgcttaaaaaatcaaattaatccatttttcaaaaaaaagcaaataattaatcacccgctaatcgctgctccgttttccgtgcgggcacttactgttgggaaccaggggttccgaacacaccctaataccgaccggttttcataaaccgagatctagcagtttcaccacagcccaccaatttttgtgaaattccatcagttacgtgatccctgaagagagtactaagtagagcataaataatgatgtgatgtcagcatctcatagtaaatgccacgttagattttataatgggttcaggagagagaaataggttagaatgaccgttgtttgagtaaatgccacattggatttacaatgtgtcaaattttacaactttttacatcctactccctccgtcccaataaaccctccgtcccaataaaaaataaatctagagtgtatgttggtttttttatagaacggaggaagtatgttttattttggatcactctttaaccaggccgagccgacccatcagctggcctagcaggccgaggcaaactaacctcgccccgcgctctgcaactgcaaaggattattttctgctttcgtgttcactgaatttctgctggtctaatgaccaccactttatgcacatctcaaatgaaaattgaagctccttccaaatcagcatcaccatcgtataccctttttataaaaaagaaaaatcataaatgtttcagaactacgcttatgcactgcctcgagatttcgccttgacctcctcgtgctcggcaacacaagaacaaaacaccccacactgcacagcagctcttgagccatcaaggttgacaaaaacacgcatgctgcatactaaccacatcacgatgaaaatcagaggaacaccaaatcgttttccagtacatgataacacttgtaatagctgtgatgttcgacaatgatcaaaacaaagcccaaagatatacagaaacaaataggtacaacaatcagaaaagcgttgcattctaaatcacaacccatccaaagtagaaatgcagctgatgtaaagatactaagtactaaacaataggtgattgaatgttctgttggtttgcttgcaaaaaaaagaataggtatggcagaatcttatcaaaatgtgaatatgccaaaaaactgaagccgtcacacaatcttcctactgctcagccttcttcacctcttccgatgactcgggttttgttggctcaaccttcatcacctcttcccattgcccatctgatgcttgcttccacagagttatgttgttctcaccagcagctacagataatatgtttccagtcaaggaccaggaaaccctccaaacaggggacccgaagtcgtgcatgacctttccctcccacttatcaccaactttccctctactccaaatgacaaccttcccatcttgagaagcgctggcgatggtcgccttagctaagcccaacactggtgcccatgcaacatctctcacacagtctgtgtgaacatctgaaggaagagcactctccagtttccagccaccattgacaaatccccagaccttaacaactgagtcaaaaccaccagagacaagcttataaacaagctctcctgaaccagccagagaaccaagtgctgttgctggagcccaggagattgctgtcacaccaacagggtgagctcgctcaatccttgcagtgtcccatcccccatcagctcgcatagtcatgacagaaatggttccatcagaagacccacaggcgagacaaagaccaacctcatatggggcccaagcaatggagttgacagaggacttgtggtcagtaaatacatgggcttgagaccagtggcctccagcaccctccttccaaatgatcacacgcccatcatagctgcaggatgcgaggatagtaccatacttaggatgggcccatgcgacacgccacacagggccatagtgcccgctgagtgttgcaaggagctgggatggggcagatttgccgcctatgctggagatcttgacagtggagtctgaggaggcagttgcaaggcgcttgccatagtagtcgatagctgaatcatggaccatgtccttgtggtccaactctattttcttcgatgacatggttcaaagctgtagtgtgccacaacctctaagtcctccacaattctgcacatgattaaataaaagtttcagcaccaattcatgggcatagcagcctaaatttgcgaaactagataatagaatcccacccgaagtgccctaaacggttaacaaggaccaagaaatagtcacctcacaaacttaatattaacaatctaaacaccattttttgtcatactcccaaagagacagaagggggatgcaatagaacaatgctggtgtatcatcgcctcataaaatcaaccatggaattaaacacaacgagactgtaaataagtatgtagacgaggctcaagggtcaccattggcaaatggtactaattcacaaactttgttagacttgtggcaaaccactatagtaaatgttggtggcttcaaaataataacagaaccacttacatgctaacctcatgaatgagtataacaaggcattggattaattcgatgaattgacttaacaggatgtaacaatttcacagctcaaaacacgttcaaacatggatttgaattcctcaggcatgagaagaacagaagtttcgatagactataatctaaaaaatgaaaacaaaattaattatacccctcattatttcacagctcccaaatctatacaattctgattcttctctatcatgtcaaaaaataaaagaaagatagctgatctggtgtgacctacacccattccctcattccacgagatcttgcgccccccagagggcggatccaacttgggacatgggggttcagttgaacccccaaacttttgggtgaacaaagaaactgttacttgtattaaggttaaggctctgaaattaagagaagagctccttccagatctagaagagaagctagggtaaacgaacggaacgcaagcgaattccagacaaaagtagtcccggtgggagagagatgaatcagaaagaggatgtggatgctcaccaggatcccctcccctgccctgctctgctcgccggatggagatcggcgcccctcccctgttcagccgcgactcgtcttggcgcaaggagcggaggagacgggagattttcttttttgacgcctaagggaaggggaagatactcgagttaagacgtggcagttactgggaatatttaactattagccactttttagacgtggcaattaaggatttgacactaaaatactaaggctgagttcgtatgggggagatgggtacccaacttctgcgtacggaaaacggagcagtccattaacgcgtgattaattaagtattagctattttttttcaaaaagggattaatttgatttttttaagcaacttttgtatagaaactttttacaaaaaatgcaccgtttagcagtttgaaaagcgtgcacgcggaaaacgaggggaagaggatgggaaaaggtgcatgcgaacacagcctaagtgtgtgtttagttcagcgtaaattttgtattttggttaaaattagagatgatgtgactgaaaagttgtgtatgtatgacatattgatgtgatggaaaaggactaaagtttggatctaaacacagcataaacccatatatcgcagatagagaagggtatagactatgagtggtaaatagttaaatgctatattttaaaagtgacgaatagtcaaatatcctgaattagatggatgaaaacagttcggaaatggaaagcgtccgtccgaattttttcgaaaataaattcggaatttttttctcagaaacggaaacaaatatgatgatgctactatccgtcgaaaacgaatttgtggacttttcgaaaacaaattcagaattttcttttctcggaatcggaaacgaaatatttctcatatacagctgattatcttcagacttttctactccaaatatttagatttatactatgtgccatagtacttataattggagttatggatgaatatagttatttttctccaagaaattaaactgtataactagttgtgttattattaattgataaaaattagaaatattgatttattgttttacaaaagatattgaggtatatctcttcatcgatttgagaagtttagcttaaggggtttttatattctaataaatatcattaccgtattagcttcgattcgtattcgctccatttttatattcaataatattctattcctttttttttgtatctgtggttttcgatttcgaaaagaatatggaagcggaaactataaaagtggtttccgaaccgtttccatccaatcgagtactctacctttatatctttttcttactactttaaaactagctttatctttatgatgactagtggcccacagatcagcagtactcagagaaaaaagtacaacaaactccgttggggattgtgttgacagcaacctcatcagaccactagcaaccactagctgatgcttcacgaatgtcacaccctgaagttcttcccctaagcctaaatggaattaataattggtctcgagaaaatacctgtgtaaaagcaagagtgaaaccctaattaattaatgtaaataataatcggaattggcatgtggaatttttcttgagttctacatgtcgaaatatgctaacaagatttttagtggaattttcagaactctagggataattttaaccaattaaaaatgagcataagcattatttaaatccctggaaattcttttccctttttctttttccctttttcccctccttttttcctaatgggccgccggcccatttcctcctccctcccgtaccgtgctgagccggccgaaggccacggcccagctgagccgcgcctcctccctcctcccgtcgggtcgccgacaggtggggcccacctgtcgggcccgtccccaacctccggccacccgccgtccgcagccgccacctcgcaaccgcccgcgccagccttccccgcgccacgtcggccacgcccgcgtgtgcgcccgcctttcccgtgcccctcaactccctctcccgctcgcccgcgcccccgagatggccgggatccgcctctctctccacctccacctccccatgtcggccggcgaaatcgggccgctcccggccacgtccgagccccctctcccctatttaagcatcaccgctctcctctctctctttttctccatttcgccgagctcccccgtgccctccactgccctagcgccgttgccctcctctccgccgccgccgccgccgctccggtcgccgctagccgctgcgccaagccgcgccatcgccgccgtcgggttcacgagcccgggggccatgccgtccacccctccgccgccaatttcgacatcttggtacatcttggtacatttttctttgagatcttagtacatcttggtactgcctggatgaatggagtactgagtctgatgagcctcggtgagtatcagatctttcagctctttgtcatcaggtacgcacaatctttctcccaaccagattgtgccgtgctcatcttcaaggaaatcctgggattttccaaccctcatattctttttcagctctgctatttcaggatcatttacctgagctgctcggacttggtccacgagcgtaggccgtgcctctagggcagccatgtacccgtgttctacaattcccaagttgagatgttcaagttcctgctacaattctttacacatgtcttcggtgcacgaagcgttgcagtagcttttcctgcttaaggcatctgccaccacattggctttgcctggatggtagtgaatgctcatatcataatctttgattagctccaaccatcttcgctgacggagatttagatcaggttgggtgaagatatatttcaaactcttgtgatccgtatagacttcgcagcggttgccaatcagatagtgcctccagattttcaaagcgtgaaccaccgctgccaattccaggtcatgtgttggatagtttccttcatgtggacacaactgtcgcgaggcataagcgaccactctgccttcttgcattaagacacatccaagcccgtgacgggacgcgtcacaataaacctggaagtctttcgtctgatcgggcagaatcagaactggagcagacaccaatttcttcttgagctcctcaaaactcttatcatactcggctgtccatttgaatttctcatctttcttaagcaactgagtcataggtctggcgatcctggagaaattttcaatgaaccgacggtaataacccacaagtccaaggaaactccgaatctgtgacactgtcttaggtggggtccacttggtaaccgactccacattcgatggatcaactgccacaccctgagctgtaatgacgtggcccaagaatttaacctctgataaccaaaagtcgcatttgctaaacttggcataaagctagtgctcttgcaacttctcgagtaccagacgaagatgtcgttcatgctcttcttccgacttggaatagataagaatgtcgtcaatgaataccatgacaaacttatacagaaattccatgaacactttgttcatcaggttcatgaagaatgcaggtgcattggtgagtccaaaagacatatccgtgcactcatacaacccataccgagtggtgaaggctgtcttgggaatatcctcttcccgaattctcaactggtgatagcctgatcgcaggtctattttggaaaacaccttggctccttttggctgatcaaacagatcatcaatctgtggcaaaggatatttgttcttgatggtgacctcattgagtgcgcgataatcgacacacattctcttcgtcttgtccttcttctccacaaaaatgactggagcatcccaaggtgaagtactcggtcgaatgtaccctttctgcagctactcatcaacctgcttcttgacctctgctagctcgttggctgccatcttgtacggtctcttgtaaattggagcagttcccggtgccaaatcaatgcggaattcgatctctcccttgggtggcatggtagtgaggtcttcggggaacacttctggatactcgcagatgatgggaatatcttccaatttcctcgaactcttctcctcggtgaccaccggaatttccacctcaatctgattcaaggaaacccccagctttggtggggctggagatttgtacaccactgtttctcccttctcattgatcaaggtgaccgtgcggttcgcacaatcaatgacgcccttgaacttggtcaaccaatccatcccaagaatgacatctaggtctttggattcgagaaggatgaggttggctagaaatggtgatctttggatttctattgttacagaaggcctgaattgaaccgaggtggagctatttgtggggctgtgtcttgtgggtacagttgtacatctctgattagagtagaactattcgaatagccgtgcccgcggttatgggcggtcaaccagattcaccgtgattagtctcaccctagtttagtctaatggaattgattagttcaggtagatggttgggcctattgcaacgtggagtagcgttggacagtggatggttaacattgattaattattacaaatgttttactgctttcaactattgtttataactgctcgctttatgcaaatgtaccgctctacctatcctttggttatatcctgcatcataccccctgttccggtatgacttgctgagtacggtggttgtactcagtcttgctctacttttccccaaccccagagtttgagtatgcgtcagatggtggcttttctgaggagtaggcttcgtccgtgccgttaaggatgcctgtggagtggtgttcccgctgcagtcccagtcaaggattagctccagttatcttttattttccaatgcatttatgtaagacttttataatgtttgtaagacgtggatctgtatgtcaactttgtcgcttgtgtaccccggccggtcctggacaggggttttaatgcacattctgcttggaattctactcgggaatttctgggcgtgacaacgcaccgccaccactgctctttctctttgagccaccatcgttcctcatctccacctttgcatgcgcagccgcaccctctagtcactgacatgactttcctcctcccccgtcatcatgcacactattgtcgtggtcatcattgaggtcaggggtgttgggcttacagggattcagaggggcagccatgcaggagttgacccgacaaagagcagagacactagatccgagctcctccttggtggatctgacggtttcccaacggtcaaagggaaaaagaaaaaggagaaagggaattagtgtgcgaaatggctgtagagtcaccgaacttggagatggatagaatagggtggtctaaattgaaatgtaaagtttgatgttgtgtaaatgaaaagaatggttaattgatgatataatatgaaaacttttaaaaatacatagtacaaactacccgatagtctcgtgatatgctaagcccagtacagttttatcgtctctgcacattatggttgggttggtgtatttagctattactaataatctcataatatattgatacatgacgatacgaacttctactaacatgagttgattaattatggttagatagatctggctaaaaaaagataaaaataataccaacaattttgcccaatagtaaagcattcgattgtggtcttcttttctcattgcatgattgttgacggtcgttagcgactagtttcgaccatcaatactacccaaataaaggagaactagtcatgcttgcaatgcatatttatgttcaataataaaatattccactagcactaggattactaacctcttgcagagaatggccataaaatagaggataatcgacatcaaaacaggcgatcaatcaatcggacgatgttgagaatcagacttatcaatgaatgggccaagaaagcaaaaatgacacgaccaattggaccaaaatttacaagtctgcatttgggagcaaaagaggaggccacctgccgaaattgggccaggccggaccagcccatggttcggccaaatccaccgcagctccgttcgatccaggttttggttggacggctgggattgatccccaatgatggttggagggtactaccgacctttccaaccgtcattaccagcctatataaacccttcactctc

SEQ ID NO: 11005 - DNA, 10516 bp, Oryza sativa
gggatccctctccttctcccctctcttctactctctcttccatatcccatctcttcccctctctcttccatatcccatctcttcccctttcttcccaatccagggtgctgggatgggcggcgggggccaagatccgagtcctgctttgtttgtatcggcagcgcgaagctggactccaccgaggcaacggggctctcgctctccacctccatggcggcggcggattcttccttccccttaggtgcatcggcgctaggagggaatcaacgcttgtgaagctgcgccaagtcctcatcgccagaacagtggtttgcggtttttactgtagcaacagtaacaaacagtgaagtacactgtgcaagagtagtgttactgtggtatactgtagcgatcgatctcgttcgttcactgtaaatcggacggctaagaataccctaaagtcacaatactatgcttctctgacttgatctcgttccaatcgcgtcccgctcgtacatgcgctactggagtttgacgatttcttctgcgagtccttccctggcagaggggagagacagaaagagtagaaggggacagagaggaggaagaagtggtagtcactaacatgtgggatccgcgtgggtctcatgttgactcagcttgtcacgtcagctaaaaccggatgtaatactacctaggatctcacataatctggttttgtaaattaagggacctattatatatagtatttcggtttatggaggaattttagactcggcgacaaattgaggaacctaaaaagtgaacttatttcttttttttctagtgatgaatccagcattgatgttgttggataaatgaatttggattcaataaacctagtccttttgcgtggattagtaaaattacattagttagaggtaataaagggacaaacatagaatccaacaatattattttgaacaattttactcttttcagagttttaaaatttctgaaatctcctctaaattttagaaaaaggaactttataggtttgagagaatccaatacaattcaagaaggcgagatggcttagatcagcaatgctatgcttacctcgttcagtttcgttgttacattgctcgtgattaggtttcaagaacggagtattgttttttttttttgaacttcatcgatgcctttttattcacccagcaggttcagtgatatcacgaaccacaaaggcatttataaattctgggagggggtcgacctaaacgatggattgacccgggtcccaactagcgcccattttagtaagatcatgggcaccactattacagcaacggggaatggataaaattcagctgaataaggagcttcacttcaccgaagatggcagtacctggggcctgatcatactctcaggatttcaaggccgacaccaggataagagaatcagtctcgatccccacctcagtgatgccctgcaccgaagcggcaagcaaggcagcctggcaagccctagcttccgcagagtcagcatcatgaacgaacgccagccgtccagcacccgcaagcagcccttggccttcactgttgcgtaagataaatccccaaccgccagttttttgcgtctcctgaaaagcaccatcaatattgagcttaagctgaccagcccgggaggcgaccatttcttccgcaccacattccttgttatctgctgctccccttccgttacagccatctcattcatcatgctactcgccctgtaaaggagtattgttggttgagcagcttacgagctttttctttgcatgagcgtgttcgctccagcttatcgatataaaagaaatctttcccaccaatcctagtaactatattattttctgaagggggcttgcttaactcttactttgatgaacttgtggtagcccatttttttctcctaccttgagtgtcttgtaagtgtcatgatttgaagacatcatcttgtcctatctcatatattaatttagaaattgattgtagtttatgtaattaaattccaacaaaatttttaaggtaataaaaaagctcatacaattacatcaacacaatagaattgtaccgagaacactctcagtagctctgtttggatctatgggttactttttagccctctctcaaatagcccctaaacagcctaaaagtttcaaacatatgagctatttcagggctctttggaaataacacacccaaaaatctgtaaaggagtgctaattggggctatttcgggtggggcccaccgaaaaatgtcttctctctccatagaaaagtgcattaaaggccaaatagctcttaaaataacccttgcatccaaataacttagggctatttctttatgctaaaaatagcactcaaaataactcttagctacttcttcaaacaaggccaatatatatacatgtaaccaaaacacacgcctgtagacaaaattttataatcaaagtacatataatgctaagtcctatcattccatagattagatcgtcactcgtgtccaatagtttttatttttgctagcataaacatgtaaaagtactcgtgtcaagatatttaggtgatatttattactccatagtaatatcacatggaaaatatgtagcatatcaatttaataaaagcaaatatcataaatcccaatttaatatgatcaaagttgcacaaaaactatagggattttggaatgtcgcatataaccctagatattataataccaaagtttcacaaaatcacactattgatcattttatttttgatctaccatactttcaagttctacaatcacatcttaaatttatgaggattttactatcatatagatgttgcatctttttttattttttttatataggagtatgtcaaaatggtcaacaatatagttttataaaactttaggactataatggttacgtgccacgtgccaaaatccctatagtttttacaatttgaaccacaataggtgtggttttatgaagtttactcatctatatctatactaatataaaaaggagcagttccctccgccaatcctacaggccaaatcactcgaatcgatctctaccgtctatctgcgtgcttgatttcgccaccgcacgatccatccatccacgccacgccgaatacttcgctcctcctcctccacccgcgaagacatcgctccacacgcgaagacttcgcttctcctcctcctcgctagctcctcctcctccccggatgttctgccgctgcgccgccgcatcctcgctggatatcctccccgcatggactgccgccgccagagcctctgattcttccccgccaccggagccggtgcttcttccccgcgtggactgccgccgcatccccgccgctggagccgctgcttcttccccgccgccggagccgccgcggccggctccgacctcggccccatccgccggcaccggcgccgaggtccaccgccgcgaccggagtcgacctcggccccatcctccgcgcgatgactccgcgacgctcctccttcccttgatccgcaactcctcactctagcgtgctccgcgcctccccgctgctgacacactccaccacggcctgctcccaacggagctgacttcgccgcgcgctcctcgctccgctcctccccaccactgccacacaccaccatgccatgccctcgccggcgccgtggatctgtatgtcatgaagcctgtctccgctgccgcacatagtcgactcccccgtgaatatgcctttcggctggtatcaccatcccgtcacggccctgtggtcctgccttccaacgacactctgccgcgcctccagtggtgccgccgttgtaagggttatagtctgcccacaccatgcactcggttctcacggacgtgtgccatcctctcttttgcaggtgagagtgcagagtgcttcagctgaaagtgagtcttccgattcccctcttcagcccaatagtcctctatgtggattacctgaatctgaatgtacatcattttctttcactatggcttgatttacactatttgatctagctatcagttcaagtggatacaatcctgttgacgtaaaacacgaggcctaggcgatctgcttaactccagtgcaggtccaaaactagccttcggatatgctagcgtgccagttgatttgatcctgcaatcaacaagaaataaagacaaagaaaccgtggttaaatccataaatgatagccgatcggctaagtgccgatgacatatcatttatcctcgagccaatgtcatatgtaaatcgatcggtggtcgtaaatagataatgaaaaactaaatctactcgatcggctgtagatattaacaatatataattcttatatcgatatatacttaaatcaagtgattgggatagatcggtcgccatgcggagacagtataaatcacttagatcgaaatatatattaatgacaggactatatatgtttatagcatagctgatcagatagatctagcatgtatcggctaatactccgatactactctatatcaagatattaaaacaagtacaatatatcaaacaaaagcctaatatacttaagtgtaataggatcttgacataaatggcggacttaacatgtcaatgaagcatatagagcaaatatagttaaatcagataagatcggctgaaactccgatactaccctaatcggcaaccagaaggcaggctagagattgatattctaagcacaacttaatagatcaaactcaactgatgcagcattaagtatgaaaagaagaacaatatctagacaatcaagccgctgaaagtttcatagggtggtagatatctcatataatccaagtcaacgtcggtgtctaacctaatcggctaccctctactgatagatattagccgattgtaggttagataaagatattgccagagattatgcaagatatatgatgtcacaccctaaaaattctaaatttataaattgttgtttaaatggaattataagaaatgattttaaaagcctagaagaaaagatccaattttaaataataaattccaatataaaaatgggctatataaaattttattaaatacttctcttgattctatagttcctagatttttctgggatttatttgagccaaggaagtatttttaataaatggaattgcatttcatgaataatttaaaaagaaaaaggttttaaaagtcctctgttggctttgggccgaaagtcggcccaagtcactctctctccttcggcctgctcgcgttcggcccaagtcggcccaccaagccgagccgctcgctctccctcctctcacccgctgacaggtggagcccacctatcagggttgtcgtctacctcccaccgcagccacgccctagccgcgcgcaagccgccgccaccccttccaaattcggttgcatctttcccgatccgatcaaattggtaaaggggaaatgatccccttgatctcctctatcttttcccctatagaaacttcatctaattttgttttgaaatcatcggattcgagcttgattcggatttgatttctctcctctaaccctaaaccttccatcgccgccgccggacgttgaaggtgtggaggattaggcgtagccctggtcaagctgcttgtgggatgaagtcgtctgcgctgtttattttattttccgctgcttagatctttattgtttgagaggaactatctacctctgtaatgaatttatattcgcctattaattagattaataattgcactctattatcaatttgttattgtgtgcctcggctgattcctggatgagggttttacacacatgtaagtgtttggagttttggatagaaattccgggcatgacatatgataactcgacgaattacataaacaagattaaagtgtcataaagatggaagcactaatcccgaaaacgcaagccgtcataacaagttttacctcttgttgaagatcgaaactgatgcagctcaacccgaaagtaagaactcgtcgaaataaaactaaagcaaaagggtggcgatgcgccaaaattgtattgaatgtgtgtgttaatttattacatggggttcggggtctatttatacccgaaaattacaaactatgtccatgtcggacacgactcttatccctaagaaactctaagataccataagtctttgcggcagacttttgccctaaacatatctctaaggaaattacataaaacatcctaattaatagatacaattgccttctcaggactctatccatgtgcggcaatcatcttgaaacatatcaactcaacctgatgttgtacaccaagtcatattgtcggaatcggctgtatcacttaacccagtctgactcagacttagccgatccaatcgtagccgatccagactccagccgattcttgctctgttctcgaatcgatctccgtcttcgactccacttcaatctaatcctcctttccgatgctgatattaccaaatttggtcgttaacaaatcctattgttatcctttcaccacaatcagtagttttctgagaagttaatttctttgcatacactgatgaactctgtagtaaattctctgcaggctctttcttgctcaattaattatcgctcactctataacagatcaactctggatttagacttctttggccaagcactatggctaaaatggcatgccaagcttggaacagaaaggtcaagcaatttttccaaccacggtgcagcacgtggctatagcactaacactaatttctatcatatgtaggcagatccaattgatgctggcacaggctttggtgaatcactgatgggtgagagacctacagagttccttgtccaacagagcaatggctgagttctttcagttgtgggatgaaatttagatggtgcagcttcaaccaggaatagccccgactccattcggtgctagctaacaggtgatggccagtttactttctcatcggcttacaacctcttcttcatggcaaagaccaaatgtttatatagtgaactgcataatttcgattcttgctattcatgatgatctgttggttgatctggaaagacggaacacttgggtatttgagcagaggtcttgacctacagagcaattatttggagacatcaaggagatcacgatttggaagtcggctagcattttttatcctgcagtgattatttattagtgttagttgtttattgtggtctgatgctttgcctcatacctttgttcgacatcatagtactttgtactttgtttctccctaaatcttaataaatttggtaggcctaatcctttggccaacctggtaaatcatttcagtagtaaaaaaatgtgttttcctggtcagattgatatatatatatatatatatatatatatatatatatatatatatatatatatatatatatatatatatgatttcttctaggctgaaactcttggcttggagaaactttgttgcatactgtagcaggaactgcaacagattgaaaattgatggtatcaaaggttcttaataatacaagcaataagttgtcaaagaatcattgtttgattttgtagtgccaaaattccaatcacacttagtggctaatctttttattttgactaaactaatgccacatgttagcagcagtagcagaatttttttattttggtttcaggttttagaactgatgttatttgttgctccaaataatccaccgatattgtcaggtgggagctatttgacttgtgtggctagaagtattcgagtcaatcatctgcttgccgtgtttcaaaaaaaaatcatctgcttgcctcggcctacttcaataaacaacggaggatgctctacatcataatcgtatgcaaatacagataatacacaccatatttcccttcatttgcaaagtcgtaataaactaaataagaacaggtaccacattcatatttgtctgatagatctcaaatccatatattgctaatggtctacttctcaaattggtttttacacctcaatgcatgttttgtattccgtttgtcacatattttatcaatcaattacagttctttgaaattggatcatgacttccaacttgtagcaggtaattgcattgtatcacacgttcattacaagatactcaaagcaaaaacggtaatatgttggttagctgcttgcacttgcaatgagagcatagaggttctgtacttacaatctgaggtcaggatcacgttccatatatttttacatagaacactattgcatgaattgcactatttgtagatgttctatagttaatcaactatgttaccttaaatatacatggtgtgttctagattctgaaatgtttagcaaacttagtcaatatgtagattaactatcacaattcatgtcactttttcatatctagcgaacttatctaacttttctttttaggttaaaaaaatgcaggaaaaacgtttaggctgtcgaagcaaatccatcaggaggacaccatggcatctgatgttgtctactatgcatcaaagagattactggttgtttctattccttctttttggttgagataatttgcgttaatataatgttttcatagaagtgagtcaatcttgatttgtttggttaacacgggttatgtgttgaacgtgtgatccaatagtatggctttgtcatgttttcttatcagctaattgtaagtccttagcaactggaatgctggatcatgactaacaagtgaaaaggatcaatgatagttttatgctggtgcagacatgcaatgccaaataaaacatggataattccttcttgtttgtgcaggcttcttagcactcagtaatttatcttttcgaaatttctatagttgttgctcatatacaagggataattttgttgctcagtctcacaaggacagctcactacctatccatctaaaatctgattacacatttgcccattaaatgctactatgcacaacaagaagcaacgaattctactatacacaacaaagaagccacgattgtactcttaattcaaatctgaatttgttaggacatattattgacatataaccacataaataaatccaaagtatatataatatttttgtttccccatttcaaggtctatatgattttacttatttggttttggtccgcatactggtagtatgcctgagagtggttatgttgatgactgttaagagaatgacaagtcaatatcttgctttgataccttttttttttgcatttttgatttagctaaaaataaccatgtactgataatggttatttttattgttacaaattccaattacatgaggatatgttttataaattttgggtaaataggttgtgcttcagaaggtgtagtttctaaaatttttagtgtaattatgtactcgggtgatatattttgtcaaaaacgtgcattgcacgtgcacgattactagtttagtaacaaaagcaacagaaaaggatgctttaacatatagaagttgaatctataggatgaagattaagggtgcacgtaaaacgagacaagtcattagcatatggttaatgaagttttaattattaaaaaaaataaaaaaatagatttatttgatttttttagagcaacttctatatagaaagttttcgcacgaaatatacttgttagtagtttgaaacgtgctaacggaaaccgagaaaaaatctgtatgttattggaggttagaacgggaccataataaagtgaattaactacaccaaccattgttttagagttgaaaacttctcttcaccggtttgccaaaaatggataatctcccatgactttcgatgttataggaaaaccagctcaaatcgataggtttatacaaatcaaccaccgatggactgaaaaaactgatcaattttgttagacatgaacttcacataataaactaaataatacaaccgatatagatcactactacaaccgatattggggagcttataattctgagaagcagctggtgaaaagctagctagtgagaatctagataagctgacaaaccttgcttctagcttctaatttattttctagattctacaattacaacatttcaaaatctaggtgaatatatgtactgtttggaggagcttctgacaacaggagatcataggagaagctgcaacggtcaaaagctccccaaacatgcccattaattagctgaacaatttatgatgccacatttttattaaaagaatattcaaaacattttagctgcaaataaaatttttgttagacacactatataagagaatatgataaaatagttgattatctacttaaaagagaagatagaatagattttagaaagatgttcattaaacagattaatttgggctataaacaccgtaaaacagagtgcagagtgtagactacgacaggaagggaaaggtgcgaatattagatcagcatctctccggcttcaccgaactggcaagtgggcccatccctccaatctcggcggatcactctcataccccatcggtccatccggcc

SEQ ID NO: 11006 - DNA, 3565 bp, Oryza sativa
aatgttgcagcaaactgatagttttctgaaatttactctatcttaaatgataaatatttatgactagagtgattatcaataatatcttgcccttttttaaacaaatactccctctatctcataatataagacgtgcacatattacaggattcaactttaaaaacatttgacgaataattattataatataaattaaattttatttattaaaattaatattattggattgacatttaaatttactttaagatgattataattttgttgcaataaaccttataatatatgagaaattttaagttaaatattagttttgaagactgtgtcaagttcgacaatgctttatcttataggatgcggggagtacaatttattaaagatgaatttcaaatatgtatatatggaatagaatcctggtactatcgcctaaagcaaacatcgtgcataggatatagatataggctttcttgatttcgacaggaaaggccgaaagggagactgaactacagaaaataactttgatgagcttgacagggggcagcggtgttgtcgtaagccgtagcgaccgtccataagtctctactacaagcgtgtgcagtgtgcacaccgcttaacaaccggcatctcttgggctgcctccatggaaaccgcacatttcgaggttttttgcttgctagctagctcatcatgatgtgtactaacgtactccctccatctacttttgatagttatatttccaaatctgaaaattttatttttgataggcatatttcaatccaacaacttatcatcttaatgactttcttagatttaatgcatgactcttcattcttctacacatgattggctacatgggcatttagaaatgtaaatattaatgaatcacttgtttacgaggaatgactagtagcatatttaaatggatgataagtaaaattacttatccttggtctatgtgccaagattaaatatgactatcaaaagtagatggagggagtagtagcaaatgaaacattaacgcttgtggttattaatcatacgttgcaccgacgttccaatcgaattaattgcctcctaactaacgggtttttaccatcaatgcaaaatccgcatctcttataatcggttgatcaaatgagaacttgtgaattgtctgtcatggccgatcaccaaactctctccgctgtcttcttcctcctgctcgtcccgcacgccgcgtgcatggccatggccaagccgtcctcctccacgctgctgcaggacaagtgcgagctctacgccgccggcgaccggcccagctacgactactgcatcaggacgctgcgggcggacagggcgagcgccaccgatgacgagcgcgggctcgccgccatcgcggccaggatcgcccgcgcgaccgccgtggccacgggcgccaagatcgccaggctgcagcgcggcgagacggcgcccgcgcggcgggacggcctggccgcctgcgccgcggagtacgccgccgccgtgcgccggctcgggcgcgccgcgagggacgtcgtgtcgcgctcgcgcggcggggccggggcgagggagatgcgcgaggcgcagacgctgctggcggaggtgactggcgcgccggagcgctgcgacgtcgcgttcgaggccgccggcggacaggggtcgccgctggacgccgtggaccgagatcgagctcgacgtcgtggtcgggttggcctccgacatcctgccgccgacgaggccgacgtgatgtgatctggcacgcttagctcgcgagtgattaaccacactatatatatggatttcgtgagattattgaaggtaaaatttcacgttgaagagttcgaatctcagcttaaaagtttcaatgtaaaaaatttgtagttttaaaaatttctggttgtgtttcttacaagaaataaagttcgtcgcagtataaggcgcacactagatgatcctaaatctaataactcgtgacgtctgcccaagatatgaatgaagtacgaaaggtcatgtagcctggcgggtacagtgaagtcttaacttcgctaagagatcagagatgtgtcgctagccttcatctacagagcgtatgttaaggactcactaggggtgcatgtacgtagtgttgtatgtgcgtgtgcttctgctttgcaatataagaaaacaagttgtacattaattagtgtttccatagcgaacactcaatgtagttaacctcgcaatgctacaaacaaacataacttatcttccacaaaagaatttctaggggtgcatgtacgtagtgttatgtgtgcgtgtgcttctgctatgcaatataagaaaacaagttgtatattaattagtgtttccatagcgaacactcaatgtagttaacctcgcaatgctacaaacaaacatagcttatcttccacaaaagaatttcagaattgtaaactagttaaaaaatataacaagcagataagcctttcctgtcaataaaccttggagatcagcatctatatgactataaatcctagagatcagcatcgaacagacggagtgcaacctaaatccgtagcatggcgatggcgaccgccccaagtgcaaataacagcgcggtgttcgacgtgccctccagccgcgtcgctcctgcacgcacgaataccattcggattaattaaattaagttcaaaacgtaaattaaatcaccgttattttctccaaaccttttttaaatttcatcacaaaccaatctactccaacaaaaataacatgaaaatccagttcaatctacattttaacgatcaaaagctcgcaagaaattaaattgctcaccggatgtctgcggaggcgccggcggcactccggtggtaaacggatattccggcgtaagtggcggcagcggcttgcctgaaaaaaaaaataaatatattaattaatcaatggagatcttcataaacgtccagggatcttccggctaactttataaggtagtgagctagatgatccgagtttgaagcctcaccctttctaattatttaatattagtttcttccttccaaataggttctttcctaatattcgcgcttttttatcagtggagattaagcacgataaatcttctaattatttaatattaggttttcctaatattcgcgccttttaatcagatcagtggagatcaagacaggattaagcacgattaattgattattagttaattaccggcgcaagagcgggcgatggacatgaggacggaggcgtcgccgaggcaggcggcggtgacgttgaccatggcgcgcgcggtgtcgaaccccgggccgacgagccgcgccacgtcgccgtgcaggacgtgcatcaggcagcacggctgcttggcgacggtggcgttcagctgcgcgcagcacggccgcggcaccgcgtcggtgcggtgctcgatgaagtccaggcacgacagcatccgctgcattgtacgcacacacgtcttcggcgccgacgccgtcgacgccgacgccggggggggcgacatgacggcgaggagggcgaggaggaagaagactgctagccttggcacccgcatggcgtacgt

SEQ ID NO: 11007 - DNA, 6707 bp, Oryza sativa
ttcagcaaccaagcccaactagaaaaaaaggagtcgtttatacaaacttctactttatacgaatggaaattagttaggttaagtagtgaactcaccagttcctgatagacgacggcatcacttttgttctcaaatgtgacagagccgtccgggttgaccttaccccttgcccgcgcccagttgcgagctctttgtttagggatgtctgaaaacggagcagggacattcgctgctgcagcggctgcatcttcttgggcccatattgcctccttgccgatgtaccctacggtgcccagccgatgtgggtgctcattccgctgttgcagtaggcgatgtgcctcgcttgattccctaaactcttgggtgttcttgagagagcagaattcctcccacaccgtctcggttatttgagggtattcatcgaacggcgtatgattgccgggcgggttgacaaactcggtgaagagcttcgacttccgattcttccaagctttacccatcttctggaatgccttccgcttgagcctatcctttgcttcagccggaaatgtgaaccatttctccattgccgtccaagctcgctctttctcggcttctgtgaccttgccgatatctttatggaggatcccgaagttctcacgtgccgccagcccgcagcagttagaccatcttccaatgacagtcctgggcgccgtgggcctaccactagcgtcaacttctcttataacttgcactatggtcggccatatattttgtgaccggggatttctactcgacctacttgcacttgtcccgcccgacatcgatgtatgttgttcctgcggcaattctgcagcacaaacaaaagggaacatttgctaaggggtgctagctaaaatttagtggtcatgtggtgaaaatttgtcctattaattaccatgaatttcgggttgttcgaccgccgttgtcgagggatgaccttaggcaagtgtctccgtggctgggtttgcttcttcctggatcctcgcaggtgttggggagggtggatttgcgccgggcgttgtcatggtctaattttcgcgaaaaagcttataaatttcctaccattatactaaatagcattaaatccaatgtaatacggggtatactatgaaagatatggcctcagttttgctcagaaatatgcatcaattaccatcatttgcatgaagggaaaaaaagaggaaatcacaacatcaaaatctgttcttatgcataaaaaaaagaacaagtgtatatagtctcctcttatcaaactagaaaaaagaacaagtgcagaaaatatgttcttatgcataaaaaaagaacgtagatactctgttcttatccataaagaacaagtgtagaggtatataaccactgaatcaatcatgcaaatttaaaaaacagcagcagcaagggtacagatagaatgttattgacataaaacagcagcagcaggagtatatatgccacaggggcagcaacagcagggggaaattcacataaaacagcagggtgaacaagtagccacagtaagaccaatagcagggcaaagatagtccacaggggcagcaacaacaggggcaaattaactaaaacaacatgtctagatagtctcctcttatcaatccagaaaaaagaagaatagataaaaaaaagaacaagtgtagataatctgttcttattgagcaattcatcactggccatttaacaaggaacacattgggcagcagcagcaggggcaaagatagtccacaggggcagcaacaacaggggcaaattaactaaaacaacatgtctagatagtctcctcatatcaatccagaaaaaagaacaagtatagataaaaaaaatgaacaagtatagataatctgttcttattgagcaattcatcactggccatttaacaaggaacacagcagcagcagtagcaattgtagattaaaaaaaatgaacaagtagcactaaatcatgtatataaatcatgtatgtggcaacagcagcaagggtatataagtcatgtgtataaacaacaattcatgcaattcacctattcatagacaacaagggtatataaatcaacaagtgtagataatctgcggccaatctatcaattctttcatttgaactaaatttcaaaccctaaacctaataaagttccttaattatcaaaaaatgacagaaaacaaaatgcatggagaattttggtgtctaggtcggttccgtccatggactacactgaccaatccaccaaaattccccatgcattttgtattatgtgatggtttgataacctcggaactacattaaatctgcggccaatcaattaattcttccatttgaactaaatttcaaaccctgtatatgctttatttataggaaaagggaacataacccctaactagctagctagacaaactatttctagctagctaccctacctagctagaaacactgttgccaatctatcaatccatcctttttcagctaaatgtaaacattatccccaaaattcaatagttctagcaaaagggaacaaaacaacatataaagcagtatacactccatgaatggttacatgtcaaaatggcacttaaatccacattcaagtttcaaactagctacacattcaagttttaaataacagttgcaacaatctgaacagaatgataaaaaaagagcacaattatacatatgcattttcaattcacatagaaaagagcacaattatacatatgcattttcaattcaaaaagagcacaattatccccaaaattcatcgttcatccaaagttcatcattcattcatccattccattgcatcatttattcatccatccactgcaccattccattcatccgtatcagagagagaggggtacctggagaggagacgacgagcagaggaggcggcgcacggcggcgatgacgagtcccggccggcgcacgacgcacggcttctcggcacggcggcgcggcggcggcttcttggcacggcggcactgaggaggagaagagggggttaatcggcgaacaatagtaaataaggggaggcggggggagtgggctcactgtggaggtcccggtcgagagaaggaggcggcggagaggagatcccggtggcggcgacgacggtcctggcgtggagactgagaggaggtcccggcggccgtcgagagagttagtgaggcggcagcggtggagagggcagcagcgaggagggcggtggagaggtcgaggcggcggtggagagggcggcgtaaagggcggagatggcgacagagagggcggtggagatggcggcggagaggtcgaggcggcgacggtggagatggcggtggagatggacggcggcggtcgagagagtgagtgagacggcgccggtggagagggcggtggagaggtcgaggcggcggtggagagggcggcgtatagggcggagatggaggcagagagggcggcggagatggcggagagggcggcggatttggcggcggctagggcggtggtggagaggtcaaggcggcggtggagaggagggcgtagagggcggcggagaggtcgagagaggcgagtcggcggtcgagacagtgagtgagtgagagtgggtgccggatctggattgatctagaagatgtccaaccctaggtcaaccctagtcaaactcacatgtgacgggcgccaactatggggccgtcacaggtggcctcacctgtgacgggcgccaactgtggagccgtcacaggtgaggctacctgtgacaggcccaacactctgggccgtcacagatgatgtcacctgtgacggccccacagttagaacccgtcacaggtgagtttgcctacagcaattttattttattttatttcacttagttcttttatttttcttaacatatttccacatacactatatatttttgttatacttaattattttatttcactaacagtagtaattgcacttcattattttactaattgtattattttatttcaatggttatactaatttaattattttatttcacttctagtgggtgcttcacttaattattttatttgactatttcattagcaatatactattgatcattgcgaacatattagagtcatacagataacagacatgtagacataaactacgtacataaattacaaaaataatccttcctcatggtcgacgcgtgcatattgaacgtcatcttcttcttcctcctcttctagaggtatttcttgacctatgccatggacgtgctggttgtaatcatcctcgtctgcaatattgtccaatccaacaattctccttttcccttcacgaacaacatgtagtttcttgttacacgggtcaactatgtagaacacttgaacaacttatttggcgagaacgaacggttcatccttgtacgcgttgttagccaagttgacagtggtgaaaccttcattgtcaacttttacattgcgaacatcgacccatcaacaacgaaacaacgggactttgaacttcaagtaatctagctccaatatttgctcaactctaccatagtattgatcacgacgaccaccgtcactagcagcctcgatgcgtaacccactgttctgcactgtgcatttgctgtcttgctttaccgtgtgaaaggtgtatccatttatgtcatatccttgccaggtggtggcactccattcaggaccctatgacaaccactaaagtgtttcactagacaagttctgcaacctggcaattcggttcttcagccactcattgaaagaagacatgtgcttatttctgacccaactctcttatcggcctgggttctcctgtcggagaactgtaaggtgttcgtcaacgtaccacaccacatcagtcatatgctgcagtaccgtgaaatgagctttatcgtacaccttccgatccaacctaacagtctttcttccaacagtaccaacaccatcaagcctcccttcgtgatgagatcgtggtaatccaattgaagaagtttctgacctatagtccacacaaaaatcgatgacctcttcggtggtgtaactctcgatgatactcccctcggggtgtgaacggttccgtacataacccttaaggatccccaggtacctttcgcaaggatacatctgcgtcataaatgctggaccacagcactttgtttgcctcacaaggtgcacgggaagatgttccattatgtcaaagaaagttggaggaaagtacatctcaagatgacatagggttctcacaagttctgcctgtagttcatctagtccctcgggatcaatgatcttctggccgattgcatggaagaaggaacacaaccgctggatcgtgtgtcgcaccttaggaggcaaaatattccttagtgcaacgggcaacagctgtctgataagaacgtggcaatcatgcgacttcattcctaccaacttaagatcttgcagtgaaacgagcctactgattcttgatgagtaaccagatggaacctttataccactcaaacatgttagcaaatcaatcttctcttctttcgagagagtgtagcaggctggaggaaggtaaaccctgccggattccgtggttatgggatgtagttccgagcgaacacccatttcttccagatctcgtcgggcgttgagaccatcctttttagtacctgggttaagcagtaatcccattaaactctcgcatacattcttctcgacatgcatcaaatctatgtagtggcgaacttcaagatccttccagtatggtagtctccaaaatattgacttctttttccacatgctcctctcttttgtcttttgtttttccacatgctcctctattttttccttcgacgtgctcttctcttttgtctttccaactttcctttttttttccaaactcgttggttattcccatcaccaagttgtgcacctctgtccctgttagctctgccgagggtccggctgtatctctgtgtccattgaaattctttttcatattcctatacgggtgataccttgggagaaatctcctgtgacccatgtagaccgtcttgtgtgaatgcttcaaccatttgcttcttgtttccttcatacactccgaacatgtccatttccctttcacagtttgccagaaaggttgccaagggccggataatcgttgatggtacaaaacaacatcgcatggaggttgaaatactcttgtgcatatgcgtcccatgtccgtgtgccctcattccatagcctttcaaagtcatcgattatcggttcaaggaacacatcgatatcgttgccaggttgtctcggtccttgaatgagcatggcaagcataatatactttcttttgaagcacaaccagggaggaaggttatagttaacaagcagaactggccatatactgtgacgactgctcaaatcaccaaatggattaatgccgtccatacacattgcgaaacgcatgtttcttgggtcatttgaaaattcctggtaaatcctatcgattgtcctccactgtactgaatctgctgggtgcgtcagcatactatcgactttccgttcttcggcatgccagcacactagcttagcttgttccttattcgcaaacattctcttcatgcgctccgcaattgggagataccacaccacctttgttgggcctcccctctttgacttacttccttcaccttcactctttgctcgtttgtatcttgatgccccaca

SEQ ID NO: 11008 - DNA, 18658 bp, Oryza sativa
caataattaaaagcagcatactgtggattccagttttaggtagaaaataccatggaacaacccacaggtccaaaaactattcactagctgcataactgaaccatctgcagaaccaagaaaaataacaccccagtagcttgcacgacagtagcctgtccaagagtgttatagttttcaggagcggcctcaaattctccagtatgcaatcacaccagtcctgacatcggttttgctcctcttcttttggcacttcttccatttctgcaggaagaaaattattttgtacaacgcattcaggagagatttggcaattaacttcattgaacacaaaaacataaccacaataaccagcaaacagtttgctaaaatagtaggccgaaaattactatggttcttattccatttcaaatgcaaaatttactatgaaaaaaacttgatagaactattatgcacctttatattcaaatgcaaatccacacaaaaggccctcccattattttttttatcaacatgtcgagaagatatgtgctcattcaaattaaaaagaccctccttaaacaccaagtttagcaagaattgccaattgccagcaatgcaaaattaccaatttacaatacatctaaattaatagagtatatgattttaagtgtttgagtaacgattgaagtccttatattcctgaaacaaataatcaaactatataggcccatttcctaatttcagttggatatcatcttatttcgatgagcatatggaagcttttagcataaaagatacaagtagaagatgaatttgcaatgaaatttgtagaactgcatttgtgacagataagtaaatgacaaaatgatgctgtttatcaaatcacggcatgaataccaattatgtgatgatacgaaaccaaactttaccttgtcacatactctgtggacataattgatttccagtatatacacctactccagtaaagatactagcctttgtctgaactatctctgaggaagtgttggttactggattataaatccagaccatcccttttgatcctatctgcacccaaagtaccacatttccctcatccgtcacaagcaaaggttgcacaccatctccaaaaccatcaaaagcaaattcaacatttatcctatattctttggaccacataccattctcaaaatcaactagaaaccataagtccaccgcagaaatttgatcattgaaatgtgctgtacacaaagttccttcaagttgggctaacataagacgatcggtaaggtcagcatagttgagtgtgccattcgcttcctcaagaattctgtttactggcccttggagagccgtgctccactgctccgtcgcaaggtcgaaggaaggtatgcagcccgtagcaaaatagtaggagggatccatttgccagtgatccaagaagaagtaagcagccccttcgaagacaactccattggtgcagctcggatcaagataccccggtggactctccatcttcctccaccgtccattcatgtcgccgattgcgaaaacctcacacactggatcagcctcatatccatcctccaagtcctctagaatccggagtagtttgtactctcctgtggaattcgtctgaccaaatgcaaaccaggctggcctcatcccgttgcgacgcaccatatcctctgcaatgccgaagggcaaggcggagacggatcctgtggcggggtcgagcacgctgacgcggtggtgctccccggcgacgaggacacggtcgtagctcgccgtcagcaccctgcactcgccgcccacgccgaggatctcctcgacgacgttgccggacaggtccacgagatcaacgcagcatcgactggggaagctgtcaaccaagacggcgaggagcgggtgagggtggacggcggcgtaggcggcgaggaagagccggtccgtggtgaaggacagccacgagcggcagacggcgcggaggcggcagatcggcttggcggggaggcgcagcaggacctcgagcagcagctccgggggcaggacgccgtccacggctccgaacccgcttcccggtgcggcggcggcggcgcacggctctggggacgccatcgcggacgcctggattgggggtcaaaaccggatgaaaacttgaaccaatcagtgcgagaagaaggacgagttctctgccatcaaggagaagggtttacctcgagcggagcgcggtggccagccggagtccagcacggcggcggcggcggcggcggtggcgccgtctctcgtctctcgccgggatgtgtctgagaagagaaatcggacattctgacacttccaagagtgggtttcggcgtaatgccattccacgaaatggagtcgttaaaatgccactttaaaccaataccaaaccgctgctttgccatattcaccatttcacaggattttcatcatttttcacacttcgccttcccaaaatacccctccgagtgactgtcgccgtccgggtgctcgccgccgcctgcctccttttgcgtcgacgcaagggtcggtaacctcactgcccccgctctagaaaaatccgatggcgaagaccccgcaggagctcctagcccaacggccgccgacgaggaggaggagagcgacggcagccgacaaggaggaggagagcggcgcgacgggagatagccacgcagcgtgacagccttgccactgccgtgcccctgtcgacgctactcgcggccaccggcaaggagaggagagcggcggcgctggagctcctagatacgccgcgtctgggatgatgaattctggctgcggcctgtctacggatggaaggatcacgagggagtccggcgctggaagcttcggtatggtcacaagcggcgtggaggcggcggcggtggcaggtttgtctatgctggtaacgaccgatccgttccgtgagacaggtgtgtcgtcgtcgccgcagctgagaagcgctccgttcttgctggaggcggcgtcctgtgtcggcgccggcgccggtgcggtcgccctgcgcactctcgccgcgtcaccaccggagccgtaacggccgacgggcaggatggtgcccctccgcttcaagacctgcaaacacagcgcacgcacgcgcaagcacacacatcggtttcaaacgaactcagcaaagcaaatcaaagcggaaaaacacttgagcatgacgatctcgatgctccaacctaccttgccgacgccgtcaccacgacgcgagcgggaaggctgccacgcgcccgaagaaccttgtcgtcgtcacccacccgctccacgcccgcatcgttctccccattatctgcgcagcgcaccacggccgcatcccgacgccgacgtcggaatgactcaaccaactcagtttggtataaccgacttaagggcattttggtcagaccgggtgcaaaattaggtggaaatggtaataattggcccaaatggcaaaacaaatatttggcatctcttgtgggtggcattttaaccactccattccgtgaaatggcattgtggcgaaacccactcttggcagtggcagaatgtccgatttctcgtctgagaacgaagcctggaaggagatatcctgggccggaggccactactgacaagccgagcccatttaagcccacataatgaaaatcccagcccatatatcttgtgcgtttgggcccagcccataaaagcccatataaacgtagcacgaagccacgaacacgaagcaatccatccccactccccgatccccatcccctccgggctccggcggcgccgtctccgatcgccctcgactgagccggcggagaggctcgaggggagggaccccaccgggggaatccagctcggttcgacctgtcggcggcgggagcggccgccgtccacccatcgcagccggctcgacctggtgagctctaaccctatgtttcttggtcgcaggaaattttgtctggtaatgatgttctactgcgtattatacatcgatgtaatcatctagcgaatgcatgaccgtgttgtgactttagattctactgtgctttagtgtctttgtactattagagtagcagtataaattgcaaaattgatagttttccgatcatgaacttttagataaatagcttcttgttattaatggcaaacgatcaaagttacatcggctgtgtggcattggcataagatcgatctttcaacggtctcaaacaaaaccaacagaaaaaatgattttacttactacttactgtagtatattacagttcgagttggccgtacaaacatgatctcctctcctgatgctaaatagtactgaatgcttgtaggcttcagaagttcagatatggacacagggcgttcttcccagttgaccgagcgagtacggcgtatgcctgcttcctccaactctggcattctccccctggaggtgctgttcgacgtcctggtgcggctcccggccaaggagctctgccgcctccgcatcgtctgccggccctggcggtcgctgacatctgatccccttttcatgaagacacacgtggctcaccaccgagagacgttcttcttggccagctttaaggatgacgagacgcacatccatatcatggattttgcaggcaatgtgattaagcagataggcataccagctggccacaaggtgttatgcacacgcctcgatctggtttgtgtagccacaaataagaacagctgccatgttcttaatcctgtcactggagatgtctacaacttgccaaagagtccagcagaggagcacacgtaccatgtcaatctgcgcaagcctttcacctcatttgcatttgggcatgttgcctcaacaggagagtacaaggtgctccggatgttcaaccgtcctggatttacggaccttgggataccacagctttgtgaggtcatcaccgtcaagggtggcacaggccaggcacgttggaggggaaaacagagccgtgagttctttgttgaatgtcaaaaggcaaacagcggtgtcgtggttaatggggtggtgtatttcttgatagacagtgtatatgattcaatgataattggtggtgatggtgccggcattcatccagacttcatctgttcttttgaccttgaggtggaggaatggagggaagatatccagggaccaattagcaggaactttgtatatgacatggacttcccagatgagtatatagcaatttgggatcagcttagtttggctgagctgaaaggctacttagttctagtataccaccagagttaccgatcctcgaccatagacctgtggtatttaatagactatgagacccgcacctggattaaacaatatagcattcaaattgaatcattcgttcctgttagggagtgcaaggtaaagccactgctggtattggatgatgggaggatagtcgtatggctaggatcgaccggactgctactcatatatgatccaagaaccagcacttttgcagaagtggagatgagacgtctttctgaagttggtctgtacacaggaagcgtactgagtttataaaatggtgatgtggtgtagtattgtactccataatgttttgctactctcttcaaatgccagttaatcagcttttagaaatgatctttgggcacaatcattaatatacttggtcggatccttgtgtcttgttgtattggggcctgtaagatcattgtaaattcttgaagatgctatatctctctctcattttgtactgtcttgtgtaaatatagtgttaggtgtgtacttgtcagcatatgtcatctgacattatttagagttgctgcaactttgtatcatagctgctagccagttggttggatacttgggttatgtgtaaaaggatgtggcctgaaaatatttctatattctctgagctcttttcatatgccccattcaggtcaaaatgctcttcctttgttgcatgaaatcactccagtcattaattcagtaaggatggggcatgctcataagcattgcatggtgaatcagaaatgctcttttgaaatcgaattgtcgtgtggaaccctcagaaaaaaaatgtcgtgtggaagtctcgagtctgtagggcctgcttatgtactttatgttgcaccatcttgattgcagctgttaaacttgtaatcctaccattgggtttgtcgttgcagctgcctcgtctgccatgtttaccccaagataaaatccaagtatttcacacgatcatctctatacaatcttaaagaaaaaacaataataatagatgtgagtccgccatcaccattagtctgacaagtgggaccacagataattcacctgtcctctcccaaccctcttcctatggccccaactttgttaaccaatctgtctatacatatgagcaaggaggtggttaaaagcaaagcaatggaacaataagggatcatgagcaaaatccactccatcgtctcctccgtggacccgagtactatgtcgacaaggactggctcgagctttatctggccgggcgacggtgggcaagggacgacgtcagcgtccgtggtgacttggggattgtgatagcgtattgtgaatagggatttggggactatcagtgctctgcatttggggaactgtgattagggatttaggggactgtgattagggatttggatccagattttctctttttttttggctcccaaaaatatgttcactggcgggtcttcttagcatccgcggagaaaatcgttttttcactggcggcccgccagtgaaaatctatttttgctggcggtgcaaaaaccagttttagccgacaggaaagacttgttttgtagtagccccttccttctcgccgctgccctcttcccaatccctcgtccaccacactacatctctgttgaacccggcgtggagaccacatcgacgatggcggcttccatggcatcacccttttctacccccactgtcgcgtccactgctgctataccaacactcaccagcgacccatgcaacaaaggaagcccagcaccaagtatccggctcgtgaccgcgttgtgttaggggagtacttaagtaagtaggtgtgtgatggataggggtatcaaggttgtataacctgaatacagctctatcttcttccccaaacaagttcatctgcctacccccagctttttcttcttcctcaaatcttttctctcttcccaatccccttgtctagatcgggaacgtaacatctggtatcaaagcacacgatcgacctagagacctacgacaagccgtagtaccattcgcgagctcaactcaaggctaccaagatggatcaacatattgctgatctgagcaagacactggccgagatccatgcctagaacaatgcgatctagacaaagatggagtcgctagacgagatcaagaagccggtggtcaacaaggcgatgaatgaactacacgacgaggatggggatcttcatagtactaagataagatgtggtatattcagtattagattgacttttattatatggcagaggaagtattatacttcatccattttttaagtatgacgtcgttgattttttttagatactttgattattcgtcttattaaaaatatatttattttattatgatttgatttatcatcaaatatttttggaaaaagtatgaattaccccctgaactattatggttgaccgaattacccccatgaacctgaaaaccagacattgctcatcctgaacttttaatattagacgaattacccctccccccgacactattctaagcgattttggcttgtgcttgcacacgtggcgctaacgtggcaatccaatcagcaaaaatactccttgagcccacttgtcatatctcttccctctctctcctaagcgtcctctctctctcgaacaggcggctgcggacgggctcgggcacgcggctgtggacgggcggtggcggcgtcacgtggggacgcgcggtggatggtggcgcgggggaggcgtcagcggcgagcggcgccctctcgagctcggcgtcaacgtcgacaaggcttgtgtaggggacggcagcagagcgcgggaggacgcggcggcaacaccctctcgagctccgcgtcaacggcgccgtgtccacccccaatgactgcggctgcgtttgcaccacggcgtgagcatcaacgactccaagtcgtcgaactccatcccctcgaacgggtcgacaccgtcgtagatgccggcccgcgctactgccgccgccgatcccgccgagccgttcctggtgaggtcagcctcctccccctcctcctcgctcacccagccgcgcccgcagccggcgtcgcttgcccagccgctgctgccgccgcagccgcctccgctcgccgagccacccccacagccgccgccgctcacccaatcgcccccgcagctgccgccgctcgcccagccacgctcgccgctggcgccgctcgcccagtcgcctccgctcgccgccgagccatgccctcagcggccgccgcagccgcctccgctcgccaagccatgctctcagccgccgccgcgccctgccttgctcgccgagaaggcgagaacaccctagagggagggagagagaggggaagaggagaaagaagatgggagagagtatagatgactggtggggcccaccgttaaaaaaaagaaaatgctgactggagtgccacgcgtacgccacgttgaacaaaaccgccctggattgggtcgaggggggtaattcgtccggcattgaaagtttagggtgaacgatgtctggttttcgggtttaggggttaattcagtcgactgcgatagtttagggggtaattcgtatattttccaatgttttttaagcatgatttaaatattttatatttacacaaaaatttgagtaaggtgaatggttaaatgttaataataaagtcaatggcgttatacattagaaagcggtgaaaatatttgttttaaggttttcacatttttaggttggttacaaaacagtacacgaacatggtcgctgccaatttgttgatttgaggctgatagcctcaggccctaagttctccaaaacttttcccaaaaatatcacatcaaatctttgaacatatatatggagcattaaatatagatgaaaaaactaattgcacagtttacacgtaaatcacgagacgaatcttttgaacctaattaggccatgattagccataagtgctacagtaacccacatgtactaacgacggctaaattaggctcaaaagattcgtgtcgtggtttctaggcgagttatgaaattaatttttttcattcgtgtccgaaaatctcttccgatatccgatcaaacgtccgatgtgacacccaaaaattttcatttcaccagctaaggccttgtttagttaccgaatttttttcccaaaaacgtcacatcaaatctttggacacatgcatggagtattaaatatagataaaataaaaaaaactaattgcacaatttgcatggaaatcacgagacgaatcttttgagcttaattagtccataattagccataagtgctacagtaacccacatgtgctaatgacgaattaattaggcttaataaattcgtctcgctgtttccaggcgagtcatgaaattagtattttaattcgtgtccgaaaacctcttccgacatccggtcaaacatccgatgtaacacccaatttttttttcgcaaactgaaaaaaaggcctaaacaggccctcaaatgaatcaacgagaaggcgagaaggcaacgtgcattcaagaatagtagtgtgaaggcaacgcgagtgttttacccctatgctgttaagaaattaagaaagttgctgcttacctgtgtgccataaaaaaatttggagttacttgtatgccatgagcccaactttcgttgacccgtgtgccattttggatggatggagacataatagatgtgttaggggctgtgtaaagacagctttggccttgtatacaataatgggtttaaaaaaatcaaaaaagtgaaaaataatttagaaaaggcgttaaaaatcaaaaaatggaaaataatttttttaaaaggtaaaaatcagaaaaagtgagaataaattttaaaattttttaaaaatccaggaaaaattaggaaaatgtgggaaaaattaggaaaatgtgggaaaaaaatagaaaatggtggaaaaaaaggaaaaatcagaaataaaatttaaaaaaaggaaaaaacaggtgcatgaacattacatactgacaaataacgacatatcacatagacaaaacaaatgcataaccattgcaccatagcaacaagtgcatatcaaaccatacaagtgcatatcaaaccatacatgaccgttcatccatagtaacaagttcatatcaaactaacaagtttatagcaacaagttcactagttttcatcacactaagtccacacataaaaagtactagttcactagttttcatcacaccaaaccatatatgtcttaaattacatcaaaagtagtagttcctccacataatttattcaagctgaagtttcttcttgcttctagtattagaagctaggctggatgggttggccactttaattggagccctccttggtgtacacttcttgacggcttacttcttccttagtgtgtccactgtctgtggagagacttcataggatgcaatgtcaatatacaagcattcatcatcaacacccacatgctcattggatgggtttgggttagcaagggattcactatctgcagatttagtatgctttagttcaactgattgcccactcccactcccaatttcccactatgaaatgtcaggaggctcactgtccaatccggcgtccatcctacagatgaacaatcccccactgtgaaatgtcagtgatgaatggacatgaaagaatagaggttttacttcgctgcttccacgggctgcttggaggcgaggtgggcacgggaggcgacctggaggcagggtgcgccggcctaaaggcgaggtcacaggagctcgctggccagggcgcgcggcgacctggagccgcactggagccggcttggaggcaggggggcgacgggccgacggggcgagggcgcagggccgcgccagcctgggcgcggcgcggcgacggggcgcgctggcctggacgcgccgcgacggggcgtgccggcctggggcgacggggcgacgggccgacggggcgccgacgaggctaggcggcggcggggtcggcggcgacggctccggcgaggccaggcggcggcgtctagggttagggtgcggctggcgtgcggcaaaaatagggagagagcaggagaggagagagtgagagtatagagctgaaaatagagcagaggcaaattagtcattttgatacatgggttccacatgtcagagatatggaaccgttaagttctaacaaaagttggacggaatagcacatgggtcaacgaaagttaggctcatagtatataggtgactccaaactttgctgtggcacacgggtaagcagtgactttcttaatgccacagggtaaaagacttaggcaacgcgtccgtccggctcccctccccgaggaatctccatttccattctccactccccgccatgggcatcaccaccagagctcgagggaagaggaggaaactgcagggacaccagaccccgccgccgccgccgccgtgcggcgccgcccagatcagcctcctccccgacgacgccctccgcgagatcgtcacccgcctcccatccaacgacgccgctcgcacgcagctgctctcctcccggtggcgccacctctggcgctccgctccgctcaacctcgacctgcgcgacgccggcgacatctcccgcgtcctcgccacccaccctggccccgcccgccgcttcgccgtcccggacctcggctcgtctttccccaacagacgcgccaccttggacgcctggttcgccgcccccgccctcgacaacctccaggagctcgagctcatgggatcctatcgccctctcccgccgtccgccgcccgtctcttccccacccttcgcgtcgccgtcttctcccggtgctccttccccgacgatcccgccgccgccgcattttgtttcccccgcctcgagcagctaaccctcgagtacgtcgccgtctcggaggccaccctgcacggcgtgctcgccgggtgcgccgctctggattgcttgctgttgcgcggcgtgcgcggctgcaggcgtctgtcgatcagctcgcccacgattcgagtcgtcggtgtttgtgtcactcgcgcgttgaaggaactgatcgttgaagacgcgcctcgtcttgaaagattgttgatgcctgaagtctggcaactcctgcgggtctcggtaatttcagcacccaaactggaggcattgggatggctttccaatcactgcacacttgagattggcaccattgcaattaaggtatatgtctgcaaccttatttcttcacacattcagtagacttacaagtacctttggggagtttcagtagacttaccatgctcctgtgttcagtgctccattggggaatttcactttgatagcttgacaacggtggcacgcggtgtgaaggtgttagctctcgatattgataatcttagtctggatatggctattgacttcatgagatgctttccctccttggagaagttgtatatcagggtaattagtcttcatcttgtggactctctagttcacttattttacgttcctttttaatgatatccaaggatgagcctcgttttcgtcttgcagaaatttagtcacaagtgcaacaatgtatggcgccaaaagatgcgccataagatgctagatcctattgagtgccttgacctcaatctgaagaaagtagaagtgtcaggatattgcggcaataagtcccatattgactttgccatgttctttgtattgaatgggagagtgttggagctaatgaggcttgagtgtggaaccaggcgaaacgacagaaagtggattgaaaatcaaaaaatgtgtctcaagctggataatatggtttctaaagatgctgagttccatttcactcgtcgtactagttggaactattttacaaatgtcaggcgtgcccatgagctgttgatagctgatccattttgcacttaaatgatgaacccgggcttattgtctttataggatttgtctagttttgggcactcatcagtttcaagaaattgctcgttcttgttgttttgctacagtatgaatggcttatcaacatggggacgtaatagctagggaggatagctccatgcctccatgtaatcagctgcagcctttaacagagaatgagagaccatgtctgacgcatcatatatatgtaataacattgctcttcaatataaacatctgtcagccttcttgtaacagataaaatctgtgcccaatttcatcatcttatgtaaaatgttgtttgatacatcttcattggtctacacaacactaacatatcagtgtgatgcttaggtgctatacatattaagattagtatgttttgagaatagccaactgcaaaatgtcttggaagttccttgattttacatttggtgatcatgtagaataaacagcaaaatttcttgatcaggccttttaagtgcttttagcattgtgtatgcttctgtttcactaaagaaaatgttttatagttacaacaactgattctagagaacaatcgcatcaagagtgaacaacctagctaaatgtccaatatggtattttgcctatagttgcattcatgacctcatcaagataattgttttgacataatttagataatgttttgtaatcagaaattgcatcgcttcatagcagaagaaaagtcaggtctgaactattggacttgtttgagatgtttataggactcgagacttctagtgtgaaatagaagccatgggtatgctcttgtgacttgtctacctagctcttgattaattaagaacaacaagtactcgtagtaagcattttggaaggtattctttttttgaaacgagtccagccttggttggctttatattaaagtaggagggaaaattggacatgtatggccccaggagaccggtaaggaaaaaagagaactaaaaaggggctgtggaatcccttataggcgtaaactgtacttcacagcaactagcagaagaagtttcataatcctagtctcctggcatgatcctccaggcagagctagcctctccttcccttgaactcagcttaccatgggagcaactcatcttgctagattgggcactagttcctgctcattgatatcaccctttgcccagttggatttgctaaagtctcgtgcatgattccttttctgtcagttggatttggtaatgtttagataacctgaacattaaggagcctgctgatgctaaattgctaatagtactaacagtgttcgataacacagctgtaatgcctcaattttatctttcaattgaactagtgagtctggcctcttttgtctgagattgctcagcttcttcagataatgtaagcttgtttctgcctactatcttaccttcaatttgcttctataattgtttaattgttgattataattcagtttggaaaggatgaggaaattaaatttggtgaaattcacttgacacaagtgttactggcaatgtacagatgatgggacaacagtcatcatctggctaggattgacagaactgctatgcatatatgatacaagatggagcacttctgctggatataacacatcttacaggagttggcttgtacacaggaaaccaattacgtatacaaaatggtgacatgatctaatgttgtaatattttttactccagtttgtggtcagtcagttttgcgaataatgctcacttcacttgggaggttttacatttgacagtgatggtaagtggtcgttgctcctggagcagaggacgtggaggttgaagcagggattggtgggagtgtggcggcttgaacaagagcagcagaggttctccctaacattgattctgttgtttttgttgctcgatgcaactgttgaattttctcctttgtgcacagagttgatcgatgagaaattgtacttcattgaattgaaatgtgggggaactcagcgtcaaaaaaaatgtgggggaactcaaagtctagcgaggacgagtttgggctatcattgcttttaagctgatatatcctctagtactatgatgtatgacttgttgatggcattgtgcgatcaggtatctgttaacttgaatgcatggcctaatgggcttgattgagggtttggtgctatcctgttgtggttctgacccaggaaccctaaccaaattggggatggcatgttctgtggcgatagaggttaggccaactcattgtcatgggactttttgttgccttcatgagaatacagaaaaggagtaatcatgaatgcgtatataatgggcactgccactgtagttctgtgtggctgtgaggtggattttaaaaggtagtttcacattatttttaatatgtagttaactagttatccaactgtgccttaggattttacacaaatgttttgtgacatagcaaaggtttccaaggtctcagcttatcatgggagactggccttaatggttctggactagttccttctgacatatattacccttaaggccttatgttgcattgaaagcatagccttgatcgcgtactgagttttggaaaactatgactgtaattggtgtggcatgttcttcctgagatattcagtaaataactttgcttccatctactttcttacctcaggttgcttttatgtttgtttaattgtaggtagtacttcagtttgggaaacatgatgagattaaatttggtggaagtcccttggcacaagtactgctggcaagagacatgagactaactagggactgctgagtactcctgaacaatgtaaagccatggctgccatacatgatccaagagccaacacttccgcgaaagtgaatatcaggagatgagacatcttactggcgttggcctgtccacaggaagcctactgagtgcacaaaatgatggcatggtgtggcatcgcaaaatttttctaccgagttcagtttgaagtttaaactgttttgcaggaatagctgtctcttgttgcatcggagcctgtcaagctgttgtaaattctcgaggtcgcacattttgtacagtctcctgtaaatgtacatataatgttagatgtaatgagtcctggtaaagtggtacctgacttaaattaaaggaactgcagctctgttagcatgatggttgtgtaatttgatgcaagagaagtaccagggtgccagtggcattgtatgttcgtttaattgtaaatcgtccatgcttttaagttaaaagcattgactgcttcatggtgaatctgaaaattttgtttttggagactgttgtcagttctttaaggattatatccatgctgtgtaaacctgaagaattaccagtaaacctgaagaattactgcatgctggtttgtgtagttcacaatctgctggctctaacagacctgttacttaaaaagtaatcgaacagagaagtactctgtttctgtatgaacaactgcactccgtttctgttagttttgggatatttgtgtctttccaactcaataagagttagcacatcattgaacttgaaaggaagaacttcactggatgtatatcactcaacaagtttgacagagcaatgaattgaatagggaatattttcattgaacagaaatattacttatagcgatgttacttacactgaaatcaaccaatcaacagcaatctcaactaataagagacatatttcgcataggcttattacattcaactcatcaattaatcaattactcataaatacatgccattgcacaactatttgcctctgcactacagtctacaaaccactgaaaatctcttcctacaaggtcatccatataacagctatcttcactcttcagaacgctacttaagtgctgatttcttgctatcattctcctagtccaccggcagatcgaacagctcgtccatggtgaagtcgcggcagctcgtgtcgctcgtgctgaagtcgatgtagctaagcacctcatcaatactctccggaaactcaaaatctgacaatgccatgtcctcgccgtcattgaactcgcagttctggttgtccgccgatggcgccgatgctgcaccaccaccagcaatggcttcctctgcttgcgggacgaacaggtgtggcatgtcgcactcgcgcacaaactgctggtgctcattgtcatcaatcatcccaggaagatcagggagcagcagagaagagtcatcgcccatcacacagaaggagctctgatcggcgacttcagaccaatcctgttggttctgatcgggcagagcagctccagcatcagcgatcaggtcgggaagatcacggaacaccatgtcggtcacaccggaggagctctgatcggtgccatgatccgccgccgccgccgcgggaggaggaacgagcagtggcggtggcggtggcccgacctccagatcgaacagagcagtctccgcctcagcccgccggggcgcgccatgtgctcgaccgtcgtcttccggctctctcttccgcttcttgccgtagccgctgaatcggatgcggtagagccggagcggcgacgaggcgaggtcagccggcgccgtcacggagtactcgtgcatcacccaccccgagctccccctctccccctcggcaaagaagctcaggacatacttgcgccacgcgatctccagtacttcgccgccgccgccgccgtcgtcgccgccggggacgagcagcttcttgccgtcgacgcacatcctctgcccctgccagaaccctccaccctcgacggtgcgcttctggcgcttgcccttggcgttcttggcgtgcgcctccgcgaggaagaaggcttcgtcgccgccccggccgtgatccgcgagaagcctccatggctgcgcgctcaggggatcggcatcgaggacgacgccgtcgagcgggaggggctggccctggaggcgccggagcaggtaccggccgacgagctcgtcgtcgctggggtcgaatctgagccccggagggagcccatccgcgccagccgccgccattggagtctcgatcgcgagcgctcgagaatttctagggtttagggtatcgagagagagagagagagagagagagagagagaggagaggaagcgggcgggtgaatcttcccccacaaggacgggatttgaatttatcgaagaggaggaggggggatgcgtggggtgacgtcagcatgagacagccctgctgcgcgcgcgttgcctcgctcagccgcacgggtagatttttattttgtttttggaaagcttaacgaaataacttgtgttagcaacctgattttggaacctagttttgatttgttttgaaattttagcagaaatttgaactgtcgatcaggggcctcaggctgtgcattcttattgctgctcatggtgattctgaagatgcttcctgcattctttggactttctgacggattctatctttaggataattctaggtgggaagcagagtatacttctgaagacaatcaaactataggggaaaaaccttaatattgttggtgat

SEQ ID NO: 11009 - DNA, 9135 bp, Oryza sativa
caaatggagttctaagatcagatatcagttagatggatcagttattcagttgagacttgagttcgtaaatggattcaaatagctgcacaacgtggactattgcgacacctttagtccggttctcaaacctgctacactgaccctaatgttgtctctagcagcagtttcactgggctgatctttattccaactaggaaggtagcccgcgcagttgcgcgggcactttgtttgatgttgcttaaatttttattacgaactttttataattgtttgtttaagggttctttttttctgaaatgttttttttccaaatccattattgtttaataaacatgttctatttgcacaataaagctcgtgccctctaattagttagctttttgttacatacttattgcagtctaatcatctaagaactaaaaaataatgcaatgcttatgctaatgggtaaacatctaattagttagctttatatgtcaacatttttataaatatgaatcaacttttgtgtaaacatctaatactaaaataggttcctgttgtttatttattcatggattgaggggattcaaaactatgttaaatacatattcttgtagagtccaattctattgtgcagtgtaggagacaacccataagtgtgcgaagctagcgagaacacaattattggatggttaaatattactacaaacatatcattatctggaatgagcttttatatgattgttcccataatttcattttttaataaaatttttagttaaatattaggaattatgtaatcgaaagtaaccaacccacaaatattttgtttagctagcttgcattgggcatgaattagtaacaattagattttataatcgtttatctgaagcctataatgtctatccacttgtcataattatcacatattctatgaagttctaaaagaccctagaaaatatgtgtttcaaatatcagataaattatttgaaagctttttgcatttgtagcatggaatttgtttggtcactatacaatccacttgcaccttctactcaatatgccctatggtgacaaaaagtaaggcctagctggactcaatagcactcctcttatcctctattgatgcactattattatctcattaaaactggtctactcagtgtctccctgctttgcttgctgtctcattctagtttgcgcaagaaaatttttgggttccaaagtctaaacaatacattgtaaattttttctgtctagtagatgacaattgtttggtgataatggttttcttgcacctccaagtcatcatgttgcatggttgtaaaacttgtatatatgctgagacacggaggttaccatacgattcattgtagtagtgtttacagtttcgatcatgtttagttaatctttcttttcatgtctcggtgtatcgtaacacataaatggattcaaaatttaattcttcaagtgaatatgtgcatggtgacatgtttatagaaagttaatgtccatatatatggatgataagatctttttaaaggtttgtgcacagagaaaacatacttttttttcatacccgtaaggtatggaatataagcacatagccaccggcaagtatatatatgtaccatatactaaaatgctattaaataccgtctaataaagtaatttaaatgttacatagaatatattctagagcacttatgtagaagatcgtttggcactcttggattatttgagcacattttagagaattcatgaattcgattgtttcctctaactggcaaaactacatttttcgatcaatcacaaataaagatataaaattataattgttatggtagctagagtcaaaagccgaccttaaccaaatatgtcattctggatatgtattggcagtgaaaacataaagtaaacatcgattgtaccaatatagcccgaggggcattgtatgtatgtacatacgtgcaccatcgcccaacatccacccctctgccctcattcatgccctctccccatgtattgtctctcatgttttcatcatatattaatcatgaaccctaatttattataatcttttaaaataaataactattttttatcgaggacccatattaactatatttgaacttctaaaataaatattgtattttttgttatattctgacttttttcatatcatttaaataattattaaaaatatgaaaaaaccaatgatatataccttacctgttgaaaatatttttggtgaattttctttgcatctatgtataatttaggatttattacaattaaaataccaaccaaataattttgaaaaattccaaatgatttgagaatgttaatcttacacaaattaaaatttaaattggatctacttaaaaacacaactaaattacatggtttgcatttttacatagttcaaactaccgttatatatttgttaagtaatatttgatgccataaagtatatagtttgatgtgattacttttgaaaaattgttgtggagttaattaatacatgtggatgtcatctgccacaatgtattttgtgctaaaatatagcgaatataagacatccatgtaaaatcataataaaataaatgataattacgtatttttattagtaagatgaataatcaaacacatgctcaaaagtcaatagcggaaaaaagtaatataaaaatatttaggggtatcctaggttaaaaaataacagtagggtgaatgggaagaaaaaaaaaggggatgagtacgtactacctgcctacatacatacgtgtgagggagggtggaatatgtacgtcagtacgtgtactgagggagggagggaagagtagatgtacgtgcagggacagaagaggaagggataaactattggttttaatctaatctaatggtgtaaaataatggatccaccagtttaaatgaaaattgagggttagatgtttctcgtctattaaaacgccatgtggcggcttaggagcatttatagggggtgccacgtggcggtttaggagcgtttataggaagtttaatggacttttagtatataataactaggaaggtagcccgcgcgattgcgcggatatgcgtcgtacgttaagactgagatatttataagagcgaaatattaaccggtgaacatctatcacgatttctccataaatttttttcgtcgacattaatttcctttataattttctaacctattagctttctattatatcatatttaagtaatatctataagcaattatttataatcttcttcatcatttgaaaagaaggtagacttttttcttaagaaaacatgtcaatgaaaagtaagtgtaaagtaaaactaaggtatttttctttttttaattgcatatatattatcatgatttattcgaggattaattgggtgggacgtgaagctccactaaatatatgggtttatatagcctaatatgattgatataatttgagagccgatccatctatgaacatttcatgtagagtgggtcagaagctccatgcacaataatattttttaaatgtgatgtaccatgtatagacatatgtttttcttatataagatagatctaactgttaaatataatgattccacatgcttaaaaggcattggagtattccagaaatatagcttaaaaattatggttgttttaatatctaacattattgtgaagtgaacttagctcaactggttatgtttgttgtgatggaatttgcccacttgggttcatgtcctagacttggacaaattctttcagtaataggtaacatacccatcgacagcgagaagtacatagtgacttcgtcaatctcaaaatatgtcatcctagtctctcggaagtactcataggggtatgtgcatgtgtgagttcatagaggtgagtgtgcgtgttgtgagcgcccgcgtttgtattttattttaaaaaaatatcaaacattatttattgtttctcttttaatttaatagataaaacaatagggaggggacgacagtgttgtgtagatgtgagagtgaggaggaggtggagattttgtttttccaatttttataatttttctaaatgatttaagtgaaatcctatgacggggtgtttcattttttctaagaatttttaaggtttatcccttttttaatagggcgtgccccatggtaacttaaaatttttctaaaaaaatagatcaaatagttaaaaataatggatacgtcaatttaattgaattaatttaatctagcacctcgtatgtccagccacgtgtccctcggtgattcgcagtcagtgttagttatgttctttttgtttcttttcgtgggaaaaaaaggttggtggttactccctatgtcaaaataattagagataaatatggacaaattcacatttatccatatcttaactacttaaaaattagtaactttctaatcgtcgtcacaataattttctgtccgtcaatccgaccaagcggcaccctccatccacatacacgcaattacatcccttacgatgcccaaagaaaaaaatggagtttgattcaaaataagctaacatttctcacctattttgaccggaaattataaaatatttcctccggtgtcctatagccaattacacaattttcgtagtgtccatcagccatgtcacgtttttacggtgtctcccaaccaaatacacgttttttgggtgtcctgtatgaaattttgcctttttcttataattataggacatattatatggtgatttatgagcgctctagtgggctttaattgatttttgttacatatagtgatttagcataacataatacatatgttcgattaatttttcttatttagttgccatccaaacgatagggtctaccatcaaatgatgtattttaactttttatagtaaaatatagctaatgttatcttgatttatttatttaattataaataaaataatagttatattatgttagttaaaaaaataagaggacataattgaattggagaggagatgatgggtgagccagaggtatacgtaaggtaggaggaagggaggagattattgtttttaacatagattgaatgggtcctagttttgagttatctatttttataaacacatataatcttagatctattagaaaatactttgtgtgttgtactttttaattaaacaacttaaattgtttaaagttgttctaatttaagtgtatgttattaatcataaggtttaaaaatctatatatttttcttaaaaatgtatggatcagtgaaaaacaatagttattagaataatatgacccagagtaatgatttttttaataatatagttaacttggatcttcaattttatgttttatagtaaataatctaatggtgtgcaccaataaaaagctagctatatgatttagataatataattgtctaaaattgtttatcctaaaatattttttccatctaacagaaagtggaaaataggatagaaaggaaataggtggagaggtacgtacacacaatgagtccaccgtatattagtgaaaatcgacagccggatgttttgtttattctcgtaatttttgtgatttttttaatttattaaaataccacgtggtggtgtaggagcgtttggtggtgtaggagcatttgtagaagtactacgttgtgttttaatagcgtttatatgatatttaatggacaaagctctaaatatgcttcaatgtgataatttttaaattaaaatatagttaatatcaaatgtagtcgtaatattttcccacatacatctatttattatttagataaatttattagaggacgggtgaatgttgatattatgtataaagatttgaggagtgaaggacggtgcgtagtttgtacaaacttgggagaatattttttctcaatccagtgaacagtagtacgtattttacatttgagattttttttcacttttttgggtgaaccgtacatatgtacgtgtcactcgtaacaattaggtgggaccgtggcagggctaaaccttatttttttcaattgtaattacagttttttttttctttttttcagtgagtagcaaagtacagaagtacgtatatatacgtgtaactattcacgtgattttttattcgagcaggttacgtgggatgtattttaaataaatctaatctaatagtttaaaaatagtgggtccaccaataaaaatgattggatgtttttttctcacaatttacaaggttttctctaatttattagaacaccacgtggtggcgtagaagcattcgtaggagtgctacacgactatttagaagcgtttgtatcaagtttaataggtctctaatgttacctattgcatgtcgacccgatgtgtcatgatgtatttagtaccacaacattacttttatacaccgatactatatataattaaaagaatacaatcgatcataaattgggcatataattaaaaataatttaaaagataatgtttagagaccgttcatatgatatttgatatttatattatagatcatatacttccgtatattatgtagtattatattttatattatacaaaatactattttagaccgtcattttttccaacagtactaactacacatttttttttggctttatcattttttatcgtacacagatgtttttattcttccgcctaaccgtaggaagctttatttgtttttttcaattatacttgcgtatggacattttctttccttttcccagccaccagttgcatattttttttaagaaaaactatcaatttttttaataatagatctaatctaatggtctaaattaacgggttcaccaatttaagtgaaaatcaacggtgagattagatagtgccacgtggcggcctaggagtgtttgtaggagcgccacgtggaggtttaggagcgtttgtagaaagtttaatggacttttagtatataatagatagatagatagatagatttgatgtaaaattttctatgcacggtgaacttcatctagatttaaatatgcaaaagagaacctcatgtgttctttgatcctgctcactcaatacgtatctggaagctagataaggtgttgtatggaattaaccaagcgccacgtgtgtggtactatgaagtatgaactatataaactgagtattaagttgcaggagttggggtttacagtttacaccattcaaaagtgatatttttcaatttatcttccatcaatctggtgtcatcatttacatctttgtctatgtggatgatgctactattgctagttcagctgcaaaatctgacactggaggactgattcagtaaattacagccaagtttgcaatcaaggtcacaggggagctgtcatattttctgggtattgaagcaaataagcaacctggagatggagtgaatctgacacgacagaatcaatttcaatttgccaaaccgaatgctaatcctactatcctatgtcatgttcagacaaattagctctgcattgcggaccttttggcttctgactttcaggagctgagatgagatgttaaaatactctgaaatactcggttaataaagtgcttcagaattcacaagttcatactgtggtcagctgtaaaactgattttgccgatctcagagattacagcgttctctgaaatttaagcccagtagtgtgacttggacccaacatgatttcctgttgtcccacaaaaaccgaacagtcccacgatcgaatacagtctgattataaatgcttgacgaatgcagaaaaaagaactggttttgtctgaaagtaaaatatggacacttttttttttctgaaatgaactatgggcacaaacacagtcggtagttttgggcatattccttttcgattcttctcctgcaaagcatttttgcaactgtttttcattttgtacttttcagctgataccttaacaatgtgcaactacaacattttggtgattggtttgcagccaccgccttaatattgtcctgtgttttagctgctattttattggcttatgtgaggcactaaaattcagatgtttgacacccagcatctgcttgggccgaaccttgcaaacagcagcaaatatccagcccaccagcccatgagcccatctccctcgttagctccttcccccaatttcgcctggatttttttagattggtaatttcgcctggattttttttagaccggtaatttcgcctggattagcgggagtagttttcggatcagaaactttttgaagttttgaaatttgaaatccaccgcctaatttccatttcccacgaggaagcaactacttatgcggttatgccgagaaatccgcgggggacgccacgatcagttgatcaccatttccaccgatcaccaccagagcgaggaggagacgatggagccgaatcggcggcggcgcaagacggaggaggcggagatctccgccgccgaccgcttcgccgcgctgccggacggcgtcctcgcccggatcgtctccatgctcccttactgggacgtcatccagctctccgcggtgtgcgcctcgtggcgccgcctccgcctccaccgcgccgcgcccgtcgtcaacatcgacctccgcgagttcgtgctgttcggcgccttcctccccgggtacgtcgtgctcggccaccgcgccgcgctccaccggatgcgccgccccgtggacaagctcaggctgacctacttcgccgccgaccgctgcatgaacgaggaggccaacgccatcatcagggccgtcgccgcgcgcgagatccgcatcaccatctgccacggccccggcggcgctcgcgctgcccgcgcgcgccgcctggacgagtgggacgtcgacgtgccctcgacggcgacggatctagacgtccgcgggtctggctaccgcgcgccggccgtctacgccgactgccttcgggtgctcaccctctatcacctggagctccacgacgcgccgcgcctcccgtccctccgttcgctgacgctccagagcgtcctcgtcgccgcggccgtgccgttcgccccgggcaagtggtgcccgcagctggagagcctggagatggagagctgcacggtggagtaccggcaggtggacatccgcctccagctgctcaagctgctcgtcatggacgacgtcagcgtcgg

SEQ ID NO: 11010 - DNA, 43015 bp, Oryza sativa
accgtgatggacgacggcgagatgatcccggaggagaggctcacctgcgaccttcgacgcctcatctcgtcgcgccacgtctgatttctgccgtgatcgccggatcgatatccacgaacatatgatagtattttcgtctgatttcttacctgatctgctgtcatatacctgatcaacctatttgctgtcgtttggatcttgaaagaaatatttattgtctggttgtccgaaatgtttgattctttctcctgcaaaatgaatgctatatggttctttaatccttttgtttgaataggcatgttcaattcatcttttacaacaagtttgttgatgatcttggtttatttttaccctgaagattctggttggtttctgttgctctgataatcctagaaaatataaggctgtgccatgataatccttctgctttttgtgcaaacaatttcagaactacaataattaagtgaatcacaccttccaagagcgaacattcttcttgtaattactaattacccagttaccactgatagccaaatcagcagccaacataatccatcccaaaaccaaaatgtttagcaaagacattgatgttatcttacagacaggtatagggatgagatcacaattatgaaattactgggaatgttagataaatgttcttagaaagataagaatacggtttcaaattttttgcagactcaaccctcatccatttcagcggaagataagaattgcaattttttttggtgatacgggaaatttggaaggaatgaaatgctatgatcccagggcagagattagtactaccaggtaggcaaataccaacacagcaacatcccagcctttagtcctaagagaaagagttttcccttcttaatggatttgttaacttctccattgtttcagtcttttttaatcaaggatattattactaccacccagtttgctaactgagatatttgtggtgacattcccatgagcaaaactctttttagtacattgtaggaattagtgacatgatcaatcacagaatcacggcctatcaactgatacaagattattattaaaaacccaatgattattcatggcattatgatggaaatagatcctcagacgtaacgtcctccctgacgtggtcagggacatataggcctcaccgccctcaggcccacatgccactgaccacacgttatggctttacgttagagcatcccaatatcatagtcctagcatcaagtttttagaattcagaatgacaccatgtatcgcacaagcctatcaatggcagcattagaagctccatcatcctccacgctcttgcttgccttcgccttgagaccacgcgccttgtccctcatggccgcgccttcttccccaaccatcagcttcctcaccgcctcggccacgcggtcccggtcgaacacctcgccgagctccagtccgacgccccactggtgcgtcacgtacctcgcgttcaccgtctggtcgccgaagcatggctgcgcgagcatgggcaccccttcgcagatgctatccagcgtcgagttccacccgcagtgcgtccagaacccgccgatcgccgggtgcgccagccgccaggacgtctctctgtggcgcccatgtcaccacctttcccatgccgttgtccacgacggcggtgagtggttcagtcagaggcagggcgtcggagacgatgccggtgacgaagcctgggcggatgacccagaggaatgggacgccactgccggcgagcccaagggccatttcgtcgaacacctcgcggtcgatgcgcgccacgctgccgaggctcacgtacagcacggaccgcggcgagtgcgcgtgcagccacgcaacgcagccgctgtccggcgcgtgcaggccgtgctcctccggcgcgccgagcagcctgtgcatcggcccgatggcgaacgccgggatcctcggcaggtggcgccggatgttccgcagcaccggcttctcgatggcgcggaaggtgttgatcacgaagcccatcgcggccgtccgcatggcgttgtcgacgcgggcgatgaactcgcgcacccgctccgcgtcgccgccgtcgacgcggatcaggtcgcgcccgcgcagcggctcgaccggcggcaacacctcgtcgcggctctcctctgcagccaagaatcagacgcgatgagcactgctgcaagaatcgccatgaacacgatctcataccggaaacaacttgcctttgatcgggaggtagccggagtagcggaggcgcgagtagctgagcatgcagtggagcgcggcggcgttgtcggtgcggagcgcgagcgcggcgacgccgacctccgccgcggcggtgagcgccgcgtaccagtaccactgcccgtcgaccaccgcgcacgccacctcgctccacccccccccccccccccgacccgcaccacccgccggagcgcctcgcggaacggcgcctcgcaggcggcgttgagcgccagcatctgctcgaccaggtcggtgccggggtcggtggcggcgtcggggaggcgctcgtggatgggcacgaagatgagctccgggtggcgcgcggcgtcgggggcgttgaaggtggtgcggacgacggtgacggcgaggccgcggccgcggaggagctcggcgagctggagcatcggggcgatgtggctgcggaacgggaacgggaacatcacgacgcggcggcagtggcggcgagctccggtcatggctggcaacggcggcgagctctagctggggtgagatcgtcgaggacgacggcaaggttggcgcggtttatatatggtggcgaggtcgcgcatgggcgggggtacgtggacgtgcaaatgaaagtgtgagactgctcctttgcttgctgtattttcttactcagtatgacgcgaggcagggctaatgtgtgttatccattgctagcattaataattatccttttgacatagaaaatctgctttgtgatctatacgtatactaagttgatatctcgtgctttgatgcggaatatgtggatgaatacattgctatatattatagaaatgatagatgtatgtgtttaaataatgtgaaaatgatatgaagataatgatttaacattgcttgcatattgagttctaaaaatgcaacaaaattataaatggtatgtcacattaatttgcatgatatttaaagtactctcgataataatttctagtgggtcattatgtgacactcttgcatgtgatttaaaataccctacataataattgctagtgggtgatgatgtgacacacttgtatattgtgcttagtacttagtgggtattaactttacaggaagataggatatggtttttaaacaaaataggaagttcggtcgtgataggcatctcatttattatttagtctctccgtccccatatataaggaatattgaacggatgtgacgtttcctagtactataaatctggacagggagcatgtccagatttataatactagaaagtgtcacatttatccaagaccccttatattttggaacagagggagtactagcaaaatgccccttattgcaatgggtgtgtaggacctgtggtaaccattttaaaggtaaactctcacttttattttatacttagtaatatgataatgcattataacaagagaaagcaattttaattgtatgtacgctgaaaaaataaaattggtatgggaagagaacatctcaaactccctggggagatgagcaagcaagcgtgctaaggttcaaagcacaagtttcaggtgttaattaaaggagtaacttacattatacacagcgaaatttatgtgaacaagatgaatacaagctgggagaagaattacacgtcattgacactcatgtagcagtacgtgttgaatgtgttagtcgtcaagttaaatcttggcaggaacatctacgaattagcaaggtctaaccaggaatgtgttgtttgaagaatacaagcgaacgttcaagcgaacctgcaggctagaccttgctatttccaagtacatcttcgcagaagaatgcttgcttggagtacctcgtcggcagctacaacattagccgggacatcatcgaggtcgagcagcttggactcttggagtacaccccagccgcagctgcgggtccatccacatgaacagtagaaggctcaggaacccatctcgctgaacgccgctgtcggcagccgaatcggctggctcggcaaacgctaatgcgcacatgaataaccgccagggagctgcgagctccttgatgccacgcttgatccgttcgatcaacaagggcttggattttagctggatgaaaaccaaaatggatatgcagaagcgcgtgcttaggactcaaaataatgtgacttagtcccaaggtaaaaagtgaagaatgctgaatagagctgaagctgcatgattatgtcctagggtgcttatgaaacctttttctagtccaatccccataaacattggcaagaacatcgaaagacccagctgcacaatagactgagaacccatagccacttgaagtgcacgattccctcccatccgtgcttgcttcataattgcaaactcaagtccatttaatgctaagtaaagtcttccgtccaagaaaactagggtttagtggcgggcctcgtgtggacgatgcattgaagcagagcacacgcagagctcccaagaattggacaaagctaatacatggaacggacgtaccaaaattctaacagaaatatttttaatttttatgatagtagtgataaagaaaatgctttaaagaaagttgatcttgtcaaatttgctttgaaggtcacttataatcgtataaaacaaaaagaagaaatctatgttgtgaaatagataataaactccgattaaatggtaagaatgtctcttatattgcatctatctaggccatccatcctgtaatcggtggatgcatacattgacccccaccaaaatactccctccatttttctttatttaaactaaccaatatcaaataaaaaacagagggagtaattaattagcagctaacaaactaaaagaatctggtgtctccgggaaaaaaaattcaacaaatatgcaaagccgcgggaacaaaatgaaacacgccgctccctcgcttttccggaccaatatcaaagaagatgaatctacatctcatgtacatttatccagaaacaagaaggaaacaaccaggaaaaaaaaagtcctcaattgtatcaaacaagcgagcgatgcaggcaaacttccatctctgtattgttttatagctcaccaaccaaaaaatgacagcagccaacagatgccgcctttctgcaagctgaaagtactgatacaggttggaatgtatctcaaacattatgtgttggtcaagcagactcatgtcaaagatacaaatgggaggaactgacaattttctcctctcattgtgctcaataatttgccgaactaccatgccaaaaaaggaagacaatgatgttctactaccaataagagcaattgcatctctaagctcacatttgaggctgatttccaaggagctgtccaactaaattagtcacctgaaaaggtatttcaggaagaacaatgagaaattaacttaaccggattgaaagcaaaactaaccacaatacttctaatctgttagaatgatgatgattatgcttactaaaaaagaaactgaaaagaaccacaagaatattactcggaattaatttatggtcatgtttgtttatatgaagggaaagagtgcagatcaatataactaaatggagaactatgcaattacaaagctgtatacactataggggtgaggagcagccttccttgcactgtagaaacaggaggaaacaatcagagaaaattttcaattgattccagaacaaatcagccatcaagtatttcctatggaaagcagattggctggtcctttatgtaaacagtaagcttctttgaacagagagagctacaccttccaaagccaacagttaacaatcatcttaaggaggttcatttttcacaattatttcttcactacaacaggctgaatctacttcaggaagctaaatgggaagtaaatattaacagtccagaaaactgaataaacttgcctgccaatacttcgaagcacatcgatcaatgcagctattctcacccatatttagttcagcttctttatgcctagagataacagaagttgcataagtccaaataatcgcatgtagctcatcagttcatgtgctaaaagcatggctatgaactccatatgtacagagatgtcgtattgtatgccatttttagtattgagccttgaccatttaactcatgattatttttccatcacaaaagggtttacagaacagcaaaacactaccttgactaaacaaatctaattcaacttttgtgaattacagcgtcatgggtgaaaagaaatgaaggttgaagtcactaatagtaaaaacagaggaccctgaaatacaaaggcaaaccccatatgttaccttttctcaatgcacttgctgaaacatgtttgtgtaagcctgcataaagtgaaacaagggtagacaatcaggaaactgccaggtttaggttaattgctttagcatactactgtaataaacttgaaggatgcaaaaataaagggcgaacattttgatttaagattaaagaacagtcacactaaattatatgctacatgatatctcagtatacatttagataactccatgccgaagaacaacctgaactctctgatagctaaaggtagaactaatcaaataaaaagaagacgttacttcactaggtcactcaccgattgaaaagatccaccctatattccatctctttctctgccaatccaaacatctattcagacacaaagaggaaaaatattattaatctttagtcaaagaggttataattatcaggaaagccttagtcacaaactcataataacaaaggtcaaagtataaactgaatgacattacatacaagaactatcaaagaaaatgataggacaaaagactatctgacaaaccaacagttccaaatactgcaaattagactggataagtaaattgtaagacgcatagtggtggtctttcttagccatggcaacatagaatctgaaaactatatttcaaacaacaaatagagtaacatacaacagtataaacaccaacagtttgaaaaatacaaacatttgatttaaactttcttttaactagtacgatgttaggtaccactaggactggaaagaattttcagcttcagtgtatgctactccaaggaaaaatggtagcaaaagtgaaaaaaaaaagagagaaaaacatatattccctctttttttatatatgacattggttagtttaattttgaaccaaccaacatcatacatgaataagaagggagtactaatattttgtcttgatatatgtacatctcaagactcattcaagtttctgtgggtcaaatgaagtgaattatcctaatgctttacaaacaaatattatacacaatttcctagcttcctatttattttaaaatcactctagctcctatataaacttgttaatttcaccttacctagcttcctatttattttaaaatcgctgcctcgctgactggtatattctttttatgtatattgttcgtttatcactgttaaagaggatgttcaagctgtccttgcctcctgctaacccgactacagaaacaccataaaaaaatgtagaacagatccatgcatacatctggatggcagatcttattaacgcaaacgattctcagaagggcaaggtgcagccataacttgcacaaatctgcccaattttcaagattgttgggatcacaacaaaatcagcaagtttcagtttccctctaatcacatccagagcttcagcgtcagtgtaattaaaaaagcaggaaaatcacttgtgacaaagtagttcgaaaactgttactgatatcaccatacaaactgatacgcgaaatcagatgaaccaacacagacctgctccttctgcatattcacctgctccttctgcacattcaccggctgacctttcgcggccatcgctgcagctcacttcatgaaaacaaaatataccactcagcgaggcagcaatggattaatccagcaagaaaacatcgcagagagggggggaaacagtacaagatcccccgggggtcaaagaaaggcagggatccgaactcacctcagcaaactagaccaagaacgaatcggggaaacgggggcgggggtccgacgcgccgacacgacggcgatcgcggcaggacaaggctagggttttcgtggcttgtctgatcgattggagatttggaggcgaggaggtgttttgcgatttcggagcttgaggatggtcgatctgcaggtgggcccgcctgcaaacgtggtttggaagccctgtttggcctggtttgaaatagcttacggctgtaggcaaaagataattaggagtttagattaaggaattgatggtgagattaatatgggaatttgattttttaagttttaatctagtattatttagtacagatggtgggaattgatagtgagtttaattcaagattagatcttaaatgaaaatagatggtttcggatttatttaggcaaaataaggaggaatttcctcccattaccatccctataaaggaagttactccctcaattccttatccttattcatcaaaactccaatgtctttcaaccaaacagaacaatggcacatccctctaaactcctaatccctcttaaaactcccgccaaccaaacgacccgttagggctagtggttttgtgtttaaaatttgagggattcttaaataaatccctactttttttttgcattttaattagtcttcaggcatcgtcaaaaaatacagttgttttacatgatatttttagaggtgttttataggaattttagtgtacttcttcaaggaaacaattcaattctcccatggattgcagaatggtccgaacatgggatttactattgagtaaatatcatgattttgtcaactaaaaacatatataacttttgtcaggacaaccgacagttttagaaaagaaaatgatcagagtataatattctaaagtgtgagcttatctactttcccattagccataaggtttcttgggtatacacgtgaagagaaaatgcttgtccatcttattattggtgtcttcctattacttcctccatcccaaactgaatgttttaagatttctcagcacctctatttatttgattcagttgctatttcagtactccctccatcccacaatataagggattttgagtttttgtttgtaacgtttgaccactcgtcttattcaatttttttttgcaaatataaaaaacgaaaagttatgcttaaagtactgtagataataaagtaagtcacaaataaaataaataatcatttcaaaaaaatttgaataagacgagtggtcaaacgttgcaagaaaaactcaaaatcccttatattatgggacggagggagggaataggacatgcacttcaaaaggttccagggaatatttcatgattgcaattaagtaatgaatcattctacaacaatcattagcatattcaaacatttgaattaacctatggagggtgcttttgacgccagggagtgcccctctattttatataaatcctgaaggaaccatcttatttcattctcttcatcaacctataatctaactcaacaacacacatattaaaatggttagagatcttaatttaccatcagaagatgaaagaaatgaagaagctttccctgacctcaatggaggagaagctgatatggacgaaaatagaagaccagttgttgcctaaggagatataaccttgttcaagttgagcaccatgaacatgaacaagctgtaattttttatctcaacttacatccttttgatcttaactttaaggctacataagaaaaagaacaaatgcatcaaggtaaattactttgctttaaggctttatttttcaagtcaaacagcttggagttggggacgtcaccacttccttgtcctcaaagtcaagcgtgaagccggtgtcagggggcagctcggagtcggggacaccaccaattggcctcgtcctcggagttagggatgaagcagtcgtcggtaggaggagggggcggggggagggggggtagctcggtgttgaggatgccaccatgtgcctcatccttggagtcaagaacgaagccatcattgggatgccgctccatgccgaagatgtagccacctgcatgttgctcctcaatgaggaagtagaccttgttggtgccgagcaccccaccaccacgtcgcatgcctcatccacgccttccttaattcatttgtctattgtgagtcgacatccgcttccgccgcacttcacttgcgtgtggcccttctgggcagctgagccgtgacctctgcgaccgtgacgagcggtgaatcgtcacgtgtccgctgctccattgcacatgccgatagtggagaggagaggagaggcaagctaaggatactagggattagggatcggggatcggggtaggggtgactcaaggtattgagcgacatgagagtgaggaaacgctcaatagggaaaaaaattagaaacatcgagtagtcttgaatgagttaacggaaatagactgatctcacttctctaattaagttgctaaaatgatttttttctaagacctcactggatagtagtatctagtttttttttgtgatgcaagacatatgtatcgtcattatattgcatgttaccgcactcttactttcctttaccttcctctctgtcacgaccggaattaacccaacgggcattccatacgtgtgtgtattgttctttgtcccaggaggcaaggtacaccaaaagttgatacaattcagagtttaacaagcggaagcataaatagttaatttattacatgggcgacaaaggcccagcacacacgaagataaacggaaaacagcggaagactagggcgacgaccacaggcacttaacggcaggcacgagctaaacaccaaagccttcatcctccaagaactcctcttctgggttgggggaaaaattgagcaagattgagtacaaccaccgtactcagcaagacacacccacaaatgcagattaaatgcaaaggagtacaagggttataatataggggtaggatttgcagtaaacagcatttaaaggtcatttagttgcccaaagctattttataaagacgatcctagagctacactgtgttattactcaaggccgtgaacccacacgaacctgccttaacccaaggcctatgatgattcagaccgaactggcaaccagacccaggtctcagctcgttccaaaccaacccaggccaaccattcaacatttttgttgttaagcaggttttaagaaataaaccactaacttgggtacattgctaggcttgcccataaccgagggcgtggctattcgaatagattatactccgatcagaggtgtacatctttacccacaagacacatcttcctcacgtgtaaccacgtgccacataccaccacggcatacggacgaaagacgtgacatagttcccaacccatcctagcaataaacaagagtaccgacccaaccctggctacggccggaatcctgagacaggtaaccaaggttgagcccctagcagcaggacaccagccctgtgccatgacatctcgactaccgggccgcagctcatgtagccttcatttgccctagagatgtccatcgagccctgacgtcatccatctctatccgtgtactttttcccatgaccagactgagccacaaactacgccttacccactagacatgtggaagtacggtagtgctttgcaaccgaggcccgaagaccagtccttatagtggccgaggtgctactagcaaaaccatgcacctcgagcccagcctaaaaccattttgggggttttgaaaggaggagaaggggtgtgtccatttccacataatccaaccattccataatgtccaaatgatatgagcattcccaaagtctaaggttataaaaccacctaatgttgcctaattaatcagcgaagcagctagctaaattcatactagtggaaccatgaatagagtacccactagttggggttttgtttatcctagggtgaacaaggtaataataacaatagcaataataataaggtcataacaaaggtaaatagtcatggctaaataaaacagtgataacacgggaatttaaataaagcgataatgtagtaatttaaaccaaaatagttttataaactggaattcaatatgctcaaggatgatgtgacttgccttgctcgctttcaaaaacgtcggcttcaacatccacgtagagcggatcttccgaagctgcagcgtctacacgaccaatgagaagaaaaaaggcttttattctaataaactccatataacaagcagaaacatagcacagaaatgggttcttgacttaaggaaaaattagagacttgaacggtccaatttcgagttcaaacgaccaagttatggccatttgaagattatatgctctttaggtgaatatttacaatttccttcaattacttttgaatttaaaacgattattgcgccagtcgaggggaggcgtgcgtgcggaccgggtccacgagagtggtgggccccacgcggcagcccctcggtccacgggcggctgatggccgggccacatggcgcgcccggacgcggccacgtcgtcgcggccggcaggaggcggcgtccgcgccccgatggtcgccgccggcaaccactggcgcggcggagcggtggccgagagaggggagggaagggggaaaggaggcggcactccacggctcaccccgaggcgacggcggcgacggaggaggcggccggagcggagggaggcggtggcgcggctcgggttgacggggtcggcggcattccggcggtcggcgaccgaaatagaggggtggacgatgtcggcgaggtcgcggcgaaaccgaaggaggcagcgccgaggtgggaggtggtccggggcgacgacggcggcggaccggagctcggcggcgacggcggagagagagagcgacgacgcgagctcgattccggcggggagaaggggcggcgagtagcggaaacggtggtggggagctcggggagggtaatatagggttgggagtgagagagggcggccggaggggaaggaaaccggagcgggagacccagccgccattaatggcgccggcgagattaggggggcttccatccgaaataacgagagagagagagaggggaaaaatggggggaaagggagagggaatcaggggggaatatttccccccttcaattttgaacgggagcggcggagcgcggcagatttggcgacggcggcggcgctaggcgcggggggagggaggccgagtgggccacggggagaggagagagagggagggaattgggccgaattcggcccaagagagagggggagggttttagggttttctttttataaaaccttttcaactttgtttatttcttgataattattatttgtgctctgaaaattccactaaaatttatttacacatttttaggcttttaggaaatttaaaaaaaatcctccaagccttatttgacttttaactttgcacattttaatttttggaggttttcactaggattttaattattctaggtataatttaaagaatatattttagggtcgttttgggacgtgacactctcctgctcacttccaacttctctcccaaatttaaacatgtgcatcagcacactaatttattttccaacagtttgcaaaaaaaaatcaataggcagtaccaccaatttatatcgttcttataaatatcatacaatatttcaattcgacatcaatacatattccatcatttacctatttaccccccgcaatactaaaaaatctgatccatctcaaggaagaaccagatcatggtgatgccaatagaggaatggtaaggccatcccaacccgaaaactatctattaatttccatacttaccatgtcatatagtcactatgtatagaaactatatctccaatggatggtatcttcaaattaaattttcatccaatcatctctcaaatctcctttaatccacatatcccctgttgtcatttttggttcttttgtacatatggtttcttgcatgagaaatggtttcatcatctttttacccctctcatcattaattcttttgccacatcatatatttttttttcttatgtgacaatgtatttaatattatggacactagataacatgcagggttgaggatggtctaagagcaagtttaatagtatagcccactactagctccaaatcttctatagccaatgtaatagtcaattcatacaatagttgcttaatatattagtaatagttggtcccacatgtcatacacatattacgtcttggaatccgtgctgtagctggctacaaatctatagctcactgctcttctctctcttcttttatctctttaaaatatgattataactggcttatagcttgttattgtacctgctctactaaggttcctttctaatgctctttttgccattagaaaccatcgttttgcatgcagaaaagtggcaacgactacgtggcaataatcaatttctaatcattaggtatctgtgtctgtgccgacgtgctcacgtacccagtcatgtggataagccgtttgtggccgcctcaaccctcctgaccctctcaagacccacgagagctcaaaacgcaccacaaaaaaaagaagtgaccgtgcacacgcccacgcttcacaggcgcacacacatcacgtaggcacacaaaagctagcgatggcgtcggttggtttcggcaccacggtggcgccggcggtggccgccgggagacgcctgagccaccgtcgggcggcggcgccgccgccgccgtccgcacgcgtggcgcggccgtcggcgacgaagagcgtcacggcggcggcggcgacggaggagaagggcctcttcgacgccatcttcggcgcgctgtacaaggaggagcagctgctggagaccgaccccatcctcaacaaggtcgaggagaaggcccccgccgccgcgtccagggccaccaaggccagcggcgctccggccaagaaggcggccggcgacggcgacggcgacggcgggttcagctttggcgggctcttctccaagaaagagtagacgccgaactcatatctgctactgtctgaagaagaaagctccatgacttgattctgataatctgatttaagggctcgcaaacatacataccactttgttgattctgatccatgatgcgattacttctctacttctcatgtgatatgtttcatcaatcaaagagtagtacagtatttatttcgatctcttgataattcacaaatataaatatacatcagaggaagttaattcatggataagcaacagtcagtgattttttgcggtacaagataaaccctacaacgtgacagaaatgtacttcttctacaagtaattattattactcaatgtaatcacatttaactcacaacagattataccctctcgcttctacatgcatatacaattaccgacatgaaatatttctaagtattatatatatcctgtattcatgtgcatggcagaagttcttgatatattgcttttgacgcttacgaaagaaccaaaacgttcttgccatgccgatgcaggtgatatatccctcagttcctagcctcattcataagctggcaacctttgcactgtattaagtttatttgctgcatcgacgttgaaggtcgaactcagatccccttatgagtttcaaagatgtacttcaaatgcaacaaaccagaagggattgatatctgcaagtagcaagatttgtatttaaaagcaatagatgatgctacacatccagtaagttggtaatggatcctgacaaagtcctgtacatactacaatgacaaaaactatttggtaacttaattttaatgtctttctttgttcatgcacagactaaaaaaagaaaaggccaaccccgagaagttaacaaaaactcagtcatgattgaagttggaaatccatgtaataaccataaacacacctcctctcacaaaaagaaaaaaaaccataaacacacctcggatcaactaattttatgaaagttgatgtttggacattctagatctgagagctacaaataaactcgtgctcatgccatatctcacggtactacagatccagatatgaccgacatatcagacctaagttctgagttatttgaaattttgaacagtcatccaagtcatagtatctaaattccatgtcacaccaaataccgtgaaattgtttttgggacaataaatctactatgcagtgtgtgggaggttattgagaatatggtagctgtcgttaaactcctatcaaaagaatatgttactgtcctcacaaaggagtcataaacaagataaagaaactttctagaatgaacatccacaatatctatgctaagcttagtggcagaacttttctattataagccatgtaacatgtatatggagtagttggacatctataatatccttccagctatcaatatcaaaatgattatgcatcttgttagtttgcagaagaaaataccgtaccacataggcaattcaggtgttgtaaacaataaacagctttggaatttttttttgtttattgtgtgcgtatatattcttgtttattgataccaacatttacgaggagcatttcttgtctaccaaacttcagaatggtgcgcttttgtccaatcgaactgatatttttataatcctaattgaataaagcatttggagaaactcacctgcaaatatttcctttggtgattctctagataactgtaccatctggaatcaccgcatttttaagcactaccgttatcccagaacgaatgtagaaaccctctaatggtctctctgcttcttgcacattctgcattcacacaagcaagggaaaactcttaggtctcagcatttgaactgtaaacttaatgactaaagaaaaactgcatatatatttaatagcatagacaagcaagttgcaaaagctgctacgatgaactatgtgcaatgaaggccaaataggttgaaagagcgctttagtagattgaatgaattttcctcccaccattcttatctaaggagatatgaggctttttttttctctaagtagacattaacactaatacatactttgctacctttccaaaaagtgcattttttccttgctcctgcgatacatacttgttacaaatttcgaattccataaaaccaacatgctcaatgaagtgaatgaatttaatggagtcatcttatcttcactaaacggttgtggaaatgagcttgcaaatgttataaagatcattgcaaagaagaatccagaaggctctcctagacaatgatactaagaaatagtcttatgcatgggggtcatacctgtgagttcataatcattacattctttccaattcgagcattcttgtcgatgatacagttcctgtatgtcaaaacttagcattacataacaggcaagttaccaaatacatatatgcatcattgctcatactgaccttattatggtgttttctccaacgccaactggtacttttccatcagacaattcagaaaatctctcagcttcagtctgatagtaatctgcccccatcatcatggtgtcctatacccagttgattttctttttgttaacgatattgaaataattaaacatccattgttcaataaaaatgaaaaaaaaaatccattagaccattaccaacatgtagggtacttagtgattgcttcagcataagttggtatgactaaatgtactttctgtggtttaaaaactatgtgcaaatctttcatggttaagggcataaatgccaacaaaactaggggaaaaaactcgcatggcatcaataggacatggcgagactgcagtaaatgcaggtattgaagaaaaaaagagaacactgtgatcaagggaaaataaatggaacttgcaacctgtttcctgtggttctaataatgttaatgataatagaagctaaaataaatggattgtatccaaatggccaaaatattagaaaaaagactaatttatctctggtttatctagcattgggatttgggaaacagtattttctctttaaatacaatttccgaagattgttcgtgcaggcttagttcctaagattctgtattggtatgctttcatccatctctgcctcaattatttgaatggcaaacttatgagttccaaataactgtcaagtacattgaattatgagtattcaacaattcaccttcagctgcacccccggttctaatcttgaacggacaccaataacagagcgatcaacactacattctgttagaaagcacccatgggaaactatagagttcagaacctgcacgtaaatggttagatcaaaaaaagctgctactgaaggtataaccaaagaaaccatctctaagagaatctgaccttgcagttttctactttcgttggaggtaaaaatctaggagatgtgaatatgggcttcacaggatcataaaaatagaagtttggcgactacaaagaagataactgaatttagataaattgtccacgcacataaagatatagatggagatgatgttaactaaaaaagtaaacctgatctgtgagagcaagatttgcctcaaagaatgactttattgtcccaatatcttcccagtaaccatcaaatagataggcctgtcaccacagaacaaggaatattgcattcatattcagggttttgtgaaaagtaagatcacatgctcattttgggatttgaagaatttctaacggttgatttatgacaatggaatttcttgcgtacatacagtttgaaggattatgaagttgtaaatacctgcacattgtagtcttttgcagccattgggataacttctgacccaaaatcattcgctgtaggataatgtcctctaaaagatacagaacaaagagaaagagtatcagcatacctcaaactggcaagaaaaataagaaccaaggagtgcagacaatcccaggaatgctatctcagcaaataaaaccaacagtatgtcttatcatatataacaaaccatttgttatttttgcacatttgactttgccatgcatcagaaaataaagttacagaaaccaaatgcttgatatagaagataaaactacaatgcaactggaacatttatttatcatgcaaacctagtttccaagattaaggaaagcattgctcatgagatattatcattagaatttaccttagtcttaatcattagcatttaccttagaagtcttaacaagatatcagtcctgaatacatatattcccattgaagccatgtatttgcatgtatctgcaacttctgggcgcaaaccaaaagttcccatatctagttgctgcattaataaatatcttagattatttaaaaacttattcgttagagccaataaatcaaggaaattgagctaatgataaagaaataaagaacaaatctccaataatctagataacattcacaaaagcaaaacaaaagccttgtgaataaaaccgtggatgatttaacatatgcaattaaaggtgatggaatgcattcattttacacctttttcaggtaacaattcagtttaaacatgtgtaaacaaataatttttagtattcatttgtctttgattcagtgaagaggcatataccattgatttcaagctttcatccttgggcttttcgagaaaatcagtaatgcgtccattcttgtcagtcttcatcaatccaaaatcagaagctcgactgcaagtagatgacacaaattttaaaaaaatatgagaggtgtatgtcatcatctgacccatcaattaaatatggaaatccacgtgtattgtctacttgttaatttgcaatacaatattatgatattcacaagtaatattgatgattagcgtgacaaaaagtaaacttctaaaactgtgaagaattacagcatgtacagtcctgctaactagctagaataaagacagattaaaaaaaagaaaacgattcagatagggcaattatgaataacctctcatccacaggaacacaagcgactgaaatatcagcacctttgtcaacatgcttctgcaaaacaactcatcatttagattttttttttttacaatactcaaataaagtgcaaaaataatctttgctctagaatatcaacatgaagttcacctggacaaagtccatataatccatcctatacagatgatcaccagatagaattagtatgttctctatgcgtttgagccttgcatccttgtaaaaaaatcaggcaagttaaaactgggaaagcgataacatcccgtgataagagtacaatatcatgagatgacactagacaaacctcaaatagccacaggaactgcctgacagcatcggctgttccctggaaccatcgctttcctgattcccctgttgtctgggtagctgccagcacctacccaacaatcaaaacaaaccaccgtagaacattatcaattagagatcaccgacccattgccacagctgcatgtttccactcgatttcacctcataacaaacactaatcttacctccacaaagccatcaccaaatccaaccccctcgccaatgttataagtgcgcgcgatgtgacggttgagagactgggagttgaactgggtgagaacgtagatcttgttgatcttgctgtttatgcagttgctcatcgggatatcgatcagcctgtaacatcccccaacaggcacctgacgtaccaagaacatacagctcaatcactaatgatgtaagcatctcacgattcaatcaaccaatagtcaatggtgtcaatagcaaccgaaatccccactattgcacacaaccaatgaaatgcttatcaaatgcatgacgaaatgtgcgtgtaaacactgtaaagaaaggataatgtgatttgattaccgcgggcttggccctggtccgcgtgagagggaagaggcgcgtgccggcgccgccgccgaggatgatggacgccaccgtgtccggccccacgtccctccgcgccgccgccgccgccgctggctcgaccgcatccgcctgctccaccttggcacaccaaaacacaaaaccaaaccaatgaatccgcacccaacgcacaggagatcagctcacgcaatcccaacacgcacgcacgcgcgcacgcgcgaacacggagctagccagccacctaccttgagccccttgggcgcttcggcgaggacgcagctggcggcggcggcggaggcggcggccgtgcggcggagcgcggcgacgcgcgagcggcacctggcgggcgggcgggggggcgccgccgccgccgtggtggcggcccacgagcaggtcgccattggcggacgcgggaaggttctagaagggcgaaggtggcggagtaggagaggggaggggagagtggtttgatcgaggaagggggggttttgcaaggggaagggcgcagatcgggacgatgggccgagaagagtggggaggcgcgagttacgagggcagcggggtgggcggtggggaggtgctttgacccggccgcccctcgcatccaccgtccgttttgcatcctgacatgcaggccacatgtccccgaactacgaggttcacaaggttcttgcacatacggtactcgctccattccaaatttaagtatacaggatttgtgtactagatttattttagaaagaaaagaatatataatttataacttttaatatattgttaactgatttttttatgtacttcctgtatactccctccacccaaaaactcaatttctaaatttgaatttcgtcctataaaaaaatcaacttcaatatcatatctacccttaacatataaaacgataaattttatttctttaataccctttgcctacctatcaccattactattttttttcatattgtcaaacaaaaaatacttatgtgggggaacggtagtagaggtggcgaggatttggtatttttattataacttgttaaatttgaacttgtatattcgtgaagtgatatgtttcatactaatttatcacctccatcccaaaataagtgcagccgtgggaatccgtatccaacgtttgaccgtccgtcttatttaaaaaaattatgaaaaagttaaaaaaaaagtcacatataaagtccaattcatgttttatcatctaataaaaaatactaatcataaaaaattttaaataaggcaaatggtcaaacgttggacatgaacagtgcaaaactacatttattttgagacggagggagtatcgtactaattttataatttgttaatgattatttatgtgacatgtaaggccatggccaacgctccacactagagcgtggtctcaccattcccgacgcgaatattcgcaccagctcggccgggatcgtgccctcgcaaagcgttgcaaccctctgcagagcgtcgcataatttcctcaacttttggcgaggaacgggtgaggaaccgcattggggagaggcatcgctccgtaccgtagcccagggacattgcaatcaactacctccacgccaagggtgaagaagacgaggaggtaggcggggggagaagaagatggggcgccgccacgcctcgatccgcctccaccactcgatctgccgccgccgtgcctcgatccggcgccaaggagcggagaggcgccgctgggaggggagaagaggggagagacgccgctgaggaggggaggagagctcgagctagagagagtgaagagttcggctggtgaagtgggatgacgtaagaaggggattggggtgtcggtggggaaaagagggagggaggagagattttatattaatttctagattttagggtgtttaatataaaatttggatttctatataaattgaaaaattgtgaggaataaaacaaaaaaacaaaccaggggctgaaataaaaaatacgagactgccacccgaaataaattagctttttgggtgttgccccatcctagattgcaattgagggtaacccttgcgttggccatgccgtgaagaaaccagggataatctgctcgagagatgaaaaccccatccctcaactcccacttcagtagaggcagcagcaggcttcccgtgtacacgccgacatggacggcacccaccatcgccgccacgtctgtttgaccgccggtggccggatcgtacacccgaatcacgccgcggccgtgctctgaactgccgttggcccacacccagaagacgaccctcccgtcgtcgacgagcaccaccgccggctccgcgctttccgcgtcccacggcaacggcagcccgagggcgtggtatggcatggtcaccgtgtacagcttcgtccaatgctgcggcccaaccttgccgccgtcgccgtcgccggcgaggaggaaccataggtccaggacgccagctcggtggtcgtcgtgggccaccaccaaggtgcccctcagctcggcaagggtgacggtgacgtcccaggggtcatcgtggtctccggcgggccaccgacgaggtccggtcgccattgctccgcctcaaggtcaaacgccgcgatccagtctctcctccatagcctgtattcatagagcagcacgaagtaggcgaccccgccgacgacggccgcgaacctgcgtgacgtgctgacggtgtaaggctggctcggccgtacctccctccacagcgcgaggcggccgccgttgacgctgtcgcaggcgagggtgaggaccgagcaggcctgctgctcgccgtgcttcagctccccatccttggtgatgtgcatcaccttgtactcccccgtcgatgcgatccgcgcgagcgtgacctagtacttggtggggtggctgatcttgtagtcggggacgacggggacggcgccggacaccgggtcgagcacgcggagcagctggttgttgtcgacgaggagagccacgccgccgtgcgtggacacctcggccggccggtcgcacctcccggcgcaggccctcttcacgatgtcgccggaggacgcgtccacgacgtagacgtccaccagctccctcccataggagttgagccggccgcggacggcgacggcgaggtgcggggccgggtgcctcgctgcgtgggcggcggcgaagaccgggtcgcgagacagcagggcgcgccacggccggcacacggcatggaggcggcagagcggcctcgctgggaggcatagcaggacctagtggagcagatcgaccatcaggacgccgtcgttggacactgcgacgacggggtagtcgccgccgttagctcgcgatggcggtgccattgccatgctaaggtttgtgttagagtatatggtagttagagtcatattaggatagttagagtatatggtagttagagtcatattaggataggattgatttgtgtggactccttccatatctgtaatccttccttatctcttcctcatgtattcctatatataccggcccctgaagctcattataatcaatccatattacacagtatatctctcctatactatccaatatggtattagaccgcctccgctgccgtcgcccccgggagcgagatcgctcccgggagcgagatcgctcccgggggcggccacccttttcttttcttttccttcaagttgttatgcttcatcgacgggatcgattttgatctcctcggccgcggcctccttcgtcgagtgtacatcgctgtcgtcgtcgtcctagaggagatcgatctcctcaggcgttttcgtcatcttcacttcatggcctagcaccatcgcgtcgacctccatggcctagcagatcgcatctacctccatggcctagcaccgttgcatcgacctcgccgccggggggatgggcccctcgccggcgcgtgccgctccaccggccggccccgagctcctctaccttggctgccgccggcgggcgctggatctccttcgcgccccggcaactccaccctccgccgccagcacgcctcctcatccccatctcgggtcgctgccagcagtggctcgtgctcttccacaaccttcgtgcgtggcgcgggtcatcgtcgggtcaccgacgctgccctgcggtcatccgcgtcaggcgccggagcccgccgctcctcacggcgccgaggtccacgggctaccatccaccgggttcccaccgcagacgccggtgtcccgacatggggggcttgtaacgcctcgattttcgttcggggttaaaattcattaaataatatattttctagaaattaaataaaagttaaatcaatttaatcaagtgaattattgggaggaaattagagaaaattaaaatttccattaaaaatcattagccaggaatatttagtaatattctttgtgtcctaaaatacactccggatttttccgcgaattttcggagctcaagaaataattttaatagtacaaagatcatttaatcaattaaataaaaagaaaacaaaattaaaatccccttcctccctttcgggctcgggcgaaaatcctcccctccctccttctttcccctccggcccagccgcctccctcccctctcctccttgggccgcttgacccgttcgctccctttccctccaaagtccacatacccccagccttctcactccctctctctgacaggtgggacccgatgaaccgccccgccggcaactgccatgggcgccggttccaccccacgacgccgctgtttccacccacctcctccactcctcgcgcacgcgctcgtccgtgggacctagccgcccacgtctccgctcttatccccctttcacgctcgcaaaaactggccgccaactcccccatgatcccacgccgctcccccactccgaccagcgattccgcccctcccggcctcgatctccatccaccgcgcccataaaaaccatccccgtgccctcctctcgagtttccccctccttcctgagcttgccgtgcactccctcgctctccccacacgccgccgctcaccggcgtgctccagccgccgcctcccgccgccttggccatcgccgcgccgtgccactgccaccatcggctccgccacgccgagccacacctcggcatctgctctgcctccctgtatccctgtcggaaccacctctgcaccgcgtacccgagccaccaccgccgttcgctgcctcagtagcccgccaccgccgcttcaacctccaccgtgacttgccgcttgcgccattgacttcgccgtcgcaagagcaaggccggccgccactttgtttgcccagtccaccgccggagcaccactttcgccatcgatccgaggtcgccacctcatttgctgcctccgatcgctgattcccgccgttcccgacctcctcgcggtacgccgtcgcctccctcggccacgcaaggacgagagcaccctcggccaccacctcctcgccgccgggagccaccgtaatcgtctccccggtgagtctcgccacaaatgttgtgctcggctggtgttcctcgccgtgccgcgatgcctctccctcctctaacccctcctctttgcttcccaggtcctgctgacctcggccgcacctccgccgcggtcgggagtcgccggagcgccgtccccgaccccaacccgagaagcgccaccgccaatcctcgtcgtcggccgccttcccgacttcgcctcgccgtccccgtcctcttggtgagccccctctcccttccccgctgccacccgtgtgtgccgccacatccagcgccgctgccgcccactgccggcgaccatcgggccgagcgccaccgctttccggccggctgccgccgccctgctcgcccgtggctgcccggcccctttgccgcgccgcgcctgcccgtggccgttcgatcgaccgtcctagccgatctgggccgtccacgtggcctccctgtgccgccccgcgtgggtgctctcgtggcgccacctccgctagcccgtccgccatggccaccacgaggctgccacatggtgcgcccgtgggcaacgcgcgcgtggaccgagtccaccgtgcgccgacctcctttgagccactgacaggtggggcccgcttgtcggcgccacctattcccctcggtgacatcataaaccattttaattgcgcaataaatcggtaataattctataaattcatataaatggctcaaaacttctaaaattcatatctaattcatacgaactccaaattgggccattcaacttgcaaaattcatctaaaattgagctctacatgtttgtttactttttatgtactgttttcttggtttttattaggttttttttcttgttttgcatgccagcgtgtagaatccgtcgtttcggaagatcgcgatcgcgaggaaaagagttcagaagattgttgtgaagaagcaaggaaagtaacacattcctcttgagcatgttgatcccaatttataaatgttttactgtttgcaaataaatatgcatcgttttgctaattacatgggatcagggtttacctatctgcttgcttgtccttcgtcaaccttgggtgataaatcgactagcttgtgttactttgatgacctagctagaactatatgcttagccatgcttaattaccactagctcagttgatgggataattacagtattagacattttggtatcagaacgagctgcgtgctcgagacacccggccatgttttattggccgtaattatccaactaaaatgcgactgaatggtgggctgtgggtgcatggttttgctggtcgcacccatagcaattaaggaccggttcacgggatgcactggaagacatacaatgcttgccacaagcgggaatgggtaactgcctgacttgaagtatagctcttctctggctgacgcatctaagcaatggtgggcgtgatggagcgggatgggccctgcgacggcctttgtcgcttccagattcacctaggcacgagaggggactgctcgctgcctgctgggggcggggtgaaacctaaggtatggtgtgcttggtcagagagggtaatatgaagggtcttgtcacaatcacttgacatggtgacgcctccggccgggcacggtgacatgctgatggattgtgtcttgtaggtacagttgtgcacctctggccagagaaactattcgaatagccgtgcccgcggttatgggcgatcgaccagaatcaccgtgattagtctcacacttaataaatcgactcaatgcactgtagttcatatgggttggttgggcctgttcaacgtgatgtagcattgatcagtggagatttaatgttaccttaattaaccaactgttttactgttttactcaataaaatgttttacaaccgcctttatgcaaatagccacaagccgttcttaaatccacttgcacgtctgcatcattggtgtggtttgctgagtacggtggttgtactcagccttgctattattcccccttttcagaagtgtagtgcttctgagttgaagacagagttagatgaccaaggctcagaccccagttgagttttgcctgtggagtggagctgaagccccactaggatcgtctttttccactgctgctgctttcatttcggtgtaaggattaagtgcctcttctgtaagtatttatgtttagaactgtatattacttaccgttttgtgtaccctggctaattcttggacaggaaaacacaaaatagtctggaaatttgggctaaattttagagtgtgacagggctcacggccgccaccgccgccagcacccatcgccggcgtcctctccatccgccgcttcgagagacttggacttgtcttcactgccgccggagggagtgcgcggctaaaccagagatcccgtcgggccacacgccatctggcctagggccctaggctggcctctacccgttggctactcggctcctgcctcactcgctctctctgcagtctgcctatctgtttctctttcctgtcatcttgcacgtggttagcaaacagaagagagagaagagagaagagagagagagaagatgggtgtagactgtagagggctcgttgaccggcatgcatggagatggagggttctggtcttcgggacatggtgctaccgtgctgctgcagctggtgcttgtatttgtgtgtttttttccttattagagatcggatttgcgtcgtccaccgtctcgtcgatatctgcacatctccgatataagcatagactcggcttccacttcgtcgtcctgccccgcgcatcattgacttgatcacccgttcaagcgctcggctatgacgacaccatgttgccggtcattttcgagtacgtctactacgctatcgagcttcgggttgcggctgcgttgccccctcggccgcggtgccactgcctgcggtccacaccaccactagttgttgtagtgctgagaggcgccctcctcagcatggctacatcaccggcggacttctcgccattgcatcgacatggagttgtagctgtgttgtcctctcggaccgcagcttcgcagctagcgtcgtcttcatcgccattcgcgcatcaacaacctcgccgtccgcactggttatcgtcagccattcagggtcttcttcctctacttcgagcatcgccgccgtatctccaagttgccactgtcgccgctctaggccggtggtccagctacctccaaatgcctactgacatcgccgtccaagccattggttccgctacttcgccatcttcttcgtctagcatgactcatcgccagcgtcgccgtatcttcctcgactacacttcgctcttctccggcaactgcgtgctgctccagcaattctccctctatgctgttctcgcgccgcgaccgtcttggaggccttctctgttagtctcctccgacattggcgtatggttcatggtggtccctgccttgcccgtgcggtattggcaacaccggcgcacgcattcgtcccgagttgtcccggggtctgacaaaccttgtgtgacgtctcgtccttcacggtttgactacatcggctcttcggcgtcatctatctcaatgactgcctcgattgcgtcaccgtcatcgtcttcagcgcgtcctcgtgcacctcactctacggcgccccatgcgcgctctgtggctcggctacttcgacatcagcttcctgactttggctacatcgaccacggctactctacgcatggctacctcgaccacggctccctcacaccctacgctttggctacgtcgactacggcacaaagggctatcatccgtattgagcactcttgccggtttattctccagtccaagtgtctgcgctgcttggacttctttcatatctgtaattcttccttatctcctccccatatactactatatataccggatccctagactcaatacgatcaaacagtttgcctttcatgaaaaagggatctcgtgcgccctccttataacctaacacaattcggtcactggaactgattataaatcctaacgcaattaggggtgtatttttgtttaacgaattcagctagtatctctttttttttcaagaagaattaaactatttctaatggtttttaaattgattgttatttttatggagaatgaaaagatacctgacgatgttccgtccaagggagagaaaaacgatctccctcgtgttctggctttagaggattcagattaagagaccccctagctctttgataatctcattttgttgggaaagtgattccatctctcgttctgtgcatgccacctaaataatcatcaaaaagtttgaaaaaatttggcaacatagattaatatgaaatatgtcactctacaaacatgcaagtttaaattcgactactacatgttataacaaaaataacaaatatagctgcgaagtttaatttgttctttttgatgtaacttgtagaaattgaatttggtcttgtatgtttgtgaagtgatatatttcatattaatctatattgtcaattttttaataattatttaaatgacaatcaaacaacgaggggatatcccatcgagggatgaaaatccacatcccattttgtttgggataaaaagcatacagcaacagtgtcttgatatttgaactttcaataaaagatttgaagaaaatgttaactatataaaaaaacaagcctttataattactaatttttatttccctcgttttaaacaaaaaaatatatttttttcacaatctggtgtgtgcagcatgcagagctaaagggtctcacggagatggcatagttgctctcttcaggagcaaaaatcataacttccaggagtaaaactaacgaatattgtttttgtgtgcaaccttgtagccattggaagatacccgggccttaccttcctcctctgcgaaacctgcagctgtactcgtctccaagggcaagaaatacgtgcctcacctggcctggcaaaaaaaaaaaaaaaacctcaccaagcacgcaacactgcctggtccatccaaatccagcatcgtgttgatggtgcaagacagaattaatcacaaacgcataagtttatatacaagtagacgcatttcttcgtaagaaaagaatctggatttaattttcgctcagtgttaaattttgaggtgaagggaagtttactggcttttatagagagaggtcagactggaataagtagattgcaaggcattggattttgttcagtggtgtcactagtctaactgtcactggtggtgggaccgaatatggaaaatggcaagatttggtggaaaaagttcatgcagaaccaagtcaaagcttccatgcacatatgattgtaaattatgttatcatggaaattgcaatgcagatgcttgatgacattatttctgacaaactctgtcttccttttatctgactgcaggcataatggacattctactcgttaagcatgtgtttgattggagggttttgctaggttgggttgtggccatcttttttttttttacagctgtttggtttcaagactaggtgggttggtttggtttaaaaaaatgttgagttttactgatcaccaaaaaatgaccgggccgatcgaaccagcttcccgctcccaccccctctaccatgcatttttccccatcgcatcgctccccaatgaaaaatgtaggcggcggcggcggcggcgcaagaagcgacagcaaccacacgagtgcaagagagagctaacggcgacgactcgtggccccatccctaattcgtccccccatcgctgaaattcagttggtcaacatcgtcatcctctcgccattggctgctgcggcaaaacaagattcggtgcccccatcccctaacggcatcgtccatgtcctcctctctactctgcaactgctcatcctcgcaatctcagcgacaaaggtaaggaaaccctagcatgaaaccctagatcttgctgaatttatttttatgagatgattgccccttgttgtgaaaaggaatagttgaagcaattaattcatagatgattaattcactcttgaaaccctagatgattacctattgatgtggtattttcttgtcaagttattcacggtagatttatttctaatgtgagcaagtaatctgtgattatatgatctatgcttgagaagagattttttttttgctttcctttgattattgtaatgtagatggataagaggaccaagtttttaatttttgctgctgcggcaaatatattattgtagatgatggccatgattattcaatctagaaaaaaaagagaggtgcaaggacagaaggtactaaatatggcccattggatgaaagggatagaatgagaattgagtacctagacacaaaaatttggagaatgatataacttgtgtcaacatgcttagacttagaagaaatctttcttttgattttgtaagctgtttagaaatcggggtttgcttgaggatattatccacatgtgttgaggagcaggtggctatgtttcaaaacacagcgggggcacaaccttagaaataggttaattcgcactaattctgataggtccagagaaacagtttgtcattatttcaacaaagtacttcatgttattggtgagctaggagatgaactaatcccccccctcgttggacaaccccaactaaaatatcagggagccacacatgggatccttacttcaaggtgtgacatccatctgtgtctccttttttgatttttagatgtaaagatctctgtggtcttgcaaataactcaagttcagatcatgataccgaagatattgaaactggaaatgaagaggtgaattatgggacaaccactattgatcttgatgctgaaacatcatatgtgagcaagccaaagacaggctaaaacaattgaaagtgaagatgatgtgctgattagggcattacctagtgttagtgaaaagctcgccgctggtatagtgaaagccggtgagccagtcaatacactgccagcaagtttatttgacaccctgaaaagccttcctggttttaaggacaaccacatatctttctactatgctcatttggtggccaatcctcacattactatagcttttgatggtcttccattcaaaaacaacctacactgggttgctttgttcattagtgagaaatttcctggatcaatgtagggttgtcggatgagttgtgcagttaatttgctattatgaaatgtgttgccagtgggtaggcattatatgtaagacttgaaagtatgtttaaggcaaggaaattatgtgtagcttctatgcttgaactgccactatgcttggactactatgtgtaagacttcaatgggctattatgtgatcagactttaactcattatttgtgtcttgaacttcctatgtatgtttatgtgtgattgtttttgtttttgattctacaatatgagttatgagtgagattattgttcttccacctaaattatgattgaatggatatatgtgttgtacgtatggtcagaaaaaataacatggtttggagagccctatgttttgctgtaattagaagttcataattgttgatcattttgtgttgatctcggtttgaatggatgcatgtgtcaaacggtcctattattctctatttttctgtaatcagaaggactgcacatcaattttaatcttgtgttgagcaatcctcttgtgtcatgatttatcaaggatgatggcactagcaatatttcagacctaagtcttgctcctgcatttgaatgacgggtagagaaaggaaaaatgttctcatcaaagacaacatccctagaaatataaacatgacttgaagatatatcaaggcatttaaaacctttttggcgagtactaaacccaagaaaaacacattgtttggagtggaactaaagtttgtgggtattatagtggtgaagatgaggccaataagcacaatcaaacactcttagggacgagtctggttttcggttgaacaattatgagataagtagccgcaacaaaagcttcatcccaggacttaagatgcattgatgcatgagacaaaagagaaagacccacttcaacaatgtgatagtgtttccgttcagctaacccattctgtcgatgggtatatatgtggacaatacaaatgatgatcgattcctattttagagaaaaaggaattgagcatctattactctcctccccaataagccggcatggcaataatttttctatcaaacattcattctaccaaggcttgtaattctctaaacttctcaaaacctcatatttatatcttagcaagtatatccatgtaaacttactaaagtcatcaataaaactcacgtaatatttatttctcccaacagactctagagcaagtccctagacatcagaaaacacaagttcgagaggagattaagacacactggtaaacctaacataaggtagctaatgactcttcgctttttggcaagcattatacacaaactgattggctcactcatctaagcattggagatttttttttactagtaacttgcttgacaataggaagaaatgagcgacctaagcagttgtgccacctggatagagatagcttgacggctccaagggcttgtttgttggacgaccggccaaaggacttagtgatcaaacagagaccatgcctacatctccctttaaccagaatgtccttcgttacctggtcctttaaagaaaataatttaaagtgaagctcaaggaaagcagaattatcagcagctaattgactagcagaaatgaggtttttctttgcttgtggcacatatagcacattattcaaatgaatattatgactaggggtatgaacagtagtatgaccaatatgactaatatcaatacctgcatcgctagcggtgtgaatctgctcgccgctgttgtacttctcctttgtgttgagtttctccagcacaccagtgatatgatccgtaccacatgtatcaatataccaatttgtatctacaacatatgaattagtggctgaagctgctagtttttcatccgcaacatagtcctcatcaaagcgataccagcagtcgattgctatgtgttctcgcttgaagcagacttgacaggtgggacgcttgtccggtcctcttgtgccgtgtcctcggctgcgtccttggccaccaccgtgtccttgcgacgtgcccctgtcgctgctgccggagttgttgccgccatcgtgtctgccaatgcccctaccgcaatttgtgacaaaaggcagcccccccttgactggtgttgcggtaaaggtcaagtagggtttcatagttgaggagttgagagtacaactcccaactgtcataggtttagtctttgtgcacagagtggagacgattggactgaaatcttcatctaatccggtgatgatgtactggactagatcctcctcatcaaggggccggccacctactcccatctagttgccaagggccttcatcctggcaacgtactctacaaccttcatggttcccttcttggtgttgatgagggcgagccaagtgttcactgacctcgcgcgagtgcaagaggagtaaatcttctcaattgctcgccatgcttcagtcgctgttttccacatggcaacttggatcatgacatcccttgacagaggcgataggaggtagccaaaaacttgctgatcattggcctttgttaacgccaacgccaacagtatactcagctcaaggtcagtatactaatactaacaaaccttatcttctagaagctctattgcatgtataggaaactatatttcacacatatggtatggaacttcacattagtgaatgcccaaaataaaaggaatattccaagaaaatattaattaggtcatattgaaagaaattctataaggatatcacaaaacatgcatgtgtatgtggtgtgccaaattaaggatcatataatgacaagatttataagacgatcagagggtggaaagaggtatcatatgaagtaaaacaagaaaaaaaggtcgatctaggtagatgacgaagcctatgacctttagggcgtttaacttattttattaagtagattaggcaacttgacttgatattgttgctgaatatttgtactccttccgtttctaaatatttgacaccgttgattttttagcacatgtttgaccgttcgtcttattcaaaaacttttgagaaatatgtaaaactatatgtatacatataagtatatttaatgatgaatcaaatgatagaaaaagaattaataattacttaaattttttgaataagacgaacgatcaaacatatttaaaaaagtcaacggcgtcaaatatttagaaacggaggaagtacaggcaacaaatatcaagtgtacgtatatgcaatatttttagaacatatttgtgctttctgaaattaatgttgatgagttatgttctttgtttgctatataggacactaattttgcgcttgatgttggtctaacgcttttgttaggagttgatgtttggtaatttaaccatgttctgagagaaaaaaaattcatccctccgcccagggaaataaaataaaaatgtgcgggcgtgcgagtgtactaagtacacaaaataaagtggacggaggaaaaatacattttattataattctcgaagaattacaaaaaaatacagaatccttggtcaaatacactccacggcccataagcaaggtggatctgacttggcgattgtgatctcctggttcccaaggtttcggaagacacccggttaattactctcgcgggttaaacccgtgagatacctccgattaagctacgctagtcatcgtcgtctgtcttcgcttcacgttctctcatgcatgatggtgatggtggtgcaggtgtgtgagtggcgccggtggtgttcgcggcctcgtcggtccgcacgccggtgttggtgacgtcgtctagatgtcgactccacccgccctgccattttagcctcataggttttggatggcgtgttggtttatattgttgttgaagatatgcatggaatagtgtagcctggatgacccgacgacgtaggaattgcatcggaattacattataaaagtaaaatgatcaatgcgaatgatagccgaattggtcatggctgggaagtttaatacgcagcagccccaaatgagtatgaatctgcaaactcatttttgcttgtcaccatgtacagtagcaagcatgcatgtcttgttttgttggctcgtcaccgtatacaataacatgcacaagtcagtcagcatccgcgacatgggacggctcagcagcgtagcgccctggcggctgcctcgactccctttggcgtgctctagtgaggcacaatgacaaaaaaccttctccggcgagcagcggatgatgacgagcatcgcttggtagcgttgcgtcgtctacggactcaggcggctcggcgacgacgcgacgtccccggcaactccgacgagatggcttacgacgtagctggagctagtgacgccttgcgggcaccgagtagtggcactccggccggcgttctcctcgagcaaccagctgatgagttcgaagaagatggtaacgtcgacgagagcgagcggacgtcagtgatgtcgcgaagaggaggctgcgaccgggaaggtgacaacgtccagcgtctcggcgacatcacaaggcgtcgtgggatagaggttgcggccggcgaggcaaggacgtcgtggcagcaggtagatgtgtcaccggcgaccgacgtctccgatgagagggagtgacgcgatctccggccggcggtgcgtccgacaggcggagaggacgctatatccggcgggccgaacagcaccagaaacttgcctcgtcgccgtgttgtgcatgcatgatgatctgaacagaaagagcaggaaaacaaaagagaactaataagctgtacccatggcaatggctgggtacgtgctccggcaaccgtctcctcctccgcgcgcctcctcgccggacgccgaggcactgcggccaacgtcaccgaccgccgagcgcccgtgttctcgctggacgccgagattctccagccaaaatggtgtgtgtgtctctctctgtcacttttgtatgcgtgtgtgttctgtctgtgtgtgttcctccgtttctgtgtgtgtcctcgttgtgtgaaatggcatggccttttatagtgaagaaaggcggttccagccagtacatgcatggctcgatcagtgcatgcgtgatcagccaattgcctaatttagcgattagcatttctttccatatgttctgtgattcttccaattaacagagatccttattcagcatgattccatccgtgttacgccgaccgatctcctttccaagttggaatgatacagagggatcattttcctcgtattctcgtatatacgcgcaatctgtccatggtgaggcatcgataagaaatcaactgccggcaaatgatttgattattgccctctaatgatgatgctacagtggcatgcttccaaaatcaatccaccgtcgtttcttctttccgtcggtgatatcgcttagccgtgctgccacttattccaccatctattccaggcatatgtatttatatattctatcccggctggaatacattatatatatatatatatatatatatatatatatatatatatagagagagagagagagagagacgtgagtatattcacgcctgtacattaattgggcagcactgcacgtgtcgtgtcatataacattctcatgtacgccagattgtatcattaatgatgattaatcactaattttactattgtactgtcattcccggaattaatattttgacgcaccccatttcttataaaataaaaaaagatgtacaaaatatcatcgaacaaacccaccagcaggaacaggaagacgagtcaaccattattttaaaacgagaggatgacgccggttaaaaagctttgatacaggacctaaaagctttgaaacttaatttgaaaatttcaaatctgagttgaaaattttaaaatatgggtcgaaagttttaaacttgagttgaaagtttttaaatttgaattgatttttttataattttgaggtaaaagttttaaaaattttaaattgaaagtttcaaattcttagttgaaagtttgctctttttttaaaaaaaattactttttttgaaaaaaataatatataaattaaattaaatggatgtagctttcttaaatggagattaattaatggatcacgctggattaaatttcatgcatgagccagctactgatcggaatatcggatgataaatttctcttggtcttttgtgtccagaagttttttttttgctgattacattgggattgggatggagggagtactatattgcttcccatcccacaatcacaagttttgtttaacatcggtatattttaataaaatataaatataattctcgtctgatatccatcgagaatcaacgggacatatatatgcttggtgtgagatcaacttgtcacactgatggaatgcaaaaataaaacatgaatgggatattattgtgcttggtgtttcgagaattcccgatcatatatcacgtactaatgacagaaacaaaacatgaaacgaaggagagaaggttaattttaaccccatgaaaaggaagacttaacttatttacgataaaaatacatatacgtttatgactagggttcaccaccataaaaatggtccgtacttttattaatttgtgatacaaaccatatatgatagatacaatcactacaagaaatataacattctgcgacgaattcctcgtgacatcggagctattcatcattagcacattccatttcatgactattagtatgagatggggtggcttagtgatgaaaaaaaggtgttcatcgttaataccaactagaaatcatcataaagtatttcaatgggacattgtgacgaatattaatttgtcataaggggcaaaaagcaaatgtcaaatatttatataatgcatttctagaaaaatatattaaaagttgaagcaatttaatcaggtgaattaataagaaaactaaattttcctttaaaaattatggccggaaatatttttgtaatattatacgtggtctaaattattctctgaaattttccgtgaattttcgaagctcaataataactttaataccacaaagttaatttaacctattaaaataaatggaaaacgaattaaaatcactctctctgtcctcgggcctttttcggcccaagtgttactctctcccttcctcagtcggcagcctctctctccctcctcgggccggcttccccttcccctcctcctcttcaggccgccggcccaaccctttcgttcctccctcgccgagaagtatattttgcctccttcctctcaattcaaataattttttaggtactaaatgatttcaaatgaaaaaaaattatcaacaacaaagttgcataacttatcaatatctaaaacttctgttttggccattttgttatatgactttgtttcaataatttgaatttaaattttaaattatgacaatttcaaacaatattttcaaatactaaatgatttcaactgaaaaagtcatcaacaacaaagttgtataactcatcaatatctataacttttattttggtcattttttcatccgacaaattgatagtaacattatttacaaaatttatatatcccttatagtttataaaaccatataacagatataccgtaaaaaaaagtccgtacttttatttatgataaaaaccatatttatagatacaaataatgactacggactctcttattcagcatatattgtacgtaatatatgtatcttaggtgcattcatgcatatagaaacggatcctctaacttagtacgctctctaactaatatgtaggttcttaattataccgaacccatatagtattagctagtaacccacgttagagagcagtttattagaggagactcgatcggcttaacgtagctagtaggggcgctccccgttaatgttgccacgcgggttgtagttgcaggcgatcagcgtgctgctgcgaccgttgatgttgcagccggtgacgcgcgcgcagccgatctgggtggtgcggctccacaccacctgcgtgtagtggccgcacaccttcccgccgacgcatttgttgctgctgcgatcgtagtacggcttctcgcccacccagctccccatcgcgtccgctggcttcccgacccagccggcggtgctgctccacccccaccacaggttctcgccgtagggcccctgtatgtggtccgtccggcacgtgctggcgtgctcccgggccttcgccgccaccgcctcgctccacgacacctgcgccttgacgccgaccgcggcccgggcgtcgttgtggagcttgacgaactgtgccttctcggcgtccgacaggtcggcggccatcgtcgtggtggtcgccatcacgatggtcgcaatggccaccgccagagcaaaggcagctcctttcttcggtacacttcccatggtatctccgaattcacgagtgatcttagtcctgctcagcttggctagctatctgagactgtatgcagaggtgatgattaacgcttgcattaggcagtatttatactaaatgagtttgctctgcatgcatggatgcaatgtctctaatacaataattcatttttgctctatggttcttacggaaagatatacctcgtgccggtatatggatgtagggcacattggttcaactcggaaaaacgttatatgcctatatgttgtcaacgagaaaccatcaaacgtttcatgatcgacgaccatatataaatgttactttcatggttgagatttagcaaatctgttcattcaacttaacaatcttttttttaggcaaaattggttatatagcatcgaagttcacgttttttgttttatagcaccgaaagttaccggttcactttaatagcacccaaagttcaccatgttcccatttttaacacttctgtcaattctcgatcattttccgtctgtgttgatccagccacacacacgatatgacgtttctacccctcacaagtataagtataatgcatgtcaatgaggggtagaaatgtcatatcatgtgtgtggctggatcaataacgatcaagacggacgaaaaattgacggaagtgctaaaaatgggaacatggtgaactttggatgctattaaagtgaaccggtaactttcggtgctataaaaccaaaaacgtgaactttcgatgctatataaccaattttgcctttttttattaacttaacacatacttaactagctaggttcatatccaccagcgtcatcctctcgttttaaaagaatggctgactcg

SEQ ID NO: 11011 - DNA, 588 bp, Oryza sativa
agctccgctcgttctgcgcgcagggcctccacttgggtgttgaacccatccagcactgcggtgtttgcggcggccagggcctgcagaaggggctcggcgctcagcggggcgacagaagatgaggagaagagccgccttggagaaaaggcgacgcggcttggccccccggaggatgcgctgggctcggggatgtcccccgggcccgtttgatcctgggcgtcgcccggtgaggtaggcccaggcgatgcgcccgcggcctcgtcgcgagccgcctcggaggatgtcgcctgagggccgcccgagggagtgggcccaagtgacgcgccagcagcggctgacgcctcagcctggcgagcccgggcggcctcctcccgggcagcttcttcggcttggcgagcccgggcggcctcctcccgagcagcttcctccgcttggcgaacccgggcggcctcccgggcggcctcttcagcttcccgaaggcgggctgcggcttcacgccggtcagactctcgcctccgctcctctgcggccgctggatcttcggcctcggactggccggacttggggtggcgggaggaatgcgacggg

SEQ ID NO: 11012 - DNA, 518 bp, Oryza sativa
cacgagcgggattatcttcttcctcggcgagtgcctcgttagctggcagtcggtcaagcagcaggtggtggccctgtccagctgcgaggccgagtacatggcggcctccgccgcttcgacccaggcgctctggcttgctcgactgcttagtgatctcctcggcagagacactggagcggtggagcttagggtagatagcaagtccgccctggccatggcaaagaacatcgtttttcacgaacggagcaaccacatccgggtgaggtaccacttcatccgaggctacttggaagggagcatcaaggcgagctacatcaacaccaaggaccagcttgcggacttgctcaccaagcctcttgggaggatcaagttcctcgagctctactccaggatcgggatggcccaacttccccacaagacgacgcacaagacttagggggagaatgatggataagtctttgtggtccttggtcgtgggtacttccttttcttttgagtagtttcaccttttcaggaca

SEQ ID NO: 11013 - DNA, 664 bp, Oryza sativa
  unsure (1)..(664): unsure at all n locations
caacttacccgttcgcctcgcggttgccgaacacaccgtcgctgacatgcagcgcgcgctggattcttccatcggggaggccgaggccctccgcttggcgggcgagatggggcccgacatgctttgggactcggtctcccgcatggatcgcgccggtcggcaagcgggcctctggaaaggccagacgaggacgcgcccttgcaacctggaaggcctcgctccgcacctcaacaggatggcctgggtcctcgaacgactccccgaggagctcgagaagaccatcaagtcatcctcgagggacctcgcccggggggcggtcgaactcgtgctagcgagttaccaggcccgggaccccgatttctctccctgatggcgctggaggagttccctcccgggaccgaggacgacgcgcgcgcgcgggtcggggatgctgccgaccacatcgtcaacggcttcgaggggtcggcccctcggctcgcgttcgtctccagctccgacgaggagggcgacgcnncagccgggtgaggaattgacgggtggcgacgaggccggctacccgggcgcatcggaatgagcccccgagcccccgcccatccttacctttttttctttttctttcttctaaggccttcatgcctcgggtaccgagctcgaattcgcctat

SEQ ID NO: 11014 - DNA, 8958 bp, Oryza sativa
ctcgtgaaaaacggctttgaaatcgggaaagccgattcaaccctctttactaaaagacatgataataatatttttgtgtgccaaatatatgtcgatgacattatatttggttctactaacaagtcttttagtgaagagtttagtaggatgatgaccaaacgttttgagatgtccatgatgggtgaattgaagttcttcctcggccttcaaatcaagcaactcaaggaaggaaccttcatttgccaaacaaagtatttgaaggacatgctcaagaagtttgggatggagaacgccaagccaattcacactcccatgccatcaaatggccacctcgacctcagcgagcaaggtaacaacgtcgatcaaaaggtatactgttccatcattggctcacttctttacctttgtgcatctaggcccaatattatgcttagtgtgtgcatgtgtgcaagatttcaagccgctccgaaggagtgtcaccttgtggccgtgaagagaattcttagatatttagtgcacacccctaaccttggtctttggtatcctaagggagcgaggtttgatctcattggctatgccgatgcggattatgccgggtgcaaagtggataggaaaagcacattgggtacttgccaattcttgggtaggtcccttgtttcttggtcttccaagaagcaaaactccgtcgccctatccaccgccgaagcggaatatgtttcggtggggagttgttgtgctcaacttctttggatgaagcaaaccttgagagactatggcctcaatgtatccaaaatcccactcctatgtgacaatgagagcgccattaagatagccaacaaccccgttcaacactcccgaaccaaacatatcgatattcgccaccatttcttgagagatcattccacaagaggcgacatagacatccaacatgtgagaaccgacaaacaattggcggatatatttaccaagcctctagataaagctaggttttgtgagttgaggagtgaactaaatattttggattctcggaatgtggcttgatctattgcatgcatgtttgcttggtagaataggtttgcataccactttgtgacaaaatggtcattcaattcatggatggacactagtcattttttttgtggagattttgaatctatgtgtatggggatctcatttttcaatgaattttggtcctagcacaacttgaaatagattcacacattccctctctcgagggtgaattatcttgtctcatggtaattccccctcttttgatcccttagatcgtccatttgacttgtggctattgttttgtgtgattgattgtgtgctagtcacaagttcaaatggagcctctagtgctcgaccatcccttcctttctatatcctatcaaaaatccttgtaaaaattgttttttgtcaaaattcctttaaaatgtttgaaaaatagtttcatcaaaattcccggcgaaatctcattgcaaagctgtgttttccaagaatttttggactttccgaaaaattttcggacattccgaaaatctctatcctgtcgctctttcaattgctgcaatcccaggatttttcggactttccgaaaatttttcggacatatccgaaaatcatcagaaccgtgcgccactcttctgtatcctttcggacatatctgaaaattttcggaaatatccgaaaaatttcggggtcttcatatatcaccccgtggactcccttctctctcctttccacttcttttccccacgggttgcctccctcctccctccccaccggtgactccccggcgacctcctcctctccggcgacctcccgcgacacccctcctctccaacctcgagggagcacgtttggggcacttcttgggccctacattgtcgatcttcaccgtgttcttcccgtgttcttcacgttcttgaggtatttgcccttcaatcaaatccctagattcctcaagatttctcttgcgatttcctttggtggagatgttcccctagtgccttaggccctgcagattcaatttcacaagtttttgttggcggatttgtgcggcatctgagttatagagttcggcaaaatttttcggacttgtccgaaaattttcggatatatccgaaaattcctggccgacccctatcacttcagatttgcatgtttcttgctctcaatcacttgtttcttgtctccttggcttccatatctgactccttgtatctctattgtttgaaggatgcctctccacaagcaaacctcccacaagtccaagcgcccgagggatcgctctcccactccatcttctcatgatgattcggacagtgattggtccggtggagaggatgcggttcctcaggttgcgcgggtggctcgacggtctactcatgctcatgatggtggtggtgatggtgagggctcctctcgtcaaccgcaaacgccgccgcaccaacccaatgtccccattgggcctctccgcattcatacccccgagagggatccggcggtgattcgccaagtgtatgattggcggcgcaagtctgaggttgttgctcctcgtcgggatgaggatccgcgctcccttcgccgcaccgacacggatccgcggttttggactctctttcaacaagacttttatgagtctgtaattaaggtccaaagctcatcccactgttcccatgcaatggatcaattgggaggagctgcaggcacataatgatctggtgatcaactctgtgattgccaattgtgatctcatggatatccgctccttcatgacgttgcagcaaaattggtgcaacgagatcattgctcagttttacgccaccgtatactggatgactcaggggtcctggtactctgtttcttatcagcagttgtctgagatctggggcttccgtcttcgttctttgctaaaccttgatgaccttcataatcttcaaattcctgccaacacagacttgcttcccctttacactcaaaatgatccaaatgtggtgttgggcaaggtcgacggcctcaagctgtactttgcctacttgaaccggatgtttcaccggtcttttgtgcctaaggatggtgatgctagcagcattaaccatctctctaggaccgtgcttctccggtttgatccccctcctcatcgcttccatgtctatcactttgtgtgggaggagatccgcatggcttcaattcagtacaagaaggggttggtctatgcccctcacattatgcggatgatcgagactgtgactcagctccagtttcgccatgatgtgactcattctcagcttcacttgcgccttcttaaggccccctgctcctcagctgctcgggacataccctcctcttctacccagccgcctcctgctcctgagcgccctgcctctgtggctcgtcgtgagccgtctcccttattccgcattttgcggagtctttttggtctttgctccgaggaggccaaaaagaaccgctgattgcggaattcggcgaagaagacggctcgtgatgtcaagttcctaaaggcacggtattatgaggaccaccacattgatatccctccttctcctccgggtttcgaggccgagcccgatgagccggaggatgaagagattgaggatccttttgccgggttgccttccgacttcgacttctttggatatggccatggctatggctatcctcctccaccacctcccgaggatcctcctcaggcgcccttcgcttgagtcgtcagctcatcgtcctctctttttggtgtcttgctgccaaagggggagaatatctatcatagctttagtttatctatcttatccttagcgtcgagcacggttggtttttatctgtatgatattttttgtgttttttatgttaagtttaaagctttgtaagtctattgtttaattatgaatgcttgtgatgtaatggatcctattatctttaatgtggtgcaatatcttatcctctttatatggtgcttgtgatgagatgtaattattcatttgcatgtgatgtgttggatgtgatgagcatatgtgatatatttattctcttgtgagcttcaatgtggatgcaataatttagggggagctctccacttgcttttatgcacactcttagggggagcttccactaaaactttgcaccaaaaaccttaaattatattcattctctcttgtgttctaatcgtattgtcatcaatcaccaaaaagggtgagattgaaagtgcatctaggcccctaatgattttggtgattaattacaatgcgattagagaggactaacatttttatttaagcaaatgtgaaggttgtcatgtcctcaaagagttagcgtaatgcatatcccgtggaatacgttgatgtgatgtgatgcggcaaatgagaaaatgatattttgtacgttttcgtttccttgagttaataggaaagccgcactattaagaggaatgatgcattgacatacgaggagtgatcaaagtgctcaaaatctatttttaaaaggtgtttctcctcagtttggtgtgttctggattttttcggagttttccgaaactcaatttcggactttccgaaaacacacagaaccaaattgtcgcttctggaaattttcggatatgtccgaaagtgattttcggacttttcgaaaaaaactgcgaaggcaaaagtggttctgtatattttcggacttgtccgaaactgattttcggattttccgaaaatcatcagtagagtcaattttgcatctgtatattttcggacttgtccgaaagttattttcggacttttccgagaacatccagaacgatgttgttggtactagaaattttcggacttgtccgaaaagttttcggaatgtccgaaaaatccttcgttgactttgctgttggtgctgagctggaattttcggacatgtccgaaaatctttcggaatatccgaaaatctcaattattgtgcataacgggcagaatctgggctgtggctataaatagccccctcccctcacttgtgagggctgctggttccattccaatcatttgtgcccttggcttgctctctctctttagtacttttgagccttgctttcttgtttcccctcttacccgtgttcgatttggatttggtgtgtgtgtgtgtgagagttgtggattcgagtttgtgtgagtgcttcttgttgacttcgtgaagatttgtgagcacttgcatcatctccgggagttctttacttcatttgttactcttggaggttgaggactcctaggcggctaggtgtcgctcccgagccaccgatctacttgtggttggccgggggaagtttgtgaaggtcggatctcacctccgaaagggaagagatagccttagtggaaagaggagtgcttagtgcaacctcttgaggaaagggttagccaagacccggctcttagtgagctcctcaacggagagtagaatcccctcaaggattcgaacttcgggaacaacctcgtgagcttcatctttggtgactttacttcctccctctcctctagctttgcttgtttgagccgctataggtctagttgctgtttgtgctagcatattcttgttgtaggcaactagatctaggatttactttcctgtttgtgctgactctgaaaattttcggatatatccgaaaatttcggaaatatccgaaaattactgcttccgcttttagttgatttttgaattagcctattcacccccctctaggcctaattgacactttcaatcggagtacgaacgaagtcccagggattgaaacgacgtgggccgttagatctccttttagtctttttatatataaaaaaaagaaaaaagaaaaggaaaaaggagagcgctacagccagccatagccaccacacgcctgcgctcttgccactgccgccctcgtcctggttgccgccgccgtctttgcgccgccaccacggccatagccggaggccacggacgtcgtcatctatcgccaccggtggtttcttttcgttttgcttatttgtggtgagttcgtgctgctgctcttcttctttcgtttccctgctgtagccgatctgatggcttgttgttgctgctgccatgatctgctgctggctgctgctgccgcgatatgctttttgctgctgctagggctgctgctggctgctgctgcgtgtggagattatggataccccatacctacacggcatgtataaccgactgggtatggggtgccatgtatagatagaatatctttaaagggactcgggttaaatattaaacttgtatgtcaaggaaatatccagggttctagtcggttaagattgtattttatctgtaactacctattccgttagggatatggtctgtactttgtaatatggactcctctcctatataaggaggggtccgggtgcctctaggggcacgattttttctcccagatcatacaatcaataatatactcggcagatcaatccccagacaggagtagggtattacttcttgaataagaaggcctgaacctgtataaaattccttgtctctgaacacatctacttttccagcttgatagccacccccttttagtatgccgaaatcttgtttcgccagttggcgcgccaggtaggggtagcgtcaagttcttcgccgactagtacgatgggttccgtctccggcatcgacgacttcgtcttccctcccgggtaggcatttcgattcggcggcctcgacttcatcaccaacgacttcggcaagatttctctcctcgactcggattcgaaccagtcgggaagaggccagatctctgccccgttcggtatcccgaactcggccgaggtctactccaagatcatctctcccgagttggcttcaaaccactcggacgagatccaatctactccaacacgaccagatcaagatgatgggtcctatcccccaatcctaatgagacttcccgacgatctggctgctgtcttcatgaccaaggcgtctcccatccgaagacctagacgggattcggctttagcccagatccaatctagctctaaggaggtcggcgttatactccaacctctcgggacggtctcgactgaagaattggatggctacctcagctctcccggcgtcagttcctgaccaacggagatcctcgagtacgacgacttcggctaccactacgactacggcaacttcaacggcttcgacgatggctatgaggacgactacacgcctctctttttcggcgtatttatggccgacaacgagacggcagaacaacgccgagcccgagaagcggaagaagagcgcacgcgacaagaagccgaacgtcgccgactggaggaagaacgacaacaacaagagcgagaacgactacagcgtgaacaacaagatcgcgaacgggttgcgaaggaggttgaggatcgacgacagcgcgccttggaatccgggcgacgagcacgagatctcatcgggcaacaagacgtcgacgggacagcggttttccgcacaccccagcaaaacgcggttgcagtgatcaccctcctcgacaccctcctcaaggaagatgcgctcaatcaggccgatcatgtcgtcaacatcttgaatcagacgaagaccatgatcgccgcctcgatcccggctaactccgcaagcacccgcacgccgactggcagccgagtcctccctctccgatctcaagactatcaccaaccaagcctcagcgtcgttggcgccggatccaatcgcaggagcaggggtcacgacgagcgatctgtccattcacctcccgaacgacacagggagcgccgagttgaacgacctcgcaggcaccccatcgatcttcacgataccatcaaccagcgccgcgcggcaagaggctacgctccccaccgttcaccagactgctacgatgacgacgtggatggtgtagctaccttcacggccgacctgcgtcgagtggattggccagccggcttcaaaccgactggaatcgagaagtaggacggcaccactaacccggagtcctggctcaccgtctacggtctcgcgatccgcgctgcaggaggagatagcaaagccatggcgaattatctgcctgtggccctagcggattctgcccggtcctagcttcacgggttaccccgtggcacaattggatcttgggtggaacttcgcgaacacttcatcgccaatttccagggcaccttcgaacgccctggcactcagtttgatctttccaacgttgtccagaagtccagagaatccctgcgagattatatccgacgtttctctgaacaacgcaataagatctccgacatcaccgatgacgtcatcatcgccgccttcaccaagggcattcaccacgaagatctagtcggcaagttcgggcgtaagcctcccaggacagtcaagcagatgtttgaaaaagctaatgagtatgccaaagccgaagatgctatttccacgtccaagcagtcgagcaccacttggaagccgaagaaagatacgccgactactggggggagtggaagtactcatcacaaggatcgcaagcgtaagcccgaggaacttgtggcaactactgcgccaacctcccgacaacgttcgcgcgtcaacaccttcgacaagatcatgaactcccaatgtccgcaccatccaaattctaaccacgcagccaaagattgcttcgtctacaaacaatttgcagagcagtacgccaagaatacacgcaaaggcactgacggagatcaaagtacgtcaaagaagaaggatgacgaagatgttgccccgactgattttcaagaccatcgcaaggaattcaaccacatctttggcggacccctggcttatgaatccaagagaaaacaaaatttgactgaacgagagatcaatgctgtccagcccgacatgccccaatatcttcggtggtcagaaacgacaatcaagtttgaccgctcggatcat

SEQ ID NO: 11015 - DNA, 706 bp, Oryza sativa
cgcgtgatgtgacatttgacgaaactaatggctctcaagtagagcaagttgactcacatgtgttaggtgaagaggaggatccgagcgaggcaatcaaaacattggctcttggggacgtacgtcctagggagccacaacaaggagcctcttcctcaacacaagtggagccacttacatcaacccaagccgacgatccctctatctcaagcttggatcaaggtgaagaaggcgagcaagtgccaccctcaccgatcatcttagctcgcccaagaatccatcaaagtatccaaagagatcatcccaccgacaacatcttaggagacatcaacaagggagtatccactcgttctcgtattgcaaatttttgtgagcattactcgtttgtgtcttctcttgaacctctaagggtggaagaagctctaaatgatccggattgggtgatggcgatgcaagaggagttgaacaatttcacccggcaaaatgtgattggcacaaagtggatcttccgcaacaagcaagacgaggccggggtcgtaataaggaacaaggcaaggttagtggcgcaagggttcacccaaatcgaaggattagatttcggtgaaacttttgcgccggtagctagacttgagtcgattcgcatattgcttgcttttgctactaacctcaattttaagctatatcaaatggatgtcaaaagcgcctttct

SEQ ID NO: 11016 - DNA, 962 bp, Oryza sativa
  unsure (1)..(962): unsure at all n locations
acgacgagaacgagcacaagaacgctcaagccgctaatgcaatacttagcgccttgagtggaagtgagttcaaccgtgtggatggcattgagagtgccaaagtgatttgggacacgcttcggaacttgcatgaaggcacggatagtgttcgtgagtccaaggtggagatcctcaaggggcaatttgagagatttgtgatgttggatggtgagagcccaagtgacatgtatgaccggttgagcaagatcgtcaatgagatcaagggacttggctccaagggcatgaccgatgaggttgtggtcaagaagatggttcgagcaatcactccaaggaactctaccttggtgactatcattcgtgagcgtccggacttcaagactctcacacctcatatttgctcggacgtattcttgcccatgacatgctcgtgcaagagtccaaggatgtcatccaatacatcaatcaaagttcaaccacaaacatcaagaaagaagacttggcgttgaaggcgaaggaagaagaagaagagaatcgcaagagcaagagcaaggcggagatcgatgatgaagagatggctctcttcgtcaagaagttcggcaagttcatgaggcgaagcggcttcttcaagggaggttcttccaagcactactccatcaagtcaagtggaagacactccgcaagagtgtgctacgtgtgcaaagagcccgggcacttcattgcggattgccctcacctcaaggatggttcccacatcaaggaagataagaagaagggtgagaagaagatgagaagaaggagaagcacaagcatagcaagcgggaacattatggccaagctcaccttgngatgatcttcggctccgactccgagtcaagctcaagtgatgaagaaggagtcgccacatttgccgtcaagccttcatcaccaccgagactcttcgactactcaagtgatgaggatgc

SEQ ID NO: 11017 - DNA, 670 bp, Oryza sativa
aaccatctgatatgcctggtattcctagagaggtgattgagcactctttacatgttaaggaagacgctaaacccatcaagcaacgactccgccgttttgcataggacaggaaggatgcgatcaaggaggaattgaccaagctgttagcagcgggcttcattaaagaagtccttcatcccgactggctggctaacccagtcctggttcggaagaagacggggcaatggcgcatgtgtgtcgattacaccgacctcaacaagtcctgtcccaaagatccttttgggttacctcgcattgaccaggtagttgactcaacggccggctgcgagctactcagttttttggattgctactcgggatatcatcagatccgactaaaagaatccgactgcttgaagacctcatttattacgccttttggggcctactgctacatcaccatgccctttggattgaagaatgtaggagcgacctatcaacgcatgattcagagatgtttttcaacttagatcgaccgcaatgttgaagcttatgttgatgatgtagtcgtcaagaccaagcagaaggatggtctgattgcggatttagaagaaacctttgcaagcatccgcgctttcaggatgaaactaaaccctgaaaagtgcatcttcggagtaccgttagggaagct

SEQ ID NO: 11018 - DNA, 4340 bp, Oryza sativa
atcaaataaaatcctataaatagtatgatattcatagagcctattgggatataaattttccaaaaaaggtgtattccgtgtattttgtattcaaattttggtttatgaaatttgttcagaatctaccggctttccatcagattttgcgaaaatcgtcattccgctagcgcccggaacggaaggtaatcttggaatcataaaccctgatgagtctactttggctcttgtttggcagcagagtcaacaccgccatctagctgctctaatgcattggataagctggcttttgagcgcatcttccaaatctttctatcacagcagtgaacatgtcgaggtcatcgttcgggttgagcatcgaccgtctacaagattccaatcagcagggttgtagtttgtgctcttcagattcaacgaagacttccatgtcaatctttgtttgagtccagtgaagataaaaaatctacgactaaacatcaaaacttgaaaaagccaaaaccgtagagacagtagggattgccggtaggtcaagcggtgagcacatcagaagagggcccttgatgtacttgtcgcggcattgccgtgggtccccgacgacctcatcctccactattgtgttgttcgatttggaagtttgctttgaaatttcagttttctccttttgaaaggatggctcgatgccttgtgcaaaatcttacaaggcaatgtaacaaggaactgagtttcctgattgtgaatctggtcttaacttttaatatatacttaaaaaaaaagaagaagagagaagacatgctttgtcacaacttcatcacaggtcattaggattagcaattaggtttgtctcaacaaagatatccttatactgtaaataattcatttttatacagaaatttaaaggtaatataactcttgtacagaaacttctttacatgcaaattgaagtactacatctgcttttaaaacgagtaatttaggtttttttaaagccaacagtatataactttgactacttagttctttagcataaaatattctaaataagttttaatactcaaatttaactcatgttgacttcacgtatttttaaatggtattttagactgaagggaaaacacatattttaaaatagattttttagaccaaagggtttggagtaacggagagaaagacaaacctatagcctttgtaaggcgggtcggtagctgtgtggcgccatcggcacatctataagaagctgatgaagagcaacgggtggatccacagcacaccggacggcatggtgacgccccccacctctgttgtctgcttgttggtgtagctgaggtaggatccagtccctcgtggcgaacggggttgcactggcgagcagcacagccaggttccacagccccacggcgcgcgtgacatgtgagagaagtggtcgaagccgaagttgtagtagagcttgacccacagcacgttgagccagtggtagaggatgcaacccacctaatagatctagagctggcacactggctttagagacctgccgtcctttggcttacacaacatgtacaacacatacaaattaacaaagggtaattggatccatatcattgtaaatttgtcgatttgaaaaaatatcactgtttttcgtgatatcgggtcataccactaaaattttgcaaaatttgaaccgtttcattgtcatcaagatttccattagtgcatgcatttgatggtacatttccgtcagcgccttcatttcttctccatctctagcgcgtgtagcaaatctctagtgtacttgggctcttggatggcagcacagagaggacttattgatggtggctcatggacttgaggactaggggcggtgacttgtgggcttctttgcctacctacgttgacacccgtccccgcgctccccgccatgctccccaactgcaacgagtaaggcagaggagacacgcagccgtggcaacgtcgcattggagagagagagagagagagagagagagagagagagagagagagagtagtgaggggcttgattcagcggcggcagcggcaagcttagcacccgacggagggagatggagctagaaaggagcggcgccggtagcggccttcaaatccgacgagcttaacaccctggtggagccggaggagatctttggttgtggcctctatatccgacgggcttgaccccacggtcccctgttgctatagcagacgacaccacagtggaggcgaggttgtgaacggagattcgcgtcgcctcttattcttcccctgccaccgtgccatgctctagagctcggccggtgctcgtttcctgttgaagctgacgagggtgttgatagaaatagtgatggagtatcatggtttgaattttgcaaaattttagtagcatatacccgatattgcgaatagtagtagcattttttcaaatcaacaaatttgcaatggcttggatccaattaatcctacaataattctgtcaataacatatttataattggactagtccttaaaaaaggggatattccctcccattccctatagtgtaaaattgctatggaaatcggataatatagagacgtgatattcttgatgacctgcgcaccggccgagtggtcgacaaagtgcactggtggttcgtaatgcataaaggaaatatcaaaagcgggtaacactacataagtgacactaaaactaaaacaaggtcccaaataagatatgagttactccgaagaattatcatcaactgcaacatcattatctgaaacttcagtctcatgatcatcatcggaagcaaggaactcatgttcagaggaagtcaattccttgtcactttcatcaaggattggcgctgctgtcctggaagtggaagcacgatttgacatcgctccatgtgaccttttcgcacgttttgctgattccctggtttgttttctaggtgatctctttgtgccaggactggtgtttcagctgtataaccccaagtttgagttcttgccacattttgtgagccttcagattcatcttgaagccaaccttcaacattacaagtgtcattgtcttcgcatgcttccattgtagcatcttctttctgcgctgaaccatccttcttcttcattcttgagttgagttgtacaaaaacaatgtcatttagcctttgaacaattagcttgtttcttttctttgtttgagtctaaagagagacatggaaggaggtcactagtctaattcatttaaaagggggaaggagctgaaatataatacatgaagattaagaaaatgagaggaaaatgttacccattcaaatgcactccaatttctttcacaacctgaagagctgcatgtcaagtttagaatttttgtagcaaacccttgcaaatatggtgcttttgatccccagacattccaccagtgagcttgaaacaaaacaatgtaccagatagtacatggttgctagataatgaatgtacttgcagacattaagcataaaagcatttaaagttaccaggattaaatgaatcattgtttttctctctctgcctcttagctcctggatttccaaaagttccagaagcttcagagtatgccaacatttcagctcctgtgatcttgtcttgattttgatcatctggataaaaacgctgaataaacttgtgaacactgccagatattttttctgaactaatgaagccatttctgttgctataaaagtagtaaggattgagataatatgccattaggtgaagttcactatccaacttgccatccatgtaaaaatcaatggcattaataacaggaatgcaaagctcaagctcatttcgaagcaactgagctagctcaatccttgcatccatcagaccaccatgaatgaatcctatagctggccttttatcaccatcaacaaagcgaagaagcttaaccagtgaacggaaaacattaatggctaactctacattatcccaaaatttttcatcagatacaacaactgaacttatccttttagcttgtgcagtttttgagatcttgagagcattgaacctgggcagcagtaaaatgtttataaaaatatataaaataaaattccagtatagctgtaagagtttgaattcatacctgttacctatgaacattcgtttttaactttgatttcaacttgtgaaagctgctcaatgtgagaaatattgtggcaaaacgtgtcgctccaggcctcacgatctacctcttctcagtatatgagcgcatcaaatcaagagttatgtgatggttatagatgaaagaggtaattttcttggccttatccactactctttgcatgcgttgatccttgcaaatcttttcta

SEQ ID NO: 11019 - DNA, 10145 bp, Oryza sativa
gtctgttttcaacaacacacattttaatgtgccgcaaaaaccattgccagcttgatgtgttctcgctttcaacaaatgcaaaagcaacaggaacgacatggctatccgcgtcgactccgatcgcggttagaattgtccctttgtacttgcctgtcatgaaagtgccatcaacacagagcaaaggaatgcaatttctaaaggcctctatcatgcacccaaatgaccagaaagcccgacgaagaacattctccccatattcattcacctcatcgagaatagccatgtgtgtgcccgggtttcttgcctgcatcacctccaatagtgggggaagattgtgataagaatcctcataagttccaaacctcatctccaatgctttctgttttgccctccaagccttgtcgtacgatatctcatatccgtactctttctcaacgtcatgcattatggtgaaaggggacaaagatgtttttctaaccacctttgaatataccatttgtgccacaaatgccgctgtcaggtttctgtgcaccagacgggtattctccaacaaacacgtatgttgctcaaccatcaaagctacccataaagtgtcatgttgtggcttgtaaccatgcactctccaaggacatccaccctgtatgcacttcacgtcatacgtcgtcctatttgaaaccttcaccctgaactcacgcttctggacaaatgcccacctcttcaccgcatcttgtaagtgacctttgtcatgaaacatttgtccaactttcacctgcttactatcataacaccagtgggcatctaaaccatcgtttaccttcatacgactcattgatatggtcgtccaatcatcgggtatgttagtttcgttgtcccacagtgttgtatcttctccttccactacaagcgcaaggtattcctcgttttccacttccatctgatccactaccgcctcattctcctccgctgcatcaacacgcataggcgaatccggttcttcatcgtccgagtcgttggcctcacgattagtaccacgaacaatgacctctccttgtgtattaccctctactacttcttcccctcgaccttgctcagtccgccaaacattttcaacttgtccaccttccaacggagtttcttccaccacggcatgacttgactcccccgatcgatcaacacatgttgtcttctgcaccacgccaggctatagcctttctcccttactttactaacaaacttcctccaactcccagttgacgcaacctccactactctccactgccatccatgttgacccctcactggccacacggcatttatgacaaatttatcgtgcactggatctaccccaaacatattatacaaccaccctaacacgtcattcaaacccatatgctccggtgcattcagactagtatcatggaaggcatatacagtcaaatccaccccgctatcacatatttgtataggagcatcgccataatacagacgaatgggcatatcacctgacatcctgataaaacatgacaaatagtctcacgtttaatcatttaatcattcgataattaccctattacaacttatactatattaccgtgtactaatttacaactattagtaacaaacaactagtttaataatccaaataaaatataacacctttgtacctattttaacacacaacatatcaataatatgtactaactaagaactaatttaaccgtacaattacttaaatacctctaccaacatttagcaataacaaatatgtgctaaccatacatactaacatcgaacaatgcgaaacaattaacaactcttaaaccaattttttattaaactttcatatgcattgtacttagggattactaatgtataccttaacttcactgctggagggcgtcgccaaccctttcctcccggccggcgcctcctcggcctcctctccggcctgctatcccctctcctcgctccctccggcgctcacggcgacgatgtggcgactctcggcggcggctggcgatgtggtcctcaaaacaaatcgaactcgcggcctaggtggacggggctttaaaccggcctgtcgaacgcccattgttcgacagggtcggtggagggccctgtcgaacgcccccggttcgacaggcctcgcggcgccgggtggtgggccctgtcgaactccctccgttcgataggtgagcgtgtcgaacgccagccgttcgacagggctttgtcgactgcccgtcgttcgataggtgccctatcgaattgcacccgttcgacagggacctactttcgtgattttccccggttggccactacttttgcgattttccataaaaataatattaattctcaaaaaaatttcagcccagtcgccagcgcgcagatagagccaaacgccctccacccatagcctgacaagtgggacccacgccaaaatgtccccacatgtcatggacgcctcttgcctggctaccaagtgttcccctgcttgggaatatgtcgctcggccgacctctcgtattattgatgcgacttgcagcccaaaacccccaaaaagccacagaagagagacaggggagaaaaccctaatctcaaggccgcggctgtgagcgctcctcccgtctctcccccaacccgccgccagccaccgagctcgccaccgtctccgttgcctcgccgtgctctaggtctggatgcctgctccccttcatccctcctcttctccgtctaaagccgtcgtgtttagcctccaggggcggctcgccgcggcatcttttttttttctttaaggtggtagtgcttacatggcgatgctctatgtgcctcttgtgcgtggataggttctcggatggaggccgaggcggcggcgaagagggcgcgggagagcggtgacgcggcggcggccggtgccggcgagcaggcgggtatctctgccgtcatccctggatggttctccgagattagccccatgtggcctggttcgttccgctctcttaccctctgtagccctgttttgccattacaatgccacaccctcttgctttgtaaattcgctcgacatggactacaggttcgcttttaatttatataaaaaaggtttatatagtttataaaggagtatattgtttctttccagaattaatgtgtccagttgaatctccgattgggcttcttgtatcatgggacggagcacatcgttagggaactgataaaattctttgccattttttttaaaatttttagcttggttgggtataggggtgggcattcggttttcccggttggtacagttcggtttgttcagctttcagaaagattggtttttaataatcgcaagccaaagtgtctgtgagaaaaaaaataaaccgcgccgaatagactgatctaccttggttttcttgttcggttttcccgaataaaccgagaaattggctactcatggtacggaggtgccgcaggccttgtgcgcgcactgcacggcgacgtttaggctggctgccgtgggaattagcgcatgatctagtggcctctaggggctggtatgatgctatcaatgggcttttgcatggatcgatggaccgtggacgttccacctttcatagacatgcatagatcaatttcctggtttcttcgatttttggagataaaagaccaagcaaattaccgaaggcctaacaagggaaaaaataaaccgaagaggaatccgatgaccgaaaaaaccggctcttcggtttggattggccttcggtttccggtgattttatgcccacccctagttgggtattgctttatgctgttcaaggcttcaagcaaccgtgcagagaaacagatttaccaccctaaaaattctaaatatattaattatgcaacttgcgaataagattttttttctggccacaacacgtgattttttgcgctctagtaatttttgaaataatgtttttgagcccatggcaggtgaggcacactcattgaaggtcgaaaaggtactattccaaggaaagtcggactaccaaaatgtgatggtgtttcaggtaaagatcttttattgcaccaatgctgctttttcttcgtcttcactcaaactggagtatgaacctgtgctgttattttgctttctagtcctccacgtacggcaaggtgcttgtgctggatggagtgattcaggtcactgagagggatgagtgtgcttaccaagagatgattacccacctccccctttgctctatcaaagatcccaagaaggtaatgcatctaatttgcagattgtatgttgtataagttgtaatcctgctggtgtataacgagatgaactcttataattatttgtggttaggacatgcatgtgtgaaatatattagacataatattattagaccttgtcgagaaaagtttgctcgtattcttttgttcatatcaaccatgcacttccaagtactgatgatgataatattttttactgcaacaaacaccaacttaatgacaaggaacttgacaacatgattttggactaattcagagccaaacactggcaacatgtttgctaccctattttaacatcaagttttgagtgaaaagttccatggaaacacaagcaccatgtgaattctagggattcctaggattttcctgcacaaacgttgtcatgacccgaggtcatgacgggataaacaccgccgggaagatagccgggcggcgtcggctcctggagaagggatgtagattcaggctagggagaagaacattattgggagggagagattagactaattgatattcattgcttaacttgagatgaatacaatccatcccttatatagagatgatatgacttgacccataagaaactaactcaaactaactctatctaatcctatcctatctcctaaccgactgctacagtactcgtggtactgtttatccgctaggacttggcctcgtgggcctcggcctctctgcccaacgcctatgacaaacgtgaatgcatttttacattaacagaatcttgtattgttcttagttttgctacttgtcagcattcctattaagttaattcttctggccagaacataataaagtaccatttagttcctttttcttgcatcttttttaaatcgacgtggccaaacagttaagctttgaacaacagcatgtttaggactattgaaattgaacattcgaatacgacataactgaatttatcgttattagtgcttatataacaatgcagtttcagtaaaattttgtaacacgaagtaataataagtggccatccaagtttgttaaaagaactaaaggagtataagttacataaaattaagcaaaagagggcactatgaatttgttatatatgtgaaatatcaccattctgcatttatccttcataattttgtattgagttttaatttgtaccccgtcccttcataactataagggatttaaggctcttttggagagattaaggttacgggaaaaagataatgcccgtcaagattcggtgaaaaaaataaatgaagggttgttggattggctgagtagcactcaaaatcctttatatttgttgacagagggagtaatatgctaagtctctaatctttggtgaacaggtgttagttattggaggtggagatggtggtgttttgcgtgaagtttcacgacattcctcggtggagcaaattgacatatgtgaaattgataagatggtggtagatgtaagaacttttgtttccctggctttctttgattgcatgcacgtatcaattgactattggtcgatattcatatcttggtgatgcaaaaatttgttgatttcagcaaatttgtgttaataatctttaggtattttccccatatccattgtctgtatgtttggtcactctcatgtaatttgcagaattacttggcaatttgcctggtaccagtcaatgtgtagagtgtcactcctgttgttatgacatgtgaattgaattaaaaaggatgtaggaacttggaattaaatatttcttttgctgctaagtacattgaatcttttagaacgctaaatactggacaatgtttctcaaattaattatagtgatgcaatgaaatactttagcgctgaaagtggaaattgtggtccagcagaaaatatttatcccatggtttaccatgtcgtgtatataactgctaagaaatactacctccgtttcaggttataagattttctagcattgcccatattcacatagatgttaatgaatctaggcacacatatatatctagattcatcaacatatatatgaatgtggccaatgctaaaaagtcttataatatgaaacggaggaagtactattgacaaccacaaattgctacacatcatttacaccataaatcccaataatgaagggtctctttgctaatggcatatcattgtgtatttaatgattatatggtctgaaaccaactttattatcttagccctgaagttgaaaggatgaattgcctttgatgctatgaacttttgattatctatgtactccctccatactcacaaaggaagtcgttttggacagcgacacggtctccaaaacacaactttgacttcttgtttctataaaaatatttattgaaaagcgatatatgtatacttttatgaaaatatttttcaagacaaatctattgatataatttttacatttttaaactcaacaactcgagagttattcatgatttatattcccaaagtttgacttaaatattgtcctaaacaacttcctttatgagtacggagggagtaactaatagttcaattttgaagttgtgtttatattagtttataatttatctcgatcttattaagtttccagttcccttggttaatcaaatgaataattaattgaaggggttaaagaatccaggaccaaataaatgaaaagatactgattcaaatataaactttatggtgcctggagcttcactgctacagtcatagacaatgttgtcatgttgtcgccattgttgataacatgccactgtcagccgatggcagtcagcgtatgccttctcctatgctgggagtgaccgaggatggagggataagagagaagcattggtctggatcaccctttcagttctcttcacactgctgctaatagatctgcctttggggtagctgcggccactggagatctgccaaggtacccaaggaaagaaagtgaagagataagtgagcctgagggacaggcaaagggagaggggcatgcctatcttcactgtaatcactgtgtcatggcagtgtgtgttgtggttgttgtccttgttagcaatgcatggcagttagagccagatttaggaaggagcaggaggagatggtgattgaaagatggacttgttgaatgttgggctgaaagtgggctgggtatatgtattgggccacttctttctctttctctattttattgttctgcctgctccctgtattgctctgggctccctaccctatagttcccttatgccatgggctaacctgattcactgtaatgttgtgatgacattgctcgtaagacatagttttctgtgtgatttcattaatttgaattgccagtatgaatagaaaacaactccccccccccacaagtttttgctgtttcatttgttttgtcttgctatgttaatcatctgttcaattatgcacacaggtctccaaacaattttttcctcatctggctgttggatttgaagacccccgtgtgtcattacacattggagatggtaacaactttagaacttgttataccatgtcaatgtcaatgtctgataagcaacttctcctatttttgcaacatatttgtgctttgattaattttttgttgacgagttcatgcaggcgtggcctttttgaaaaatgctccagagggtacttatgatgcagttattgtggattcctctgatccaataggtgatttgttaatcatgtgagtttttgtgtttgtcattgatctatatcatcaaaataatcctgcctaaccacttatccaggaccggctcaagagcttttcgagaagcctttcttccagtcagttgccagagctttgcgtcctggtggtgttgtatgtacccaggcagagagcatatggttgcatatgcatattattgaagatattgtagctaattgtcgccaagtttttaaaggctcagtgaattatgcttggacaacagtaccaacataccctaggtatgctaactgattatttacatgtggctgaattgatatttccttagttcctaagctaaccatgcttccaatgcagtggtgttattggttttatgctttgctccaccgaggggcctactgttgatttccagcatcctatttttaacattgaggataatgagttctcaacaaaatcgaaaggaccacttaagttctacaattccgaggtgtgttctttgctccgacatggtactgccgttgcatgtcattgtggtactgttatctgactgtatgttattgttgttcagatccactcagcatcattttgtttgccgtcttttgcgaagagagtcattggatccaaggccaactagatcaaagatcactgagcccaaggccaactggactggaatccctccgacaagagatttggttgtagcagaaagagcaatgaccccttttttcccatttaaataaaaattggagatgtaaacggttatccaagtgcttttgaattttgtctcagtatgagaacgttttgtatttggtaactgttttcccgcatctcccttaccatttaccaaaatgagtattgctgtagttttcatctgaggtgcttcttgaattcttgcagtcagtctcattttcagctcgagtgagacggtggtttctttgaagggcttagtgctttgttttgggggtttggggggacatggatcctctacctttggctagtaaagtaccatccaaactaattgaatggacagatttgcttatagggagatagagaaggatatggtgtcatcaacagcttcacttaactatttaacgatatttcgacagttagtggtttgggcgttgagtatttgaaaacaattactccctctagataatatgtgctatattatgaaacggaggtagcaggtttctttttgggattggcaacctatattttttttttaaaaaatagaattgctggtttcgggaagtaaagaactaacattttagtgttcatgttttgcgtgaggattcataggggaaagggtaatccatctgaacccattattgccaaagaaataaagtaattcaaccatacactgcatggtggttttaaacttttaattgtttcttatatttctatgttctctgctcatgtgttgccttcaattatgagcgattggcgctatatgttaaataagccgttctaggttcattatgaacagatcgtggaaacaattagcgattggcgaatcccatcaactgaagaatctcattgcactagcagtctagcacgtacataacgagtaatgagatatagggtttacgattctgagatggcattccgttccgggcgccggcggaatgacggttttcgtgaaatccggtggaaagccagtagattccaaataaatttcataaaccaaaatttgaatacaaattccgagtttaccgatatgtttgtaaaaaccggtcggttttgacgaaattccgagcgaaatcatcgaaatttcaataggcaactagagaaagagacaaactaaaaaccgttcggtttgtggcgaaaaccgaacatgttttgtcgataaaccaatgaaaaaaccaaatttgttttagtcaataaaatgtaggaaaaacacgtgataattgaaaaaattcgtaaaaatgccatttcctttaaatttgataacctaccattgataaccaaattttctttttttttaaaccgttattcttttctttcctattgtaaagttcaggaaatacatgggatacacctttttttggaaaaattatatcccattaggctctatgatatcatactatttataggattttatttgattttttcctattttatcaattcaaatttgaatttggatgaaacccatcgaaattccaaacggcttctactttcgagccacgccgaaacctcgggtttccgcggaattcg

SEQ ID NO: 11020 - DNA, 722 bp, Oryza sativa
taacaaccaactgagaattccacggacgatcagacgccgaatgcccaaagagatcgcgatccttaatccatgaagcagcgcctcatactctgccacattatgggacgcagaaaaatgtatccacaatacgtagctcaatctttctccagtcagggagatcaaaacaaccccagctccagtgcctgaaagcctcttcgacccatcaaaatgcatggtccaatactccatcttctcctcgggcatgtcttcttggcactcggtccacttggcgacaaagtcggctaaagcttgggacttaatcgaagttcgtggcttgaaggatatatccagggacatcaattctaaggcccactttgcgattcgtccatttgcttcgcgattacgaagtatatccccgagtgggaacgatgtgaccaccgtgaccgagtgaccttggaagtagtgagataatttcctaacggtaattaagataccatataataacttttgaacctgaggatatcttgtcttggagtcggccaaaacctcgctaacgaagtagattggtcgttggactttttgaacatggccttcttcttcatgctcaacaaccaggaccgtgctcacaacctgagaagtcgctgacacgtataacaatagtggctcttgcagatatggtgaggccaaaattggtggagtagtgagaagtttcttgaagtcttcaaaggctttttgtgcttcgg

SEQ ID NO: 11021 - DNA, 2153 bp, Oryza sativa
ttatcgacattttgggtataatctcattctaccatgccattaacagagtagttaagcatttatttgttttatggttaactttctgttatcagtagactatttatcgaatatgtcaatgggacatgggatttcatatcctaaaactctctgttagcagtagactatttatcgaatatgtaaaagaacctacagctatcactgtctttgtgagttacatgtgtccttttcttgtgtgatatttctagtgaagacaacttgagagcagctctcaataaaatgggaatcagtggtcatccattagaagagataatggataaagtgaagaacaggcactaccaggtactgcacctcacagttctacctttaataagcaatcttctaaacttcgtctgcttgaaccatctgagttatgaaatacacagctagcttgcacgatgacttttgaggcagaacatggtgtctcatgtgatactggaatcaatcatcctaatcagtatttcagtgaaagccagaaagtcttgaaagcaaaggtgggtcaccatagttgatttgcattcatttgtgcattttgtcagcatatgagatgttcaaattgacagtaatttcgttttattccacagaatcaagcagtgcagagccaaggaacaacctaaactgtaatgctgctggcaaaagtcagtccatccaaatgcggaatttcaggtttcgacactactagtctgtcagctgttgcgatgcattgttttctaatatctactggttattggcaacaaatttctaatgttcaattgtgcgaacataaacatcattctcaccctttgcttttttatagctatttttcagtattcagcaatcaaatccatgatatgtgtacaattggcagcaattctaagttatttttcttttaatttctgtttttagttttgatgaaataattttgctgtttttccatatgagatgtttttactcctagatttaaccatgaattaaagttttactcatggtcacattggacgattttcaaatgcccattttttgattcaacggtagtttctaggtttgcactacaaattttcccatttatctttggcttctaaattgcccatgaagttgtggctttgcattctgttcaagtgtgcctcgtcgtttggcctgtctattgttattggaaaggggatataactctatgctaagttctgatctagattttaagagagtatttttctgagttggtttctatgaacttcctgcaaaattcttactctaaacagggttcaaatatcagaacctgctattcctaaactaaggatcattgctgtaatttatacactacactagcaagactctttgaaacttgtagaataataataataccgattcatttgctaatactactgggatgtctgtaaataagatttgcgttaattgtgtaatcatgcccaaaaacagcatgcagaatttttgcatacaaggtaatttctttcctaggaatgctacaactaattccaactgtctaattattctatctacttgacagttcgtatcaagatttcatccttgctgctaatgatatggagaacaacaattactaatctttattctgatgcctagatggaattctattgctttgcacggtttcagaattccaacggctgaatatgtcatcccccaaaagtgatggatgtccctgtaaacatgacttgagcacagaaagtagatagaaccgtacaagtacgtacttgtcaaaaccaaaggaaaccatgattatggatatcaaattattgtttgtgttggtaagtggtaactatgtaaccatggtaactatgaccagggggagttgtgaacacctcatcagttaagttgcgctgtaatgtttctgtaatcgaaaacttgttcgacaaaacaattgcgcttccagatatgcaatttcattaatctgcttgaactattcgatctggctgccttgaccagtctgggctcatgatcctgactagccaaaaaagtctggaggtaaccattcaataaactgtggggcactgatgctgcaggagttctgatgctgtggtagtgcaagcaagcaaccccggcggccgcggcgcacgcgtagaggaagggagcagccccggcggcgacgggcgcggaaggaggagcca

SEQ ID NO: 11022 - DNA, 2805 bp, Oryza sativa
tgtgctggagctgcaacaggacgtggagcttgattacggatgttgttgccagcattgttgttgaagaactgacgctgcggacgaacaacagacgaagaacctccctgtggcatgggctggggtcctaaagtaagacgcggcttctgaatatttccctgttgtgtcttgaattgagcaatccgacgttttttttgctccatgcgattgtacttgtcctcctgacgaatagccttatccactaatttctggaaatcaggataatctccaaccatgagtgggtaagaaagctcatcattaagtcctcccaaaaacttctcctggcgctcttcatcattgcgcacttcttccggagcataacgagcaagacgattgaactcgtgcagatactccgtaacagagcgagatccctgggtaagcgacctgaactccttcttcttgagagacactactcctgatggtatatgcgtcttccggaaagcagcggtgaattcaagccaagtgataggttcagcagtagtcctgttaaggcggaagtgatcccaccattcagaggcagggccatgcaactgatgtgatgcaaatgagaccttctcctgatcagtacactgaagtaaatccaacttcttctctatggcatgcagccaatcactagcttcaacaggattagtggtactagagaaaacaggcggcctcacacgaagaaattctgctaacttgttctgtggaggtgcatggttatttccttggttttgctgattctgaaattgctgcatcatcatgttcataagctgtgtctgttgagcaagaacttgagcaagagtgggattctctccattgttgttgttattggggttgttgggaccattcccattgctgcgagtgttcaccatctggcatggacagggcacaagaagagaaaccggggaaactacttaggacagagaattactttaacttttattgatcttaactgagtttcattattacaaactaaagattctcacaccactaaactcaccaacttcctaacactcaaaagcaaacaaacgcatgcacttacatcccaccactgatgtaaatcacatgcgagccacacacaagcaaactttaagcaagcaaactaacacaacgatctaagacaacgacttaacaagtcactctagttcttccaagcatcggaggtcgattgaaggctcgtctttatcatcttgagttgctacccactcaatcttggaattgttgcgcttggattcttcttctccatcactacttatgatgatgaccggaggatccgcttgagctggggcaactttttctccaccacacgaacctttggcgccagttgatagcgagggacaaatagagctctcttccttgcggtaagacgaatcctggccttctgcggcggtgcttctcccttcaatgcggctaattccttctccaaacgatccaccttgtcttctaacttgcaaatcttaccacgattccggtcttcacgatcttgagcggctaacacagtctccgcatgactttcatccatagcccacaacatctcaaccaaatgcttcgtggtagcatcattctcaattccttcagtctcaaggtaactgccacggtcacttccctggggttggcgaggatggtagcgatactcagtgtcggccaattgatcactgtagcgatcacggagctctcctatggcgatccttgccacttcctgacatgcatggatgtagtttcttcctccagcttcaaacatcactgaggggatatcttcactattactgttcaaggtgactttgactcggcacttctcttcatgacgatcatgaggaatctgggcataaaaaggggcagtcccaaatccaatgacaaaggacatcgtacgcaactcctggacaaaaccctcaacaccaaacaggtactcaggcttgtaacgcggcatctaaagacaagtgaaaggagggagttaagacctttatccaattaatagcacaagtttttggattaatttgaataaagttagaaaatcagagtaaaaaggtaagtaaataaagtaaaccaagctttgcgagataagttaaaacagttggaaacgaggtcacaaattttgtaattttgaataactggtttcaaaagaaatgaaagaaaattataaaatcaacatgctaaatttattttattgcagcaagattaaataaaacagtattgtaaaacttttgctggtaaatgagccattagtacagtaatagatgtacagtactaataacactggaataaatttttaatgagaaccattaaaagagattatgaagtgcatgtgccattagtttggtttaattaaaagagaaagggaggagaacagttctacttttccaatatttttagagggcttctatggataaccatttggcataacctagggtcaaagaggctctgataccaacttgtcacgcccggaatttctatccaaaattccaaacgcttacatgtgtgtgaaccctcgtccaggaatcagccgaggcacacaataacaaattgataatagagtacaaatattactctaattaataagcgaataaaatgtcattacagaggtagatagttcctctcaatcaataaagatctaagcagcggaaaataaataaacggcgcagacggctccactccacaggcagcttgaccaaggctacacctaatcctccacaccatcagcctcattgtagaactcttcctctgatgaatgattgcaaggtgagtatatgacatactcagcaagccacgcagcaaatatgcaagtgcaca

SEQ ID NO: 11023 - DNA, 1868 bp, Oryza sativa
atacttgcccaccaaaatctttccttgagatcctggtacatcttagtactaccagggtgaatggagtataaagtatcatgagcttctttcataactgcatcttttagatctttgttgtcggggacacagattctctcacccaaccatacagttccttgctcatcctccaagaaaccaatagcttttcctcttctcatattcttcttgatctcttgaatatcaggatcattaatttgggcttctctaacttgatcaattagagtgggcttcgcttctaaggctgcaacgaaacctctaccgacaattcccaaatttaatctttcaaattccttgcataattccaatggcaactgtcgtccttctgtagcattgcaatagccttttctgctaagagcgtctgctaaaacattagcctttcccggatgataatgaattcccatgtcataatccttaattaattccaaccatctccgttgtctcatgttcagatccggctgagtaaagatatactttaaactcttgtgatcggtgtacacttctgtacgagtaccgaaaagataatgacgccaaatcttcaatgcatgaacgactgcagctaactcaatatcatgagtagggtagttcttctcatgcggacgtaactgtcgagaggcataggcaaccaccttcccatcttgcatcagaacacaacctaacccaagtttggatgcatcgcaatacacttgaaaacccttctttggatcaggcaaaatcaaaataggagctgatattaagcgacttttcaactcttgaaaactctgctcacattcttccgaccacttgtacttcacatctttctgaagcagtcgtgtcatgggcttagcaatcttggaaaaattctctataaacctccgataatatcctgcgaggcctaggaaactgcgaatctctgaaactgtctttggttgcttccaattggttacggattccacgttactaggatcgacggcaactcctccggctgagatgacgtgaccaaggaatttcacttcagacaaccaaaattcacacttgctaaacttagcatacagttgatgttctcgtagcttctctaatgcaagacgaagatgttcctcatgctcttctttggttcgaaggtagataagaatatcatcaataaagaccaccacgaacttgtctaggtattccataaacaccttattcatcaagttcatgaagaaagcaggggcattggtaagtccaaaagacataacagtacattcgaacaacccatacctagtggtaaaagctgtcttaggtatatcttcctctttgattctcaactgatgataccctgatcgaagatctatcttggagaaaacagtggcacctttaagctgatcaaacaaatcatcaatcctgggtagtggatacttattcttgatagtcacatcgtttagtgcacgatagtccacacacattctctgagtatggtctttcttttccacaaaaataaccggagctccccatggtgatgaactcggtctgatgtatcctttctgtagcaaatcatctacttgcctcttaacttctgccaactcattggctgccattcgataaggtctcttatgaatcggagttgttccaggtaccaaatctattctgaactctatatcccttttaggcggcataccaggtaaatcatctgggaacacatcaggatactcccggactataggaatctcttccaaagttatctggttcagtcttgaccttaaagactcagatgacaatgcatgaacagttacaactcgaccatcatagctggtgagagttacttttttgttggcacagtctatcacacctttatgtctggctaaccagtccat

SEQ ID NO: 11024 - DNA, 5802 bp, Oryza sativa
aagccagtcccgtgaaaattggaatttcatatatcttaccttcttcgtttcttcaggaattttctaaaataattccgtggaaccctcctcgcaagaaaatacctaggtgcagttcctctccctctctttatccaacccttactaatcttgaggacgagattattcttaagggggtaggtttgtaacatcctggaaatctcgattctgaaatacggaattaaaaattcggaataataaaaaatcttttaaaacatttttgcatgctgggatttattatgtatttgtgtgtatttaggttgtgtgccaaagatctcgattaaatcttatctcctaaagggacgccctctctgtccaacgtcctttccttcccttatcttcacggtctgatttattaagtgctttagtactaaacaaatcacagatctgaatttataacccgaaaatctttccttatgtcacaatgcgacatatctttctcaattcttaccctacggttattttaaaccattctactaattctactcgataaatccttcaaatgtctacaatcgattggcgtaacgtatcatatgcacacatgccctcgcatgtacacaccgtgtacaccaactaaaaattatcacaaaaaattctagaaaaattcatacatgtactttcaatagtattacatctacgtgcaaagtcgcatcttcaaattcattctatatagagaataacaaaaaagataaaattttgacaaaattgcaaccttaaaactgtcagattttttgtttttttttgttacggctaaaatataatgaatttgacgttaacattttaaccctaggtgtaatacaattgaaagtatgtgtatgattttttctagattttttggtgacatttttagttggtgtgcacgtgtgtacacgtgagggcatgtgtgcataggatatgttgcctatttatttatcgtgcatcgattcaaatatattcaattctatttctaccgtgacaattggatttgtatgccatgcgtcttccctaaaatttctttgtgccacctgtgttcattcatgcaaagcgctcgcaaagggatcctaattctaacccatacggccttcttgccaaattaaattcctaactaccgtcatacagaccgatgtatagtcgctgtgcacgttcaagtccaagtgacaaatccattttccaacctccgaaattccccagggaagtacaataggactagcagtaccaactccaaataaaataatgcccaagatgtacaatgacctgcaccgtccacctatacgatcccattacccatatactgtccattttaccgtactatcacgaaatccaaaccgaactcaattgttcagataacgcttcactcatacagtcccattcccaagtatacaattcaccctaccatccaattacacagagccaaattaaatgtccaaattatacgatccatagtacagtccaatgcacagatcagttgcaagctcaaatgccactgtcatcccaatacaaaccctaccaaaaatacaaaagctcctattacaattgggccattctcctctctctcccagcccaacgaacaacccagcataagtctattttatctcccccagccgacctagcagcccacccctgttcccttgctcagccaaccaccagaagtctgctctgcctccctcaggcaacatgcatgcacagaacgtgtccgacaaattgcctacaagacaccacagggttttgcacccacctttgccggctcacaacagtagctcataaatgccatggcccctcccaaccaacaacgcctgcacccatgctccaaatccacaagactcaccaccaaaaaccaacaaacacagtgaggaaggctcacaccgaaaaacaacaccaagttcacagaggggaactcactttgtctcccatgcagatagccacaacaccaggaagcctatataaacaccaccacagccatgcacccctccatttcctcctccccctccctgatcgtcgagctctgtcgccaccaccactccattccctcacgcatttgctgcctcctctccatttgccccgccgtggctagcctaggctgagcttcgattgggcaaagggacgggttggccgccgcgcgcattgatcacctgagaacgactaacccctaacatttaacccgctaaccctttcattttcagtttcgctaacctctgactctttctttttgtttcgctaacccctaactcactaacccgccaactcctttactttcgttccgctaacttctaactcgctaacaaactaacctccaacccttatcttgcactaacccgctgacatttatcccctaacactgtgtgttcgcttgttgccgacgatcgaacacgtggtgtgtgcgaggacgaacagcaagcctaggatgatccgtgagccgaccgtcgacgcccgtcgacattgcacggtgtgccgctactcggctaccgcaatgtgagcaactcctccttcccctccttgctctccctcccatcgtcacccttagttttgttgatcgcctcctccttgcgtggccgacacctagccggaccgcgcaccatccctctcccacgcgcctggccgcgccgccgcgtagcctagcctggctaccggctaccgccgcaccgtcgcctgcgccgacacgcccggccgctgccccgccgacgtcttggcctcacccaggacgccgccgagtggccgcgccatatgcgcggcatcgccgtatcacggccacctcgaaccgccatggccaccaccctcgcaccaacaaactgaacaccgtcatcgcgccctccatccccaacccaacctattaactgaacgccgccacccccggtcccaacctccatccccgccagcaagcccctcccctctgcctgccgccggcgtccccattccccatggccgtcgtgccgcccctagcgccgacgagccgacgccccaggccgcctccccctccattaccgccgccaaacacatccaccccgttgccgcaccacccatccccctctcttttttgcgcatgaggagaagccgagggaggaaagtaggaaacagagcgagagaaagagataagacgagagattgagaaggatcgggagaaggagaaagaaaaagaaataaaaggtaggacccaccctttggacttccgttcgtgagccatctctcctccatgaagtctacaacacctccctgactcctccaggacaagcccaaacaccaaggcctctgttgaagtctatgttatcccctagccgagccgagagatggaaaaagtacaccgaaggtccctcagcttgttatggagttacaaaatcgtcctccaaccacaaaaccagatatctggtatcccttaactaatcaaaactggtcacagtaggtcatttagtggttttgtgcccggttttgtcctacgtggcggctgattcaacgtgggacccacatgtcaggctgccacgtcatatttctctcacttccctcctctctctctctcactcttctcttttgttctatgggcaagccggccagcggcggaggagaccaccaaggtaagataggagaggaggaggcggcgggcgacaagacggcgacgacgcggcggcgacgacgacacgggaggacacgcgacaatgacacgacggcggcgacacggcgacggcgatggcgacgatacggcggcggcgacgacgacgaggcctgcgtcatgacgaggtcgatgtcgcggggttctatccctgtctcgtacaattgtttgcagcagttgtacagtttcttacattcttggctctcttgatggtaatcctgctgactcccgtgacgggtttcattccgagcttcatcatggccttgcggctcttcttctcgctcctgctctgcttggagcctttatttacaactgcaccgtgctcaccttcaattcaaggtcatcaaaactgcaaatcaggctataaatctagctattagtaattgctacaagaactgaaggtaacaccgttaacgaaatccaaacaccacgatgcactaacacgtttctaatcagtaaaactactgcacgctgcctttcacatggacagattgcagtattaacgaagacgaaacgcaaaggaggaagagtgttaccgtcatcctcatcaccatcgtcatcgtcgtcttcatcgccgtcgtcatcatccttggcgtcctcgacgatgggagcatcgtcctccggctgcgccttggccgcggcctcctcgggtttgacgggcaccgcggcgctgctcaccagctccgcctcggcggtcgccaccggcgtttgctcgctgaccatgtcgaggaggaggaggaggatccgagcgaggctcgcggttgcaacaatgacttgcggtggtggcgcgcgcaccaggagaggctcgctgttgcaacaactacttccgccacgtccgctgcctcgcttctccgtctcgcggccgcagcgccgccccccgtcgcttcccccaccggcgtcgcgggcctcgcacggccgccgcggagctccgccgggctgccgccgtgcttccccattgctgccgccgcggccgccgccgaggaggaagagaagagtgagagagagaggagggaagggaaagagagatgacgttgcagcctgacatgtgggtcccacgttgaatcagccgccacgtaggataaaataggggtcaaaaccaccgaaggacctactgtgaccggttttgattagttaaaggatgccagatatctggttttatggttgggggacgattttgtaactcgataacaggttgaaggaccttcggtgtactttttccccgagagattgattaacctacataagtctacataatacccttctacagagcccatcattagccacctcatccactaaagtccacaacacatcccctatgcaacccagagccctctctgaaagcagctccccttcggtttataaactcttccaacttcgaaaatccatatctttccaaccgtaactccgattgactccgttcaacttccataatctgaaaacctctacggctcgggcgcccgatcatttggagaaaaatcgggcgctgacgtcagcgatttacgtgcagaaactactttaaactgatttttctcttaaattatttatccaaatcatgatccgattgcaccattaaattcgttgtaattaaatcttcaaaacaagaccacacatgaatatattccgatgaaatttttttatcttattattgaattatttttaaatgttgcacgatgttccaccaggtatatcagaattgtttcactaagtatatcgaaaatgtttcactcgtttaaatcgggtgttgtttcaccttatataataacaatgtttcagcaaatagcgaaagattgtttcagttcactgcaacatttgatctatacatagtgaaacattataagtacactaggtgaaatattttttggtggaacaaaaaataaaacaaattctcttaatagggggtttccaaaatatgtgggtttttttgttgcaatggaatatttcagttcactacaacatttgatctatacatagtgaaacatcgtgagtacactaggtgaaacattttttgtggaacaaaaaaataaaccaaatttccttaatagagggtttccaaaatatgtgattgatttgttgcaggtgggggtaggtattgtggtcgggtcagcgtcatcaacgcgcgcgcggggacgggggcggggggagcgaccgatttttcctccccccgcctggtcgcccgaaggcaagcatta

SEQ ID NO: 11025 - DNA, 680 bp, Oryza sativa
atggagatcacaaggctaaggaatgagatcgaccagctcgaagccagtttaaggaggcaaactggagaagacctgtcatctgtgtccacagtggatgagctcagccagctgcagctgcagcttgaatcatctctcagcaaagttcatgcgaggaaggtactagcacttgcttaaatatggcagaagattagtgcagatcagcatcaaatccttatggaatatacaagtcctccacgatttttttttctttgctcacaaattcacaattagagtttatatgacagaatgtgttaactgcatgaggtgcttgtgtgcaggatgagctcatgagccagcagctggaggatatgcgtcgcatggtacactactcccttattgtagtcgcagttgtggtttttgctgatgagtggtgagctgaattaatatatggattttctgtatgaaatgcagcatcagaccgtgcatgagcagaacaatttcttgtgccgcatggtaactaaaatactcctactagtatgccactgcattggcttaatttctttttgagttcttcctaaaatgttttcatgattcgagtgaatatcctcttgtttcttacgtgtcatctatcctataattcaccaactcgttttactcatcttttactcttacactcttacattcatcattcaacggttcag

SEQ ID NO: 11026 - DNA, 628 bp, Oryza sativa
ccgttcaaccattgggctgagtgggaaaagcttggcgcacacgaaagagaatgagggcttagaaagacacacgggccccttacttggcgcgccagatgacgaagcatggggctcctcaccgggagaccgcgcaggcccccctttgccggttcggccgggggcgctaagtgaggttcttagcccttggtatgtggaatgttcgcgagagagcaaatgcacaagacacggcggatgtagacaggttcgggccgctgagaagcgtaataccctactcctgtgttctgatggatctgtgtgtgaaggagttacaaaaagccggagagcaagagagttcaaactctcgaacccctctcttctggttctggcctcccatcctcggtgggcaaggtcctccttttatatctcaaggggataccacatgcaccacttctacctactcttcttttgggtggggacccaccctatcttgaccaaaacttggctcgcatcttcgcctaaaagcaaaatcatagcttgtccttgagtgaggcccagcgccgtcactcgcctgacacaggggatcaccctgtcattccttcattaatgggtggagatttgcaatggccactgtccgaatgaccctccgata

SEQ ID NO: 11027 - DNA, 693 bp, Oryza sativa
tcgccattattccccttgccttcgccgcttgcgctctaactcctcgtttcctgtgccctaccctcgccgcactcgctcgctctcaagctcctccgccggcgtcatggcacggggctccgcaccgctcgacggtagcgtgctgccgccttctcgcatcgtgagcgagaggcaggccgggctgccgcgccgattcatgccggaatctaccaccggccgggaggtggtcgcgctgggtgagggacgcccggcgccacactacccggggcggtccgtcttcttcctctctttcgcaatggtagggctggtcctgccattctcttctttcttcatggatgttttggagctttatgatctccagatggcgcacctcacccccaacgcggtaatgacgttggccatcttcgcgcacctgtgcgagatgttcatcggggtgcgcccatctctccggctgttccggtggttcttcaccgtacagccggtgtcgccaccgtcggtagtcggtggctgttactttcagccgcgggggccggtgctgaaccgctacattccctgcgttcttcacaagaagtgggacgactggaagagcgactggttctacacccccctcgccgacgaagtgcgccttcgactttcgagccaagccccggcgcaggccttcagctggcgggcgccggtagatctgggagacggcta

SEQ ID NO: 11028 - DNA, 597 bp, Oryza sativa
ttaccgcgtgtgcggggatgcatggtacggtgttgcggacttgacagaaccgctgaatgtaggagcgaagagactcatcgtcccttcgctgtaccgcatgcaagtccgcttcttcacctgggcgcggatatgtgccctggaagttcatggtgaactgctggcacaaatcctcccaagagtggaccgacgcgggtggcaagttcattagccaaccccgcgcctgacctctcagggccatggggaagaaattcgccatgaccctgtcgtcacccccggcggcctcgatcccggtcgtgtagatctggagaaactcggcggggttgacgcttccgtcgtatttttcggtgatggtgggccggaaccttgggggccaacggacgttccgaaggctcgccacaaaggctcgacagccggcaccgccaaccggggacacggggggctggcccccgtgcccggaccgaagtggcgctccggacgaggaagcgtcctccgttgcgtgggcagcacgacgaccattgcgccggcgctcgatattgaggcgggcatccggccccccacgcacatcttcttgggtcggaggcgttgacgagggaatgg

SEQ ID NO: 11029 - DNA, 585 bp, Oryza sativa
gtcgaaagtgagggcaacctccgaccaccgcgcccgccgcgtcgcctcatgggtaggggccgcggccagaagctctcgcttcatggccttgaggctccggcgagaaacgtgagcgcacgctcccccatcgacggtggcgacggtggccccgggctcctggaaccccaggtcatcgtcgccatcgtcgacgtcctcggcggtggccttctgcttggcctcacctcgccggttgccggcgggagccgccggggccttgccctcacggcgctcctgcttcctctcctcctcccacttcctcgtccgctcagccaaacttttgaccgcgcggcagtccgcgaggtcgtggagggaggtgttgtgcacagaacaccacttgccggtcgggcgctccctgctgggagcgccggcctccttctttttgtcgctcgcaggcctcccctttcgggtggcccgcgaagcgccctcgacggcgaggacgtgaccctcgtcgtcggaatgggccaacctcttcttcctcctcctgtcccgccgccctgaccgagcggcggacccgtgggcggccggagctgccacaccggaaccgga

SEQ ID NO: 11030 - DNA, 19058 bp, Oryza sativa
  unsure (1)..(19058): unsure at all n locations
caaatcgattcccgcccatttgcgggtgcgcgcgtgggcgggaatggcggggagggcggcgacgtggggacgcggagtgggggtgcggatgcggaggaaacgggcagcgtggggaggtgggggcgccggcggttggagctcggctccaaccggctggaggaggaagacggggccgataggtgggccccacctgtcggtgacccggagagaggagggagggagacgtgggccggcccagcaaggaggagggcggcgcgggaagagtgggccgacggcccaaaggaggaaataaaagggggaaaaggaaaaaaaagaaaaagatttttcctaggattatttattgcggtttattgtttttaattgattaaaaatatttcgagagctctgaaaattccactaaaaatcttgttagcgaatttcgacatgtagaactcaagaaaaattccacatgccaattccgattattatttgcatttattaatttgaggaattagctctaggttaaattaaacaatttcttcggacgatttattttatgaattttaaagcaaggagaggaacttcagggcgtgacattgaggcattatctgttgtccaatgaatgcactgtcatatgtaaagccgatgttgttaagtacatgtcggctccaattttgaaaggaagggttggaaaatggatattttctttaactgagtttgatcttcggtatgagtcaccgaaggcgatcaaagggcaagctatagccaatttcatcgttgattatcgtgatgattcaatcggctcggttgagattgtgccatggactttattttttaatggatcagtttgtactcatggttgtggtatcggcttagttataatttcacctcggggggcatgctttgagtttgcttatactattaaatcttatgcgactaataatcaagctgagtatgagacagttcttaaagggttgcaattgctcaaggaggttgaagccgatgctattgaaatcatgggggattctttgttggtaatcagtcaattggcaggagaatatgagtgcaaggatgatacgttgatagtttataatgagaagtgccaagaactgatgaaggaatttcggctagtaactttgaagcatgtatctcgagagcagaatattgaggccaatgatttagctcaagaggcatcgggatataagccgatgatcaaggatgttcagattgaagttgctgccatgacggccgatgattggagatatgatgtgcatcaatatttacagaatccatctcagtcggcttctaggaaattaagatataaagtgttgaagtatgctttattggatgatgagctttattatcgaacgattgatggagtattgcttaagtgtttgagtgttgatcaggctaaagttgcaatcggcgaagttcatgaaagaatttgtggtactcatcaatcggctcataagatgaagtggttacttcggcgtgcggggtatttttggccgacaatgttagaagattgtttcagatattacaaagggtgtcaagattgtcagaaatttggagcaattcagcgagcaccggcctcggctatgaatcccatcattaaaccatgaccgttcagaggatggggaattgatatgatcggcatgattaatccaccatcgagtaaaggacataagtttatattggtggcaactgattatttcaccaaatgggtagaggcgattcctttgaagaaggttgattctggggatgcaatacagtttgtccaagaacatataatctaccgatttggtattcctcagactattacgactgatcaaggtttaatctttgtgtctgatgagtttgttcagtttgctgatagtatgggtataaaattgttgaattcttcaccatattatgcacaagctaacgggcaagccgaggcatctaataaaagtttgatcaagttgattaaaaggaaaatttctaattatcctcggcaatggcatactcgttaagccgaagcattgtggtcttataggatgacttgtcatggatcaatccaagttcctccttataagcttgtttatggacatgaagcagttttaccatgggaagttcgaatcggctcaagaagaacagagttgcaaaatgatttgacagccgatgagtactataatcttatggccgatgaacgggaggatttggttcagtcgcgattgcgagcacttgcaaaagttactagcgataaggaacgtgttgctcggcattataataagaaagtggtgcctaagactttttcggaaggtgagtttgtatggaaattgattttgccgattggagctcgggatagcaaattcggcaagtggtcaccaaattgggaagggccattccaaatacataaagttgtgtctaaaggagcatacattggtgtagagggagcagagcgcgacgcctcttgcggtggcggcggcggacatctccttggcgatgatgcaggtgcacctgccgacgttgaaagggagagggcggcagaggagggcgcggttggggagcgtcgcccatgacgaggccagcgccgcctcgttgtcggagaggtcccaagcctcgtactacgacgacgtcagcggcggcccaccgcctgccctgctcgcccgccgcggcttcctgttggggacggctggcgctcgcggccggatcggccgccgccgcaggccccattgccggccggcggcgggataggggggagaacaaggggaaggggcggcggcgaagcgccgtgggtaaggggatgggaggatagagtttgggagtcttttactcctatgccattaaaaaagtcgctgctgacttatgtacccaaaaaagtttggagtcatctgtatgccatgagaaaaactttccatttcgtccaccttctgttagaactgaacggttccatagctctgacatgtgggaccatgtatgaaaatgactaatttgcccttaaggattttcagctctattctcctctcttgctatctcccgagagtgcctgctctctccccgttgcgctgcacgccgccgcaccctaaccctagccgcacgccgccgccgccgcctcgcctcgtcggagtcgtcgtcgccgccgccgccgccgccgtgcgcccagggcggcgcgcccctacgccagaccgtcgcgcctcctcctctcctccagggcccacgcgttcccgcgtcctccctcgtcgcgcggcgcgtgggcggcacgcgcagcgggtggtggttggtctgggagggcggcggcgtcgccggtcgccgggtggtgcggcgctagggcgcagattggggccgtcgcgccctccgtcgatggccgccaccgcagctgagcgaatgagatatttgcggtggtcacgtaagattcgaatcacgatgtgctagctacggctactgctctcgtgctatctctagatctctcgctctcgctctctcgtgtggggtttcgagatgcatctgtatatagtttggagttctcgtcttttgcgagaaacggaatttggaattatgcgatggatatgccttcgtcatggatgctgcagctttctctctctgtgggtggaaggtttccctctgcaatctcgaagcagagctccatgtccagatttgatggagctggaggaagtcgtgctaatgctcgcagttggtcactgaccacctttttcgctgggatattatttttctttcttagaagtatctcctggtggtttgatgatgatgtcattctggctccttcatgtgttttgtgagccgccaacttagaattggtgccctttggaagctctatgtgtatgcttgattcgaagcattaaatacaaaaaaaaaagggcatatgcttgtgttagtgcgaagagtaaaatgtgctgtcgatgattattcattttttatgtattggacaataatacctgcccacatgaattcctgtcactcacaccaaactacaatatttgattacccgttatttgtcggtatgcaatagttatgcacctgttttttcttttttacaaaatttatttccgatttttccttattttttccaccattttctaatttttcccacattttccttttttttttcccggattttaaacatttttaaaatttattctcacttttttctgatttttacccttttttaatattattttccattttttctgatttttaacgcctttcctaaattatttttcacttttctgattttttaaacccattattatacaaagggcaaaattgtctttacacagcccctaacacctctgttatgtctccatacattcaaaatggcacacaggtcaacgaaagttgggctcatggcatacatgtaactccaaacttttttaaggcacacaggtaagcagcaacttttttaatggtataggggtaaaagactaaggggtgggagctggaaggggaggggataaatatgatgttttttcgtaacaaacctcgtatttttcatgtttacagcgctactcctaggagtagaactctatcttcttcgtgttctatttctataaaatacaagggttgtttcgtataaaacggaatgtggtgttagtcgatgggaggacgttcgcgctattccactcaaacacgagttgttttttttcgcataaataccaacacgtgtcatttgtttcgaggagacaaaacgtggcacgcatgtagtgggagaccggcagaaccggtggagaaaccgaaaaaaaaaaagaggaatggctccacagctcacccaatcgaggagcttctacaccctacatactacatatcacacctaacgaggagaaaaaaaaaattcaaataagagcaaggataatagtataactcacttcctactattagctcattttaaagccaacatatataatagattagttataaggttggctatatttttcttctcttctctctatctctcacttatgcattcaatatatttgtcttggagcttgtgataagctagctcttgcatgagagcccacacctttgattttttactatctctctcctccacctaagtttatagtagacttatagctcactattatacttgctctaacaccacacaacacatgcagtccaacacgtaatcaagcacgagaagccaaaacccaatttcaaatacgtgtcactagtaccgaggagccaaaaaaattaaaaaaatgagaaaatcagtagcactaggggttttattaattgatgaggtacgtagaaaacggagtggtcgattagcgcgtgattaattaaatatttattattttaaaaaaatggatcaatataattttttaaagcaaatttcgtatagaattttttaaaaaacactgaattttttaaaaaaaaaacacacatcgtttagcacatgattaattaagtaattattttttaaaaaaaatagatcaatatgattttttaaagcaactttcgtatataatttttttaaaaaaaaacatatcgtttagcagtttaaaaagcgtgcacacgataaacgaggaagatgagttgcaaaggtcaggaaaagaactcaactgggctacatcaccattgtttggtactatgtcaactcacctcaccatttgctttgccttttttttttcttcttttggttggagttcatctgttgtcctacaaaattttgcaatattcattttcccacttggctcctaggttatttatttgaggaaaaaaatcaaaattctaatgtgagctttcttcttgcaacccaagttattttaaaccgaacattgagccccctaaagattctcaaaagatccgagcaacccccaagtagatttgcttacatgctgcattaagccattgacccaacggttttcattgctaacaggctgacctaattatatcttggcatgacgctacaatctttgtagttgtgacattgtattatggtatttctagtgttgtcaaatacaaggttacggttttctgtttttcaagccaaagaccacggcttaaaggtgcgtaactgcacagtaaccacgaccttacctttaagatttgaaaatttcgaattcaactttttggatatgaaattcacgtggttcgtgataaccaccgtaccgaatgtgggatgaccgcagggccggacacatcctctaatgcaacgtgtaccatattttaggaaaccttctgctgcactacatgaaattagcattagcaaacagtgctacgatgttcatcgacacattgttcaatcacatgaaaattaaaattactcagcgagacagttaagtacagtcaacatacagatgcaacagtttgcttctatttggtctttatcccatcagtacctttagaaccaccatcatacgcagaaaggaagaacgaactctgattcttctgcagaaacctaccatgaattcccaattgatttagtgagcattttggcataaagtatgcctaactatcagggattgctacaatctggttagcacgtgattaaaattatggtattgaccggaaaattaattgtgtgggacagattttcaagcatgttttcaaaagtcggctaacttgagagatgctagtatatatagaagaaaaataacggctggaaattgcatgaagaaaatgaaggtgctaacatgatcttgcacgatatgttggtggtatatgtgaatgggaacatgaaaataatgcgtgccgtataggtgaatgtgacaacccaatagaagatgcaagnaaaagatttttgcgttgacttgaaagagatggtgccaagccagattttnctgcgtagtgagtgttgtngtgaggtggcgattcttgctctnccatgggttgacagcagcgnncaagtgaagcgtgccgggcaaatgttcgacgtgcagagagtcagcagaagaaaggtgaagcgcctgttgcaagacagttgtgactcttgccgttcgcaaagttattcgtgtgctcgaacatgcctagccgagcacaaacacatctcatcgttaaaacaaacatccttngtatttcattcaaagctaatgagggaaattcgcaatttattcatacttgtgaacaattatccagactctagttcaaactataatagaatacacaagggtcacaatagtcgattttaccctcttcaactatagccctaacctaaaaatcaaccctcaactatgaaattggacattttcaagctcaactaccaaaaccagttaaagcactaccaagagcaatcctaacaatttgtttgacatggcaactatttctacattgcttgcaaactaggtgccatgttagcaaaaaagtagataatttggatgccaactctgcaaaagaaccactgtacaaatcagattggactgatcttaaggggttcttttgatagttcaggggtgtacaccgtattgtttcatggctaagaattgatttctagactcaacacaatagatgaggagggtaaaataaattttactcagtcacaacaatgaattcaaaagtgaaactgatataattggtttcaacaagcgaataagtttagaaatgaaataaaaccttgaagaagtaaatttatatgttacattcaggaaggaagtaaacttttgaacagacaataaaccttgttcctaattgtttccttactttactgaataatcattcattggtggatatctcatgtaatcaagaactgcacataccaaaaaggcgcagtagatgctcagctccatatatagttgagggcgaaacatcgcctttaacctcttcagagtactgctgtcgctctttcttatacaaaagcattgcaggcaatgctttatcaaagtagcatcgcaatcctttcaaaatctcagcgtaagagtcatttatccttcagtacaaagtacaaacaatacaaagttttaatgggtcttttcaagaaaaataaatattttttaaaaaaacaagcttgacagacacagatgatgcaaataggttttggataagaataacataaaatctaaacctttgttgcataaggacagaatttccataattatggttattaatatgaatattaaaatgattttaggacatttcgatatagtgaaatttaaccagaaagagttaaaggtcagttgatggttttcagcatagtacaaagaaaaaacggcagaccagcagtctgaccataggaaaccagaattggcaacctcaatggttctgtttgcttcatggactgttcatgcaattagacaggtaaaaacaggcaaattctgggttacatgtgaaatctatgaaccatgaaaatcttgaaccatgcagccaatgtgcaacatgaaacatttgtccagggcatggaccaataaatgctggaactctccttgtgaaggcacacagtacaacagaaataatcccaccggtgaggcccagccactgaaccagaacagatgcatttcaatagctggtttgacttttggtgctttggttttcagtcatgttaagtaagagaatgacatgcacatagtaaacatactgttggattatgctgcacataataatcagtaatcaagcgcacagaacacataggatgaattacaaaccctaagctaagagtgggaattctgtggttgtgctgttgcaaaacaaagatagaaggtgccaggtgcagcaattgctgtttgcaatgttcacatgtgacgtggttacagtagtccacatcattagttgatttatttaagttaaatttatcctttaaccacaacttacaaagcatgctatactcagcattgttccacaaagatataattggccataggttttgtataactttggatggcaagttgattaatggcatgtgggtcatggggccaataaagtgtgtgccacactgccactaatttagcaacaaattggcctataaatgtcaaatttgcataagttttggcatattatgggtatagcacaaagatatgaatcaacaatacatgtcattcccatgtccgatacatacaggatacagccatatgcagcattccagtgtatctggacatgtcagtcaagtttagcatttaaaattaacaaaatgagatacagcaggcccaccatctgcgtctcataaaaatccacaattagcccaatgtcatactaagcccaaatccctctgtggaagcatactagaaaacttgagaaaactaatgagcattcttgaggaaatgcataatcagaaattcagaataccattttaaggtcgcattattcctagaagctatcctagggtgaaaacatattagttgaagattgaagggaaaggcggcacaaagacctgtccaaaggtgatagtccctgtctttgttttagattatcctgctatatgtggtggaacctaccacaattcatgaatattcatctgaatagccattttttgataaaaacctataatatactacacaaacgtaacttttcctagtttgtcagtgagtaatcttaaactcagcgattctcatgcaccaacatcctcctttttttttctgtttatttgttaaaattagagtaacttccaatattttctgaaaaatacatcaattctaattcaaaaacatgttaggctataatatctttccgcactttattttatcccttcttcaaattaagagaattataacttttctgcacctctgaaagtttactcgttcccttatttgcggctcattctctcaatgacatgttggtccagggtccacatgtcagcaagacattaggggtaaagggatcacatggatttccgagtagcaaataaggaattgcactaatgacactaacatttgtttaaaacatcatggtgtatgcctcaatacctacagtagaattccgaatcccgtactgtttataacttgctgtgtcaaagatatgccaataaatcagaatttatgtttatatagaatgcttacttgttatccttctttgtccggtgctccaagtacttctttagaatatcatcgaccgtgggggaccgaggtagcttcacaagctgcagtacaaggaaattggctcaggaaaggaactggtagaatgataaacagttacagttaactttggcatacatcactgaggacaaactcatcgtattcgtagttttctaacaagtaccttttcacatcagggattagtgcaacataatgacttgaaacactcaagtctatctagttgttagtaattcttacttcttgaaatagtaacctttttggggaaacttaattcttataagtttccttaacatgagaaatgaacatgacaacatattggcatcagtcaatcatgttcaaaaagatgcagaaagtccagctccacagatacacgaaatatacaaaagatacacaatataactaatgatctaggtaagtttgagtggtatatatcaaggttgcttatctaacagtaaggtggtatatgtcaaaatttagctgcggaatgtacaatgaacaatatatccactggtcaagattgctagtctttttttctgaacgaaataaagatttcaagtattcattctcttattggttcctatttgatacaaacatgcttctcttaagtacctgttgttcccatgccaactcagacacaatattcaattataattgaacaatgaaggttgtgatttggacataaataaatcaaagacagctcagggaaagatttgaataccttacccagctgcgtgacaaactcccaatcatcaacaagttgcttttttagcgttgaaggaaaatgtgacatgaagagactctcagatgattttctttctttctcctggatcaaccagggcagagttgtcattatgtttacaaatataccacaaaacaacttgatagataaaatgatctaccacatgcttgccaaatatagctgaaagcttcaaaatgttaagtttgtcagtctccataaccataataggtaggtaacgaattctcttcgcacaatgtaaaacattagttcatagttccaaactaccaatttaaatttaacatgtgttctaaatttatccatactaacaattcttacacagctagattatttttgctggtaagcaaacatcatgtagtccagaaatcggattgttgtgtaaagaactaaacgaagcaccgaagcagcaagatttcctaaaattcatcattacaattttagaaatgttgagaaaatgaaatagtcatcatcatacaacaaaaggtcaagaactttaagtgttatacttatattgtaaaaagagaagaaaggtccatatggaccatagaatgttcccattttccacatgtatgatgaaaaatgaacataactgccaaatcatgtacttcctccgtttcacaatgtaagtcattttagcatttcctatattcatattgatgttaatgaatctagacagatatatatgtctagattcattgacatcaatatgaatgtgagaaatgctagaatgacttacattgtgaaacggagggagtagtactagaaataaaaagagaattaataaaaaagtattattagttcaaaggagcagaaatatgcttaatatcagtagtttagaaatgatatctcaaaaggcaaattgcagtatcataattgatggaaaatgaacttcatggaaatcaaatacttcacaataaaacatatttgaaagtgagagacacctcagtcccaccaggctgacttttgcgtttcttccccttgactgcagttttaacatcacagagatcaaatgtaataagtatcacacaaatgagaagaaccaagaactttgaaaaatgtacgagtgaacttactaataatcttggtgtcttctttatcagtttttgcatctgctgaatgcaattacaataggtaagacatatttaagaggaacaaattacaaagtaagacataaaatggaaacccatcctttggtggaagcatgggaaaaattttggtataaccactataacagcatgggaaattccattctcaatgtagcaaatagagtggtagcaccccattaagaattcaacttcaaattgaatgtgtcagaaacaaaaatatttgttgcaaataggaacttctattgcaaataggaacttctatgttttctttccctttggtttaccatttgtcatcatttcttatttctagaagtacaaataaaattgcagttcaaattcaataaacagatagtttaacaactgaaaagaacatatacaacgttctgagagttttcatgctgaattggtgtcaaagccatggcagttttcatgattggactgagagatagtttccaccataaaaaacagaaatatgatcatgagttcataaccacaccgatatgaaaaaagatgaatgggaaatttcagaatgtcctatatgcacagtaccaacgcccataacagtaagctaccacgtacttgtaccagaagctatcacaaaattactccaagattggttcataactccaaacttcggaagaaatatctccaagggtgaagtttgagcttaatccatcaatgtaaatgatcacagcattcagttataaccatcacatattcacaatctctttgccatttggcatttctactcttttaagtacagattaagcactgccaggatgatgcttctattagcaaaatacaaaatttatcatagaaacatgacactcacagctacagaacaaattaaaaacaacaatttggcaaaatagttcctagaaaggaagctcccagtggaatagtctagacatgatccaacagcacaaacattgatttaacatacatctagcttgtcatggatagaagtaaaaactattgacccagtaaaaaaagcatgtgtcatcaattccaatggaaagaagagggaggcataagctaaccattagagccttttggcttatgctgcgctgaccgtccagattttacgcttttgtcaactacttggctcttttcaagctcttgttgtttgcggatattttcgtcggtcaatttcagtaagcgatcatttgtgacccattcatcccagctgtactcattgaaaataaacatattaagaagactgtttacttgaattaggagagcagaaagacaactaaatagcatcagtgcaatgatagaaacaagcccctcaacaggattcatgaaaatactattaagaaaaaaaattgcaccgtaagggcaaagatgtgagactacccaaacatggtggtagacaacaatatggcactgccagaaaaaaaataatacattagaacatgcataaggtcattcatatccaactcaaggtccaaaatccaacttagacacttttaaactgtcaagggcctcagtgaaatttttcatccagcacaactattaaaaaaatttgtgttgccatcacttcaattcacacgtagaaaatggattggtcatatttaaatatatgtcagtcatccgggctccaggcactcactcgtatcctaaaacaaaagtcaacaaaacgggtataggatcacttccccaactgagacacagatcatgttctacagatgaattcatcaacataatcattcaattatcatatttaaaattatgttccataaacgaatctaatggtttcatttacaagtgaatctataaatagcatttgatatattggtggtcaaaactataaaagtttgattcgatggttttaaaaaacatcatatatttccattacacaacaaagagacacagagtagccagagcctgttctgaattctatggattttatatgatgctatgatgtagttctgaattaatcagattgaggccagtgagatgcacgagaagctttgcatagtttcactttcacatatctcatgctactatatgtaataataatatcaattgcttgatagaacaaacatcaaatgcatcatataagtacaggtacagatattccttgtacggttaaaaaaatattcacatcaacataaagaactcgaaagcattggtaataagttattagctaagcatggaagacttatcgatcatccatggtatgcacttgcctcttattccaaccctacaaaagaaaagagaaagattcgttggttcctcgatatcgaaagggaacacccaaagttaatgatttatttttaagcacttgtcatggtgtacaatggcgacagagacttaggggacttacaagataatggacatgataccgccactcatcctccttgttttcggacttttgaaccttgagaaatccaaggggggagggaaatgaagacaatctattagggaatgcaattaacaagcaaaagaaaggctaggaaatgatgaacggaatagcacagtgcacagatatgacctagactagactagcagaaaagcacggcaagcagagggaatttaatttcctggtgcggaggattttgcacagtaattagtaaattactaaattcccttggtaaatactagtaatactagtaaaaatttcaaagtatcggagcggagcagcgcagctatggaggcgaatgcttgtttgtttgattgttttgtttggtctgcatccgaattgggtaaatcctagcgccatttcttcgcaaaattaaacgaaaccctaggttggattggagcggaatggaacgggagatagggggggagaagagagggattaaggagcggaccttggcctcgtagaggagcgggccgtggtaggcgagcactctctcgccctccttgaacgacggctccttggcagcggcggattccgatccagcttgggacattggtgggggtactttgggggaacaaacaaactgttgcttgtattgaggtttagggttctgaaattcggagaagagctccttcttcttccagatctagaagaagagaagctagggttaacgaacgaacgccaggaacgacgagagatgaatcagaaagaggatgtggatggatgctcaccaggatctcctcccctctcctgctctgctcgccaggaacgacgaggagacgggagatttctttcttttacgcacgagcacgagtcgtccaagaatctttagagagagatacttcaatacacagcactcacttatcaggaaaaatagagaaaattgtgattttgctatcgcgctggaatactattccttcaaagtgattcattaaaatgcaactaagggtgttcactgaaatgctattttgggtctttttggtttctagaaatgatttagctctattttcatttttgttcggaccaaaatacccttgccttgcctcagataggtttttaccggatggaatcgatctcatcccgttggcatcgaagctaactgaggaggagcgacatcggcagcggcgacatcgtcgcgcctccgcattgggtccggctccggcgccggcgccggcccccgccactctccgacctgctcctcccctccctcctgccccagtccactcgcgccgccacctcggtaatgacctcggcaggtgtcgacgaagagcgtggaggcctcaacgatggcggccgcggaggcgttggcgttggcggcagcacaggtgggaaggagcgcgccgagcctagcggtgttgacggggaagccgaggaggagcgagtcgcggagcaggtggcagaagcacccctccccgccgtcgccactgggggagacgccgcggaggaaggccgcgcagcgggcctccgagggcacgggcgcgggccgcgcgggcggcgccaccaccgcgacgtgcgccaggcacggcgccaccgacactatggtcgccgcgcacggcgtcgccggcggcacctccgagatgacggggctgtgccgacaccaccccggtgccgggaagacggggacgtgcgccaccaccactgctgccatgttcgtccgctcgcgtcgctgggtcaccgcggctgtcgccgaaacgtcggggtgctcgctaggtagacgccggcctcccctccccgccacgcctgctgcgccctccccacgcccgccggcggcagccggccatcgccgctcccgagagaggggaaaagagagatgagtgagtatgacaggtggggcccgcatcaggggtattttggtccgaacaaaaatgaaaatagagctaaatcatttctagcaaccaaaaagacctaaaatagcatttcagtgaacacccttagtttaggatagcattttaatgaatcactttgaagggatagtattccagcgaatccattcttttgcgatagcaaaatcacaattttctcggaaaaataggccaagtagaaatactccctccgtgtgaggttataagatattgattttggttaaaatcaaactgctttaaatttgactaagtttataggcaaatatagtgatatttacattaccaaattaattttattaaattaataattaaatatatttttataataaatttatcttggttcaaaaatattactgtttttttatataaacttagtcaaactgactttgacaccaaagttaaaccatcttataacctaaaatagagggagtagtaagttttagagggttatgaccgttgcaatacaaaccgccaatcagagctcttttatctagcgagtgtgttcttttggatgggttagattaacacatgattaattaagtattaacaataaaaaacttgaaaaataaattaatatgatttttttaaataacttttctatataaaccttttacaaaacacgtaccgtttagtagtttgaaaagtgtacatgcgcgtttgaaaagtgtacatgcgaaaagggagatgagtttcgaactcattagagagaaggggctacgttcttttgttgaagatctcaacagcaaggaacgaacgcaacccagaagttccgaggggtcaatgagattcgttgtaccaggagtagggagtaggtgagaccaaacaacttggtttggaatttcttttattttttagactttgttatatttttttaattttattaatagacatttccgaaaaatatttttgagaattgaaccttttggacacgctggcatggcaatatgacattgctacgctgctacgcgtggcgtaatttagtaatacacttcgaaaaggtctattaataagataaaaaaataaaaaaaagtctaaaaaaaaactccttagtttgacatccaacttcacctcttctaaagctaaaaccgaactaaataattttaccaataattttacctccacccaaaagggagcattatttagctccacccaaaagggagcgaaataggctagagtgttctcatgaaatgaattagagaggtgatgctacattgtagaccgaactaaatagttttagctccacccaaaagggagcgaaataggctagagtgctctcataaaatgaattagagaggtgatgctacattcattgctacgtttcacaactccactctagatccagctatgagaattaaatttaaaagtagagcaatgctaacattgtgttctttgccctaagttcctaactcacatctatcgttttccacgcacacgctttttaaattactaaacagtgttttttcaaaaaaaatatctatagaaaaattactttagaaaatcatattaatttatttttaagttgtttatagctaatacttaattaatcgtgcgttaatccatagctctgttttgcgtgtggagattgattagttcccaaccctcctccaaaagaacacagccaagtaggccctagaatactgacttaaaggttgaaaaaaaaggtattttcttctttgcattggcattatcctattcttgaacgggtggatcgaaatgttctggtaatgttgtactgccagaatatatagatgtttctgtatcgagtgaaacccccatagtccatactatccatgaaagtaaatgcaaagcacaacataaccagatctgtacaaacgaagggcaatgacaagatgcctaatgaatcagtgaagaacaaatagtttgatttctgcatcctaagatggtgtcctagaaatccataataggcactccttcctaagaggagaatccgcaaatattgctttgacaaaattttgtacctgcacaaagtaagcagatttgtgtaaatttagcctaattatattttcagttttagaaaactgaagtatcaaaataaaacaaacatgatagtaaacagatttctaggactatcaaagaaaactcgtgactccaaaggtagcccaaaaatctactcgctcacctcagacgatgtgaaaccacaattagttaactccccactttcccaagcggccgtgatggatttcaacgacatatcaagcagctctgagtaatattgtagatcactttagtattttcttgaggggaattaaaaaaacattaaacatatactatgaaaatcatagcaaggtgaaatatacccgctagcttccggaacttcttcaaaggtcgtataatctcatccaactcgatccaagtttgatggtccaagaactcattctcaaccagggacagaaatagtgatgagaggttttcaagagccaaatggataagaccttgcagctgtccgcatatcacatataataaatatcaagaatgatgagctcaaaccttccaaggataatatgtctcacctgtaatgtctcctctgctgccatgtcatctattaggagcatatcttttgtaattctagaaaagacagatccaaggatgtaacacatacttctcttgtaaattgatcttggcagtatcgattcccacataatgtgtattttttctaaaatgaacacaacctgaatggaagtcaatatataccataataatgcatcaatgtgcagaagtatgacctatattttgtaactcaaatttgaagaaaaatcaagacatttagttgacagattgaattggttgtgattgatgattttgcgctagataaagaagataattgtgattccattgcaggacatggataagatgttaagaacaaattctattctactgttgaccactccaaaagtacagtaaccggtctaggttattcactactatttctacaaggtccaagtaactgacatctttgcaatgaaacatacctgctcaatactgaattttgctgattcataatgctgaggttgg

SEQ ID NO: 11031 - DNA, 787 bp, Oryza sativa
atttcgaattcaactttttggatatgaaattcacgtggttcgtgataaccaccgtaccgaatgtgggatgaccgcagggccggacacatcctctaatgcaacgtgtaccatattttaggaaaccttctgctgcactacatgaaattagcattagcaaacagtgctacgatgttcatcgacacattgttcaatcacatgaaaattaaaattactcagcgagacagttaagtacagtcaacatacagatgcaacagtttgcttctatttggtctttatcccatcagtacctttagaaccaccatcatacgcagaaaggaagaacgaactctgattcttctgcagaaacctaccatgaattcccaattgatttagtgagcattttggcataaagtatgcctaactatcagggattgctacaatctggttagcacgtgattaaaattatggtattgaccggaaaattaattgtgtgggacagattttcaagcatgttttcaaaagtcggctaacttgagagatgctagtatatatagaagaaaaataacggctggaattgcatgaagaaatgaaggtgctaactgacttcacatatttgtgtatattgatgggaaatgaatatgctgctatagtgatgtacaacaataaaatcaagaaagatttgcttacttgagaatgtccagcaatttctgctgtagtttgttgagtgcatcttcttccatggtgacagacgcaagtagctccggcaatttcactgcaaagcatgcaagaagtgaaccctttcaaacat

SEQ ID NO: 11032 - DNA, 36198 bp, Oryza sativa
atgacttgcgaggacaagctccaccgcagcccgtgccaaggaagccgacgacgacttcacggcctcgccgacctcctccttcagcctctccagatccgccgtcatcccgtccagccgaagcgctgaagcatctaggctcccatagttaattttggtaattaatgacaagcgctaattgtggactaaccgttgctattgagataatattttaagttaggtccacgtcatgtgtgcacatggatgactatcgatggattaaaatttgatggcgcgaagcgaagaaaagaaaacggtaaaactagtgttttagttttaaaattgatcgaggtgaagggcgatcaaatttgctagtttatttgttagtttcgccgtactatcaaggggggtaatgacctagcaaagagatgattaaattgccacattaggtcattatgcatttagacttgtgctcacatttcacacacacacacacacacttcactgggttcggcctgaccaggggcggtcagaccggccacatagtggcggtctcaccggagtgccctggccggtctgactggccacaatacggcggtctgaccggaccataaggccgatctgaccggcggcatatgcgccgtcagaccggccccctggaggctgggatggtgctgctcggggtggccgatacagagccgacggagccgaagtcggtcagaccgagccgatggcggtctgaccgagccgaggccggtctgaccacccactcaacaccggtctgactggcaaggccgatggggccctctgacagcacttcaacggctagttttctagccgttgcagagtagcacggtctgaccggccacatatctccggccagaccggcaaagcacaatgattgggggatttcgcccccaacggctagttttggtgggtgggagtataaatactccctcaccagcagcaaggggtctctcttggcacccaattcaattgcatacatcccttgcacctctctcacacccacttgagctttgtgttcatccatctagtgtgttagagggttgattagccaagagtcaagtgcattgcttccatttgtagagttagtgtggtacttgattgatcatctccacgctgggtcattgcttgttactcttggaggttgctgcctcctagacggcttgtggaggagttgcccggtgacctctccgagaagattgtggaggaggcccggcgccggtttgtgagtggtttggagttcaccaccttcggagtaaaggaagaactaccctaatgatcgaggcttgggtagtcctcttcgtgggccggctcccgccttgcccaccccttgacgaagggggcgtgcggtggcttcgtggttgagcggtggagttgggctcgcctcaacagggagtaggaaaccgacgagtttccgaacctcggtgaaaaatctcttgtctccttgtctcattttattgtcgcatttacatttgtgcaatttacttttctagagacaaacttgagatcatatcaccctaggattgctaaacattgacataggagtgtgatttactttcttagagatataattgagccactatcaccctaggtttgcaaaacataacttagttgcttagttagagttgaccctcaccaagcctagcaacttaggttagttttgattaggtgtcatttagttttaaatcgcctattcacccccctctagtcgacatctcgatcctacaagcgcgagcgccggctgtgtgggcgggagcttcttgtcccggcgcacggagatgcccacccggcgtcccacgcactccagccgttcgatggcgtcggagagttggccaggcccgatgtcgttggtgaggaggggggccgcgatctccccggcttggtcctgcaccgggcgccccaggtcggcgagagtgccttgagccgcggtgagctggctgaccaactccgcgtcgccaggctgcccgtgcgatgccagttccttctcccaggcctccagctcggatgccctcgccgccatcgccgcgtgctcagcacagttgctttccagatggatggcctcacgcccagcaacggcctcctcacgcttggtgagctgctcgccaagctggcgcgccgccacctcgcggcggttcacctcggcctcgcgctcggcgagcgtggcatctcgttcccgccacgcctcctctcggagccgcagctcctctacacgacgggccactaaagcttcagcggcgagggtggtccaattgcgctcggctgtggcctcctcacggaggcgaagggaggattccgccttggccgccatcgcctcgtgggcggccaaggtagtctcgcgctggtccaacacgcgcgccctctcctcgagcgcccgagcccgctcctccagctcctgggcccgctgcgcatgttcccgactgcgcccctcctgtttgcgttggttgcggtcgagaacctcgatctgccggcgaattgtggcctcgaactcctgcgcggagcgcgtgcgctcgtccaaggccttgcgctcggcctcgagcgccaccgcccgggcccgtagcgaggcgtcgaccatcgatgcccgccgctcttgggccgcggccgcgtcgaggaccccgcgggtgtcctcaaccctcctcgccaggtcctcaccgtaggtttcatactgcaggcggatgtcgcctagcgcctcgtctaaggcgcttgagacgatgagcgccgcctgccgctcctcctccgtctcccgcatgaccgagtctagcgtctcctcgcgcgcctggatctctgctagttcggcttggcgcattttgcgccccacctccaacatgtcgtccacggcgcggcgtcccttgtcaacccgcgcgcggtccgtcacgagctgtgcgcattctgcctccagggccgcccgctcgtccgctagggattgaacttgggcgttgagcccctctcggatggtggaatcggcggcggcgagcacctgcaggagcggctccatgctcgcaggagtcggggaagaaaaggtcgcggtccgcccccgggacgacagagtacggctggacccccgcgagactgggggctgctctcggttccccttccacgtggtcggccccgagggtgccccaggtgcagaggggaatggttgctgccgtcgccccccacctcgggccctcgggattgcccccgagaagggcaccactgccgctgtcgcccacggcgggttgcgcctccccctccttcgtctcggtcatggtggactcggagccggacccggcgtgcggcccttgggccccgtcggggtgctgcgaaggctccgcagcaccggatcggccggatcccggccgctccggtcgctcggccttcgacccttgggaggggtcggatgccgagaccccttgggaaggaatcccgctacaagagaaccccggttgcgttaagaaagaaaagaagagaaaggaacaagaagctagaatggatgggaagcaccgggccgggctttggtgaccgtacctgcgaggggggcgtctgaaggtccacttcgggggctcgatgaagctcccccgacacggctccgtttgccctatcttccggagcagcttgttcttccgtcctgcctcgggcgcggcggaatgtttgtggcccgctggtggtcggtccactgttcgctcggcgccccctccgcgcggaggggagggcggccgagattcggacatcttccgcttctctttcgggtcgccggccgagtctccccggggccacggctcagaccgggcgccctggagccgccgcccccgccagagccgccggtccgactgctgcccgcggtcgtgccgctgctacctacgccgtcgccgccgctgccgccgccgacggtgccccggcgagaccgacccctgccagcaccgacgaccgacatcacagccaggatattgtcccggtcgtggtcgctgcagaggggaaggatcccgtccggaatcagcgtttgttcgacggtgtccaggcccagcacccgccgaaccaccgtcttcgcgtcctcctcgccccaatcccagcgcttgcccacgtgggtgcgcaatggggtcgttatgcccggtgtattcccacgcgccgcgggactgctcctagagaggcgcgatgcgacgacggaaatagtcgccgaacaccatcgccgccgtcaggccccggcttcgcaggcccctgaggcgatcccacaccgcatcgtactcctcgcccagttccgagaccgccaaccacccgacggatcattcgggagggccggcagggagccggagtcgcggacgatctggcagcgcggtgtagaaccaatccttattccaatcctcccacttcttgcggaggtggctctcgatgtattgccccgccacacccggccggggctggaagtagcatcctcccaccaccgcgcattgcagcagctgtgggacgaagaagaactggaacagccgcatcgtcggccgcaccccgacgaacatctcgaataggtgcgcaaagatggccagcgtcatcacagcattgggggcgagatgcaaggcatggatctcgtagaaatccaagacctcgtggaagaacctagagaatggcgggatcagccccaccatggcaaaggacaggaggtgcgcagaccgctctgggtaccgcggccgcgtctcccctgccctcacggcggcatcctctagcatgatcttgcggatgaggctaaggtgcctctccgccgtaatgcgcgatgccgggaggacggcatcgccagcgtcttgggccatggcagccggcgggaaacggcgaggagattggcgtacggaacacgatggagggagagaagcgctgggggctgaggagcgagtatgcgggtgtgcagtcggcgaaaggaaggagacgaactctccgcctcccttcccttttatctccgccttgctcgcgcccgcctcctcgtttctcgcccctgcggttgcctcctcggttctcgtgcctacttatcacgtccgccctactaaactcgcgcccggcgattaatgcgcctgtcagtggcgcactcggcgcgggatgtgcgatgatcacggtcgcggctagacgggcccaacgtcagtcccgtcgcgtgcctggcaggcgggggagtcgaggcagcgttgggtgacaattctgggtgtggtccggcaaaccccccgactttcactccctaagtatccccatgaacggcgcaattagtagcggtcaaatcgccgttatggccgatgagccaaccgggccagccggcggcggccgtttgaactccccgctaggcccacaaccacggtacgggaagtcatgaggcaccgcgccagaccgccctcaggggaccgctgtccgacgcggtgtcgggagctactgtcggtgatatgggcccgggggtatgtggagtatggggaagtcaccttcccatccagccacgcggccctatagcctggttttccccctacacctcgtacgatgcagaggcagccaggggggcctcggggtgccacgtcacacccctcgggccccgaggccctcgcccgaccgccacgtggcgggaggagcgagtggggcggagacccaggctgaaccgccatcaatgcgtagcgccccaaccgtccctcgctgaatttaatgcggcgaggggcgtgaccggattgtcaccggcctgtcgtcgggcacatccgattggacgggcggcagtgcccccacatcccgccttgtgctcggcggagtgggggcaggtatgccccgtcccatcaaggcatcgcctggaacgcctccacgtgagatggatcgccgaaagtctccgatcatttaaaggggaatgacaggggtgtcccccgtgtcaagcggggggcggcgctgggccccacttgacgacggacggctgcttagcttccgggcgaaggcacgaacggtcgtcggatcgaagcggagtgggtccccctcccgtggaggagtaggtagaggcggcgcatgtggtatccccttgaagtataaaaggagaatcttgcccaccgaaaaaagggacgactctcagttaacctaaaccccaggggaaaaaagagcgagagtgctccctggagtttaggaacctttgtaacactcaaccttaaatcccacgcacaggaatagggtgttacgctccatagcgccccgaatctgaataatctccgctctctcgcacggtctcgaagaactccaggcggatacacggtctcgttcagcgcgtcctttcctccggccgaactcacaaaaggggatgtctcgatcacccgctagagagggtcactcctcaacaacgtgcatttgtacgtgtatggaaaaaatgaaatcgtagcgttgggccgtatttctagcccaccacattcggtacgtgtattgacatgcataatttttttcatttttaatttttttttaatatctacaaacaatattgtaccggcgaaaatatttatagaactcccgagaaagtggcagggtaacgtgagggacggacaagatgaaaaaaaaactaggaaaatgtatctttggtaacgcgaaaattgcatttacccccttcagccttattagagggcggcaaaggacccaagtgcaaaatgcgcacaccttatcaccctagcggtcatttctgtaaatattttggatggtataatatttctgtaaatattaaaaaataaaaatttagaaatgaaaaaaattcttgacatgcattccgaaacagaaaaacgctaaagcatggcaacgcgttcgcgaggcgatgaggtcgcgaatgttcgcgaggcggatcgcggggccttacgcgccggagccgcatcgtcggttgggtcgcttggtacgcgtgataggtgggaccaggccagacgtgtccgacaaagcacgcatcgctggcacgctctcgtagtctgcggcccaccaccacctgtaccctgtacccgctgtcgctttggtacacaaatcgaaaaggaaaggcgagaggattaacggggtatatatattaattaattgggtatttacaaatttaccatcggtttttttcactactgtaagggaaattgctatacatacgacttgtgtccgaccaacactcagctgctgctcgaactgacccacacgtaaagaagcagacttatatggaatttatatggaatgcagtgattggctgatgaggcaggttggacaggagtcggacgatggggtcgtacgtatagcacgatgatgccactcgaatgatagctctagtggcagttttgtaataacaattgaaagtagtggtaaatttgcaattagcccttaattataagttgtttcttcttaggttgtgtttagttccttgtcaaaattttttatgcatatagacacacatttgaaatattaaacgtagactaatagcaaaataaattatagatttcgcctataaactgctagacgaatctattaagcctaattaatccgtcattagaaaatataaactgtagcaccacattgttaaatcatggcgctattaggcttaaaagatttgtctcacaatttacatgtaaactgtgcaattggttttttcttcacatttattgctccatacatgtatccaaatatttgatgtgacggaattttttagaagtccacatttaatacttcatatatatatatatatatatatatatatgtacaaatatttggattttttaaagtttcaagggatgtaaacacagccttactacttgagagggacgtgagtgcgtgacggcgccaatgcacgggtgactctatatgaaaaaaaagctgcacgacacgtatccagacgggccgatcgaacgggtcagtacgcgttcgcattaacaccgattaaggtggcgcattcattccccacgcctctaccacacggcctttataataatgatgatgatgaggaggagactctctcaccttctcacgcctcatcgctttgttctcatcccttgtcgattttctttgacctaaacccatcgtcttctccatacgcgacacagaacacgggcttccctccatgaactcctcctcctttgtcgaagaatatcttccagcaggtgagacattggatctgtccctgtcaatagctacgagcaagatttatcgatgcagcgttggtcaggggcctctccgtctatctgttcctatggaacctgccggccgggggctgcttccatgggagagaaaaaaaatagtctggcggtggttcgttccatagaagcacggcggaagtagtctggctgcggttcgtcccattgaaccggatctgacctggtacgttactgttctttttttcagttttcgagtatgttttttaatgttaccacaacggccggcgatatccatggatctctttctgctgtcaatagcaatgggtgagatcgatgccgcagttacccgccacaggccagatcgatctaccggcgtcagtgatatcgccgtcgaacagttcccatgttcgagatcgagatgaactaacggcggtcgggcgagatcgatctaccggcgtcagtgatatcaccggcggacggggttctgatctccaaggggagtaaagtctgtcctgtctggtggtgttttttacgatattgtatagaacaacggcgacggcaatgatatcgatgaaaataatttgtcgccctgtttctattcttcagatagatcgtcgccatgatctctccaaggagggggtaagttactatttcttgttcagtcagttttccttaactccgttttctagcatttaattacctatagcggcagtttgcgtgcagtggcttcctacactgtacgattttgactggagattgtgctctgcatcttcaatacagattgggtggttagcatcgtcgaatccaggataaaaattgagggtaggctggactgaaagtcttaagtctaagttaacaatgctaatatgaggcatacaccattatcaagtcaaatgttacacttacatgattaaatagaaaaacatagttataaaagaagtaacttgacttaccagtaagttgctaattttcttagatcttagcaaagagttaagtgagaagcctcctggatatataaatgagcaaagttagtaatgcataaatggtagaagtaaacaaatattaactaaagaaagcaacatactgctaagttgttgcattttgttcacgaggcaaggatactttacaggatactttacaggttttcagggcttggaatcgcttcatgattacattatcattgatacttttaaatatctctattacaaatctaccaacaaatcaaatattaggaaatgtaaatgataaatcccctcacttgccacgagttagtactcactaacaagtagtaacaaataacaatgaagtaaagaacagtatagcttactcactctgtcacttagagactcactggaagcagccaagtagcaagccgagcagtagcaggcaagcaactccggcggcctgctgtgctgctctgcgcttgctgccgcggggccaccagccgtgcgcccgcgccgccgcgcgcaggccccttccccttgcagcttgcgccttgtcggctttgccgcttgcgctgtgcggctgtgccgctgccgcaatcgctcgtcgcccgcagctgccacgcggccgcaatcgcacgccgccgcagcgccacgaaaaatccccacagggcaaaggttagcagccacacggtccaaactccaaaaccctaagccaagacaaaacagacacaatgggccaagtgggcttttgctaaagtgataaatgggccattttacgcgtaccggtttagctacatgacttccatggctcctgttcttcttcctcgccgccagagacggagttcttcgcctcttctcttcttcctgccttctccagctgtttccatggaagagatgctatatacttaaattttttttgcaaaaattggagggtaggctagagcctgatggagcctacatgctagaatcgccactggttagcattgctataatctttctcataatagcacatatactttcacattttattattaaaaaatattagaaacagcaatatgattttaacagcattaggatactgcataacttgaccaatatgattttatatgtctgatatctgattgttaatgtaagtcctatgtccataaagcaaatatcatggatataaaccatggtaggtggaagatcaccattaaatactacataaggtcattatcttcgctatcattaaaaatttaaattattagtggcttctctttgctatctgtagtgatatccttatacctactaaagatgatatgtcatatcttatgttcatatacgggttataaaaagtgttcataacatagtggaacagttataaaatattttatatcgtattttataagttatgaacactttttcattgtcacgttagtatagggttggacaatccattctcatctgttgtagttataattttatacagcttagacaatctagcctttatacaacttattaacacgtgaattcaaagaattttcaattaaaatgaaaacatcgatgtattattaccctctagaattaatgtatcactcctagtaaatcctccaattaatttaagtaagaatatactctactctcaatattatttacctagatttaaaaaagttgtcctcattcatgaactattttccttaaatttaaaatatttttaaattataatacttacttttaatctaattttaaaatacttttaagagtaaattttactttggaccatctttattgaccgaaatttcacattgggctagggctaggctcatgttttcacttaacaccacgtatagttaccgttgtttgcactttggacctggttttatagttaccattacatgagttgttgtctaggtgcttagcattttacaagaaacaatgatatggaaatctttgccatgcaaatatgcttagcacaagaacaatgattgtaaatgttataggatatcctatcatcagattaatgggacttcattactactacatatgaacattcacaacccttatactatagagacaaaattggagaaatattgagtttaagaactatttttctacaaaagatattacatgttttataatacccaactgtagtgttagtacaaattattgaattctaagttttctaacacaaaaaagaaatgagatcagatctacagtcattatattatgtgtaatttgtgaaacttggtccaaagtgcaaatgatggtaactatatatgttaagtgaaaatataagtcttaactctagtccaatgtgaaaatttggtaaataaaggttgaccaaagtgaaatttactctatttttaaattatatactcctacataaacttatttctccactctatttattatagtgaattacgctttgggctacattttattacacaagttttactctggaccacgcttaaacctaccttctcactttgaaccaggtaagtttgtcattgttgcggtttggaccaccccgaatgatttttttcactacacaccaatgaccttaaacacattgcgatctcctccatgtatgtctacatggcgagaaaagttattcagggtagttcaaattgaaaagataggtaaaggtggtccaaagtgaaacttgggtaataaaaggtggcccaaagtgcaatttattctatttattttctagttccaaatttagatatctctaaattgtatttctatgtgcactcttttccttaatagtatttatttttaatctaattttcacatataaatttctttttctacgttgattcttgtctctattattatttttcagtttttaatccaaaatttggatttttccaaaattgtatttctacacgtactattatgtcaatatttactattatttgatccactgcgatgctattattttattatgatatattcttatgtagactcattagtcataatattatttaattttaatccaaatctaaaatatttcaaaattatacttctccatggaatcgcttatctatatatttattttttaattcaaattttagatatgtcaaaattgtattttgacctagactctcttaatattatttttatccaaattttaaatatttctgcatttccacacggactctactcccaatattaattattttttacgatattgtatagaataacggtgatggcaatgatatcgatgaaaataagttgtcgccatgcatccattcttcagatagatcgtcgccatgacctctccaatgaagggggtaagttgctatttcttgttcagtcagttttccttatttgtgttttctaacgtttagctatagtggcagtttgcgtgcaggggcttgggacatctttatgtaggattttggctgggtattgcgctctgcatcatccatgcatcgccgtcctaggtctagaacttataagaaagctgagatgaaatcggctatccctacatgagagggaagtccggttcggggtgtctacaattttccctccacgtcgaaagaacagaacatttggtaattttttatttgttttactcaatttgtcaagttatagtacatagtacttttgagaaacaatacatgtattttcatagatttcagtccattgtggagtcgttccttctaaggatatgaaggtagaatgtttcaaggtttattcacggtctattgcctgtttaatgtgcttgtatgctaatattgtgaatgccgttttttaaccctatttgaattttcttagtacatacaatcctttcttttatggctctaaattttcgaagtacatacaatgtttttttaccttttttaaatctgaattttgaaatgccattttatcaagaacagatatgttattctgacctcacattttttttgtttttagcgccttattttctatcaagaaattgcccaagtgaagattgtgagacctgattttcttagtatgtgatttggagagaaagacttgaaattcactttattgcatgaaaattttataggaaatgtctaaacttggtcttaatcaatacctcattgatggtggtgagcagcgaacatctgccaccacccaccaccacttaaccattaggacctgacacccaagaagaaaaggttgtatcctacaacaacaacaacaacaaaactgggcttgccttttttacttgttagatgagatgttcattatcgtagaagcttgttattggatctaaaaaagaatcattggtattttttttgtttatgttggctaaatttaaatggctgaatcattattattagaagaaagatatacaataattttgaactctgattttataagaattatctgtatgcatatttttttacttgtctccttggctattatgaaaatagatttaatattagaattaccctaaaattaagtactacataggcacagaactctcggtggcacacattggactaaatgagagttatgtgctgttttgccttttaccagtgctaagtgctatcaggctgcctgtgattctttgttatgtgctgtgattctttatactatgtatgcatatatgcacttgttctcctggtgatgctaaccgaataggactaagtataattcaaaccaagtcctattcggcccaaacggaaacggacgggagtttttacaatttttgtggaatcggacagattcgtttttttcgcccaaattttttttaccgcgtcgatcgaatcggatttgatttgtttttttaccgggtcgcatttttttaatcgcgtcacatataattccttttttttttcaatgggacagattcgttttttttcaccttttttttaccgcgtcaacggagttggtttcgtttttctttctcgcgattttttccagctttttttttggatcggacagattcattttttttctcccgttttttttttctacccgatatttttttcgcctagtgtttttgtcctttaacttataagtactacatatgaggaaccacatgttatttgatatgggaattggtggcagatttactgctccgttattttcttcttttaaagtggttgtatattttaaagttataatcgctacaaatggtgtgctctctattctattaggatttagtctaattttttttacctttgaatctttgtatctatatattagtcaccctgttacttggttaaacactttacataatacaacaaatgtgatttgggctttcttgtggaacaatcatgttgttttagtctgtatagaaaacatattcaaattatgttgttagattaaagggttttttttttccattctctcaccttctccctctcttctctccctcccaccctccaaatcctattcagatcttcctgggaactccacctctctctccctctctccctctccccctctcctctccctcacgccctccaaatctcttcctgggaactccacctctctctccctctcccactcttccccctcttctctccctcttttctctcttctctccctcttacaccgtccaaatccgaacagcagcaggaggaggaggtgctgcagtgagtggctggaggagatgctgcagtgagcggctggaggagatgctgcagtgaggaggaggaggagatgctgcagtgaggaggatgaggcggctgcagtgaaagaaaatacaccaggggacagatccaatcacttgaagtgaaagagaatacaccaggggatagatccaagcacttgaagtaagtactgatgaaatgtgtttgccattttttttggaaatgtgtttgtccaacaactaaatgttgaaaaatgtgcagattggtgtaaaatgttgaaaaaagatccaaataaagagtgagtgctttattattttttatttaaatattgtttaaggtgcataatcattccctaatgaatatcttttttttttctctaggacaattctgtcagtttcagttgctggtgcccaaaatggcagggaagctcaatggactgttgataggactgtgtacacttatgctaacttctatgatgattttaaagccaaggtttttgactttggtgataggctcaagatttcgtttatagaattagttcagcgtcaagaaaatgatctattgcttggatcttttgagaaagagttaagattaaaagtacttctagcggatgaacatgatgaggtatccataaacatttgcttaatcccacccatgttcggttgttaagctaaacgattatctaaatttgttaggagttaaatgactatctaaatttgttaggagctagcatggttgttaagttaaatggctctatctaaatttgttaggagctccaaagtgagaggtttgtcaagatgcaggggaagcatcaacctgttggtttaaaaaatgagaaaaataagcaagtattgttccttttttttccatcttttttgtcagtgtttgtttaagttccatgtccttaatgttttgtgtatagctgttttggtaatgtagtgctccaatgtttggcaatcacggaaccatttgtttcaagactctttggacaacaatttggagaagaatgtatgatttaatcacaatttttttagtaaaaaaaatatttgtttaagtactaaacgtgtagtgttttaggcctaggaaactgtcacgcttgcgacctgcgccgtgatctgaagaggataagaaaaactggtgcaccagccttctttcccactatctttaagcatattcgatcattaggtggtgattttgaggatggcttgggacgtcatcgtgactcttctgagttcttattgtaataacttaactcaacttttgttgttttagtttgcatttcagttatttttgtgtgttatagattatttttcttttccaggttattactacaaaagttatttgatggtacacatggatgtttaacagatatgtttggtggaaaattccgtcgcagtaaagtatgtttgttgttttagcaattttgacatgtgtttcactgattttacatatagcaatgttttaatgtatgtgcaggtttgttccaaatgtggaatgctttctaattctgaagaagattttactttgctaatgtttaatatacctcatcgtgaacaagttgttgctgcaacattagaagattgtcttgatcacattgtggaagaaaacgtacatgattcattatcccgttgtgaaaggtaaaatttccgatttgtgaatcttaatcgtgtatcatcatgtttatagtaagttcaagttgtttatagtaagttctttgtttataaaatattttcttttgtgtagctgtatgaatgaccagaagtcaaccagtaagtgtacatttcatgaaactagagatgttgttattgtgttgcaaagatttgaaccacttacacttggggtaagtaaatactgttatttgttgttatataatcacttaattgaccatctaacacctaataaatatgtctttaagggttatcgaaagattggagaactaattaactttcctacggagctggacatttcaccatatatgagtggtgttgtaactgacaagcatatatatgaactgtttggaattatagttcatgaaggcggtgttatagggggtcactatagaagttacgtgaaaacaaactgttggtatgaagtcagtgatagagatgtaagtttcataaccattttgtttaatgtgaatgacaatattgtaaactgattcacatgtcaaaatgacattgcttgtatttgcaggtgaaaagagtaaatgaaaattttgtcctaggggcacaagcatatatcctgttctacaacaggtatcgtagttcattttgacaatatgtgtgcctttatgtgagtttgaaaatctgaacttcattttcaggaaagaagaggccaaatcattcgatgaggttttagcttttgctgctacagctatgtcttcatctgatgccgtgcctacatcaacttcaaaagattacactgaaagaacattatcacctgaagtatcgtctgctgctctgtcatgttggtatgtttaagagctctttatttcgatgcaccttcctatttttaatgaataatgttgactttttaaatgaatgacgttgttaacttttctatactgtttgtcttgttgaaaaaaagttatgtgaatgtcaattactttcttgtgacttgttttatcttcaaataaactattatcttaacttatacttttacatatgtgtgcactaagtttttgaataagatgaaaggtcaaacatcatgcaaaaactcaacggagccataaaaagaaatgtagtagtatactgtgaataggagtatcatgaaatatctaatttattgttgtttctaggattgatgctgcacgggtccttgagcccaagagttactcagaccaggatatcctagaaaaatatatcatttgtatggaccgtgacagttcagatgtatctgagaggataaggaatgccatgcggaattgtaatgagtccagacaggagtatcattttaatctccctacaacggatggacctttttatgatgacaacttggggcagtactgtcttcttcggggagctagatttcgaaccattagtacaagcagtaatgtagaagcgaagagagatagggctgttagaatgcacttccttctttctgaaatcttaaaactcctacagctgaaaaaagtgattgacgttggagctattggctatctggagaaatttaagtttgggaattattccaggagtgctcttttacggcgaattaatgatgcatgtatgctcttggggactaacagattatcccttaatatctcagttatgtcaagaggatctatcattgggccagtgctgttcaaagttggagaagatgtgatgattgatgcaagcttaagggctgtacagattccacacgacattcacttggtggaccatattaagttgaaaaaaccagtcagctttgttcttgttgttgaaaaactatcaatatttaacatgcttgtcaatcttaactttcatgtcacacacaattgcataatcatcactggatgtggaaaacctgatatggcaacaagaggtgcagtttttaaacttaattattgcttgccagtcaaagtttatatccttgctgatcttgacttggatgggctccagatatacttataaacttggcagcaaagtaagggcttttgagaactttgtgttgcatctagagatcttatatggctgggtgctagaccagaagattctctacttttacaagaacccaatgaatttaccagagtgcagcagaaatctcttactgatcttcgtgattctcttcccaatatttcggacagagatcgtctaaacactgtgttggactggaactttacattgaatctgcatgacattcttgattatgagaatattgtagagtatttgactaatcgaatggcagagtttgaagatccttgatggagaaagatctgacctcagctgtttgcccataagtgaagctgaagatgggttgccaaacgtgtgtcgccatttatgccacttgtatattttgcacgattgcatcttgtttactgcaataggcgatactgtgccagtgtgccaccatctggatgatatcccctactgactgtagttctcattctgggtaattctaattctggtttttaagagtatgctgtaacgtaggagcaatacctctttgctgataagagtttaacagatcaggcaatttctgattaacttaaagactacgtgttttgattaaccgtcgcttaaaaagtgtgttagtatgacatttacttttgtttgtctttgaactgtgctgaatcctgggaagtccgatgggtgccacagctgtgatatggtcaaagatgagatctccgggcggtggtttcccggattgtagatttgtagcacagggagtattgctgattgtaatgcaaacttttggtcatatttacgtactttgcttggtgagattgacattacttacatggtgtgtttatttcacgctaaaattgaaagtttggttgaaattggaacgatgtgatggaaaagttaaaagtttgtgtgtgtaggaaaattttaatgtgatggaaaaattggaagtttgaagaaaaagtttagagctaaatttggccgtactttgctaccgtacttgcagtagcatgtgttattcatctctcggtttctgggccttcgggtgtatttttgctcgacgcgggagggtttaggatgtccttggcttattgtttctctttggttctttatggcccggtcgtattaaggcactatataaatcataaatggtggcgcagcgaagcctgcactcagcattccggagaagctggcggcgaaatctttggtagaatgccattgccaatccctttgtctcttgctctgtccttgttgattggtgtcctgaaatgatctttatctcttgctctgtcccttgttgattggtgtcctgaaacgatttttcagaacatttgcgtaacattcgttactaggataggcaaggtgggggatgttttgacgattgtagactgaattcaccacatctaaggatacagcttccttcgtcattctattgatttccttcattcttaaggctccaattcaccacatctaaggaattttgcgtaaccatctttctcacgcatcaaaattcttcattttagctgtgtcagcgatggtcgcattatccgtgagaaagatgggtcctgcaagatttagaaaagtagccacctccatagttagttgcatacctaccaattcagcctgtaaaggagattgaaccactttgctagtggctttgataaaaatagcattatgagtaacaggcatttgaaaaaaatttcctactctagttgatccattgtcccaagccgcatcaatatagcacttgctcccattagtagtgacttctcttctcctattgagtccttccatccgttgttcctcctgcaaagagagctgagaggagaatttcagataagtgttcagcattgccacaccctgatattagtttcagggattaataaattatttctagaatttatattaaatattcattaatttacaagttaagttaatgtgggaaatacatttttctaaataaaaaaggctggatttaatacttattaaattatacatgattaattatattctatgaaattttctcagatttttcagagcttggttattaattttaataatacaaagaatatttcagcaattatttaaacaaaattaatcattaactgatctaaatattttttagaaaaataatttgagtgtccaagtagtttcaggattttttttagaattacttgagcattggaagtattttttaaaatgcaaagatcatttcagtgattaaattaaatgaaaaagtaattaaaaaccctcttgtaaatctgcgccaattctggataagtctgatgtacttccctctctttatcccgcacgctgcctcctatccggcgaagttcacttcgccttcctctccagctggcccatctttcctgaagtctgtatcacctctctccgccctgcttccttcgtaactgtcaggtggggcccaccatgtcatcccctaccgagccgcagctgtcgtgcgttgcagcctgcagccctgcagcgtcgcctccccttccaaagccggctgctaacattgctccccttccaatgcggaaatggaatcctcttgatatcctcttctttttccccaacaagtcaaaaaaaggaaatcccatttctatattccggtgaactcggataaaccctaattttccatagccaaatcctatctttcccgagccggtatcttcctcctccgcggatgccgaggtctactcttccgtttcccctttttcactaagccgttgtgtgcgcctccccgcgtgtctttctctccgctgccggccgctgctccagctgctgctagccgctgcctcggttgtcgtcggtcagcgccgtttcctcctacggcatcgcaacgaggacacgaagccctatctccacttccccgaagccgaagaccaccagaaggacatcaccgacgtcaagtcgatctacttcggctcagccgctgctagtcatcgatcgcatctgttagatatatctcgtgttacagtggtttccttatgccgacctatccatatctctctcggttctgtttttataaaccggttgagtatataagaaaggtctcgtgtctatatatactccgcaccgatatcaatctaatcattgcgttgagtctattccactctcatggtatcaaattgcttcgttctaccgcttccgcactaaccctaaccctactgacgctgccatgacgacgtcttcctcccccttctcgccggagtcctttgtcaacgctgttgccgcgtccgtcgccgacgccgtccgcgcggcctaccaagccccgcccggctcgatggtcaatgacacccttaccaagacagtcgccgactccgccgttgacagggcttccaccgctgctcgtgctgccctcaactagcatctgccggcgctctccacggtgcccgccgccacctcacctccacctgccggggatgccgctcctgcgtctgtcgcaccgaccccgccggcgctctcacccgagctggcggcgctcttcgcccggctcgcccacaacattcccggcgtaccacaaggcgccgcaccggctgcgtcctccaacgacgcgccgccggctcctgtcctcgacgacaacgcgcgttccgcgctccgctcccaagccgtcgttgttctgaacgtgaaggcgctggtgctcgtgaccctggacatcgccgccggcaactacgctcgatggcgtggtctctttctcgtggttctcggcaaatatgccttgacggaccacgttctctgcgatgctcctcgccccgacctagccgagtgggtgcagatggattgcgtcgtcctcagatagctgtacgactccatctcccaagaccttcaggaagtcttgtcgccgaccgccaccgaccgccaccaactgccacaccacgataaggtttcacccccaccccctaccccggaggtgggcagtcccctcgtgtgctacggtgaatccggcagctggacaaccggatgttggtatttcttagcgacactactggaaatataattcccagcaatagcactagaaataatcctagtatattatggtcacatatgtaatccgcaagtatttcacccggaagtattccaaggtatcgtatttattttatcccaagggaagatatgataagagcgtactatgctaatagtttatatattacttatatacgtcaaagtctatgcaatggttaattcagttcaaaggtagggtgacacacagaagacagaactaagaactactctcactaaaatatagtctaagctaagtggagaaagaataagaaaagtatcattactgtacttctagtatacatacatctcactaaaatatagtctaagctaagtggagaaagaataagaaaagtatcattactgtacttctagtatacatacatctttagtatacagtcatgaaactaataccccgtacccagtgtcctggtgtttcgagaagctacccctgactgccaagttccttacgacaacccgtcatgaccgtataaccggggctaaatacggaggagtaccctcctcagggaattaacttaagactatatacacgcgcggggaatacccgtactgagctgtcaccatcagcggcccacctctcatccgcagcatataaccccaattaatggtatctaataatctaagcaccgcgcttacattactaaatactactctacgtccttgcaaccgacatagagcaaccgaataattggacactaaacccaaaccaatacacctatctggaaagctagatacatgactattgattcaagtataaagtaaagtcgacactcaaataatatgaatggaataaaataccgaacttgtataaagaagaatattctattaattcaataagtcttacaaaagaagaaatgaatgctattaaagccataccggaatctcctgaagactcgaggactatgaagactattctatttcctactccactagcactagaactactaaacaacacttgagagagctcttgatcttcttcttgaggtgtgtgttggagggagtgaggggagctccttaaataggcaacttatgacggttggaaaggtcggaaacaccctccaactgtcatagggagtgaatctccaccgtccataagaaaccctgaatccatcggagcttagaggggagctgggccattctggcctattttcggcaggtggcccccttagctcctctcttatctagaacagtgaattttgggcctattggatcatgtcatctctgagttctcagcccatctatcgataagtctagttctcgacagtgtctgattgatcgttcgtctattgtctgtcgattctcctccgtttataaatacttatcctgcatatatgtaagtagcacagcacatagtggaagtagatattttatttgaaaattatacattgcaagcatagctagtcttcattaattgggtaatattgacggtcgaaactggtcgataacgaccgtcaacacctgacactccggccgacccaactccatcacgcccacccctcgccaccggtgcctaggaaagggtcgagctatactgcaagtcaagtagttacccattcccgcctgtggtaagcactgttagtcttccagagtttcccgtgaaccggtccttaattgccatggtgcgactagcaaaaccatgtacccacagcccaccattcagttgcattttagttggataattacgaccaatgaaacatggccggatgtctcgagcatgcagctcgtctagatactaagaggtctaataatgtaattaacacatcaaccgagctagtggtaattaagcatggctaagcacatagttctagctaggttacataagtaacacgagctagtcgaattatcacccaagtttaataaaggacggatgtcaagtaaacatggcacaagcgagcagataggtaaagccataatcctatgtaattagcaaaacatgcatatttatttgcaaatggtaaaacaattataaattggaatcaacatgctcaagggggaatatgtgactcgccttgcttcttcgaaagaatctcccgaacattgatccttgcgaacgcgatcttccgaaacagcgaattctacgcgctagtatgcaaaatgaggaaaaaactataataaaaaccaagtaaaaagtacattaaaagtaaacaaacatgtagagctcaattttagatgaattttgcaagttgaacggctcaatttggagttcgtatgaattagatatgaattttagaagttttgagccatttaattgaatttctataattaatattgatttattgcgcaattaatactacttatggcgtcagccgagggggaagaggtggcataggcaagtgggccccacctatcggtgattcacgggaggagggctcacggtggaccgagtccacgcgcgcacgggcgggggcacacgtggcaccgacggggcgccgacatggcagccacgtgtgtggacacatgggcggcccggatggaggccggggccgatttgacggccaaaatcggccacgcggtaggggcggcggcgcgtacgcgatgcgcggcggtccaagtggcaacctggtcagacggccaccggcggcggggagatagagggagagggaggggagtgctcaccgtgctcgcgcaacggcgagaaggggacgggaaggcggcggcggtagctcctcggggtggcagcggcgacggtggtccggcggcgttccgtgtgcgggaaccggcggatggctgctgcgaggacatgggaaaagcagtggtagggttaggaggatgggagaaggcgtgagacgatgggaaaaactgaccgaaggcgaatgaattaggagagctcaccggcgcgcaaggggagtggaactctggcgagttcccgatggcttggggcagcggccaaggtctggtggggcgtggcggcgctgtgggtggtggcggcttggccgggcgaggcgacactcgccggcgggaggtggcggtggctcgggttggtggtgggatcggtgctatgggatggtttggggagaaggagtggatgctggtgtgctacactgtgcggcgaagccgacggtggcggtggcgcggcttggcggcggcgggggcggcggtggcgtgcggtcggagatggacgacgagtagtggggagagagagagagagagagagagagagcggcgcggggagagcaaaactgggcgcggagagctcgggcggaaggggaaaaatggagagggaggtgcggtgatgttttttatagccttggggagggagaatcggggccgacgagggcggcaaccggcggtgaagttggtggcgatgtggaggtggagtggcagttaaccggcgctcccacttggcagacttgagggagagagagccgagcgggccgagggaggggaggccggcttgggatggagggggcgggaggaatttgggcgagcccgaaagggaggaaggggaagttttattcattttatttttaatataattgattaaatgaactttgtgctatttcaattatttcttgagctccaaaaattcacggaaaaatccggagagtatattagggcacagagaatattacaaaatatttccggacaattattttgaaaggaaaattttaatttcctcaatatttcacttgattaaattacttcaacttttatttaatttatagaaaatgcattatttaatgatttttaatcccgaatgaaaatcggggcgttacactttccaacaaggcgacctctctgtctccaagtactgttggtgcatcaagacaatggcggacaatctcgccgacctcggcgaaccacaatctgacgcaccctcgtcctaacgctcatcaatggtgacatgcaatctcttctccctgtgcagcaaccttttccaagttttcttcaagccaggtcgtaggtgctactcgaggagatcaccaagggaccgcgtccggcaaccgactcagccaccaccttcgtcgctaccacgaccagcaccaatggcgccactggtggtcgtggcaccaccggcaccacgggcaactcactgggcggaaacggcagcggcatggcggtggcggctccaacaatggtgctggcgctaaccctaatggcggctcgggtgctgcctctaggggacaaccggccggctctcagccggcccaatctggcttggtcgcacggttgacctggccctctccctacaatctgtgggccgacaccattcagatgtggccgggccaagcccacggaccaggcgccttgggacggcctcccttcacaagcgcggcagtggccggccagcccacctaccacacagcgtcgatgcaggccagccttcctcagcatatgggctcagccggttttccaaaccaggccggcctcgctccactccagcttcccgggccgactacatacagcacggccggctctgtccctgcctcgccgcacacatgggccggcccttcacagtgggatccacaggccctcgccagctccttcaacacctctacactgacgccgccaaactccaacgagtgttatatggattcaggtgcatcttcccacatgacctctaatactggtatccttagtgcgtctcatcctctcccccacaactttccctcacatattgttgttggaaatggttcactaattcctatcacttctaccggcactgcttactaaccttgtccgctctgtttctttgttcctttgtgcttaacgatgttttagtgtgtccttccattattaaatacctaattctgcacggtggtttgctcgtgataattggtgttctatttgtgttgacccttttggcctctctgtgaaggattatcaaaccaggatcgagatagccaggtgcaatagttctggtgatttgtcccccctctcggcggactccttacctacgacaacctccggtcaagcctttgtcgcctctacaaccaacaccgacctgcggcatcgccggcttggacatcttggtcacgaagcgctcactcgcttggctcaggctttcgtcatacctcctccgaagggcactacctcgttgtgtcatgcttgtgttaacgaccaaatttagtaatatcagcatcggagatgaagatgggatcgaagcagaatcaaagatgagggttgttgcggaaacagagtaagagtcggctggagtctggatcggctacgactgggatcggctaagtctgagttagactggttaagtgatacagccgattccgacaatatgacccgtttacgacatcgggttcgagttgatgtgcttcaagatgattgccacgcatggatagagtcctagggaggcaattgtatctattaattaggatattttatgtaaattcattagagataaatgtggtaaaagtctgccgcaaagacttatgatatcttagaatttgttagagataagagtcgtgtccaatatggacatatcttgtaattctcgggtataaatagaccccgagccctatgtaatgattaacacacacgttcaatacaatttcggcgcatcgccacccttttttgctttagttttatttcgacgagttcttgctttcgggttgagctgcatcggtttcaatcttcaacaagaggtaatacttgttatggcgatttacgttctcaagattagtgcttccatcttcatgatactctagtcttgtttatgtaattcgtcgagttattatatatcttgcataatctttgacaatatcgtcatctaacctgcaatcggctaacatctgctaccaaaaggcaggcgattaggataaataatgacatcggcttagattatataagatatccaccactctatgaaacatccagcggttgattgtctagatattgttcttcttttcatacttaatgttgtatcagttgagtttgatctattaagtcgtgcttagaatttcaatctctagcctacctactagttgtcgattagggtagtatcggggtttcagccgatcttatctgatttaactatttttatcctatatgcttgattgatatgttaaatctgccctttatgttaagatctcgttgcgtttaggtatattaagcttctgtttgatgtactttatttgctttaatatcttaatatagagtagtatcggagtattagccaatacacgctagatctatctgatcggctatgctatgagcatatatagtcttactgttaatatatattccggtctaagtgatttatactgtctcggcatggtgaccgatctaccccaatcacttgatctaagtatatatcgacataaagattatatattgttaatatctacagccgatcgagtagatttagttcttctttacttattcgtgattgccgatcgatttacatatgacatcggctcaaagataaatgatatgtcatcagcacctagccgatcggctatcatttatggatttaaccacggtttctttgcctttgtttcttgttgattgcaggatcaaatcaactggcacgctcatacatccgaaggcgagttttggacctgcactggagttaagcagatctcccagtcctcgtgttttctgtcaacacgcttttggcacgcccggtgggaccgattagaagtcagaaagcagcttccctcatggctgagaaaccaccgttgtcaccgtcgtcggccagccctagtaatgttaaagaaaagatccagaagctcggtttgactgacgtccatgaaggaaacattgcgcctattgatccagaaaagctcactcctgaacagaagaaagacttcgatgcaatgatgcaacaagcacgagatcaatttttaaattcattcatgcagactcgcaagggcacatttgttcagaggtacaaggtgaaagtagttcctgatgatcctgggaccggttcttctaaggagggagaaaagaaacaagttccagatgactcggcccagccgagtgacaaaggtgttacagatgggtcgacccatgagaaccagggtgaccactttcatggagtacatggagttcaaggtgatggcactcagggaccgcaagcgggaaattttaatcagaacgacaatgcattccaagattttttcaataactttcaagatcgggttgactatgccgtgtataatgctttgattaatcaatctggagtattgactaataccttatcaaatatgatgaaatcggtagccgatggttcaatagctgaacatcaggctgcaggcccaatttatttgcaagggggtacttttccaaattatcggcctttgatcaccgatgttcatccacttactcagggagttcctcctgttgcatcatcagctcagccgacggcaccagcattggctccagcacctgctgcgctgtcgtcggctccaggccaattagtcaatcctcaattattggtaagagagcaatcacagcatcctggaccgaatgtgactcagctaacacaagaccaggttgcatctatgtttctacctcctcagaatgctgttaattcagctcagcggcagccgattcagcaaacaccgcccaggcaacaggttgtgcagcctattcaacaaacatccccaatccagcaggtcgtacaaccagttcagcagacgccaccaaggcgaccggctttacagccgattcagcagacgccgttgagacagcaggtcgttcagccgatccagcagcaaggctcaatgaatgcgtcggctgggtttgcaacacctggtggtcagcctgtgcagtacactacaaatcaggttgtcccggaacacctggttcatcatgtgcaaccagatggctcagtagtacctcaagttattcccgagcatttggcgcgtggtattcagccgaaccttcacaattaccaggggggcaatttgaattatcaatatcagcctccatcaccttaagttcagtaccaacaggcaggatcggctcatcctcagtttgttcatcaatacaatcagtttgagcccacaccacaacaacctcaaggaacacctcaccagcgaccatgggctgatgtgatagctgatgtaatgagggagcaatttgggcttaaaccaaaagagactagaaatttgtattgacaaccttatcctgaatggtttgaaagagttcctctacctaaccggtttaaagtactagatttctcaaaattttcaggacaagacactacatcgacctatgagcacatcagccgatttttagcatagtgtggtgaggcatcggctgtggatgctttgagggttaggttattccggttgtcattggctggatcggcttttacttagttttcttctctgccacatgggtcgattaacagttgggccgatttagaaaagcagtttcatagttatttctatagtgggattcatgagatgaaactgtccgatctcacgtcgatcgagcaaaagcatgatgagccggtgcatgagtatattcaaaggttcagggaaatgaggaataagtgttacagcttgagcttgactgatgcccagttagccgatttggcttttcaagggatgattgctccgatcagggaaaagttctcatctgaagatttcgaaagcttgtcgcaccttacacagaaggtatctttgcatgaacaaaggttcgtggaagctaggaacaactctaggaagattaatcatgtttatccttatatgtatggatcggatgatgaggatgatgattctgaaatagctgcagccgagtgggttaggagcaaaaaggttataccgtgccaatgggtgaagaactcaggaaaagaggagaggtatcactttgacataactaaggctgataagatatttgatttgctacttcgagaaaaacagattcaacttcctgccggacatacaattccatcagctgaagagttgggcaagaagaggtattgtaagtggcataattctgggtctcatacgactaacgattgcaaggtcttcaggcagcaaatccaaacggctgttgagggaggaaaaatcaagtttgatgattcgaagagaccaatgaaggtcgatggtaatccttttcctgttaatatggtacatacagttggccaatcagccgatagggtccgtgcaaagggttttcaggtgaattcggctaatataatcaacaaatatcagaggaagtatgacaagcagcaggagaagcattatgaagaacacgatgacggttttgatcctcattggggttgtgagttctttagattctgctggaatgaagggatgaggttgccatctatcgaaaattgccctgggtgcagtgatatcgttgagagctcaagccggtcatataataggagtaatcggctgaggcaggaaagagtatctgttcatcaaagattgggcccggtgaatcaaggtcgtggccaacaggatgaggtagtcaggacaaatcaatggtgtccttctggtattttcacgaagaatcagaagagaagggttcaaacattgaggaacagggagcgccttcaggaggttgaacaagaaattaaccatcggctgaagaaagtaaagccaagacaggagtggcgtgttaagaatcaggttcctatagccgatgatattgcagccgatgatgaggcaaagaggttggcaaaagggaagagtgttgtaacggcaccaattaacatggtctttaccttgccagccgaattcgggattgatcaagccgatgtagacgaggtggaagaggagtcggctaagttggttctatcaccagaacaagcagtgttcgagaaacctgaggggacagagaatcggcatcttaaaccattgtatataaacggctatgtcaatgggaacccgatgtctaagatgatggtcgatggtggggctgcagtaaacttgatgccttatgctacattcaggaaattgggtaggaacgccgaagacctcatcaagacaaacatggtgctcaaagattttggtggcaatacatcagaaactaaaggggttctgaacgtggagctgacagtcggcagtaaaaccatccctacaacattctttgtcatcgatgggaagggttcttatagcttgttgcttggaagggattggattcatgctaattgttgtatttcttcaaccatgcaccaatgcttgattcaatggcaaggcgacaagatagagatcgtgccagccgacaggtcagtcaatgttgctagtgccgatttagctctttgggagatggatggccttgattgtttatctggaaaagtttgggatggagattttttaaaagtatccgattctgatatacagccaattgaagatggagaacccaagctattattttgagggcgtcgtggagggttcgaacgtctacaccatggatagagtagatgatctcgatgacaaacaaggtcaaggttttatgtcggccgatgatttggaggaaattgatataggtccaggtgatcggccaaggccgacatttattagtaagaatttatctgcagaattcagggccaagttgatagagctcttaaaagaatttagagattgctttgcttgggaatattatgaaatgccaggactcagccaatcgattgttgaacatcggctacctattaaacccggggttaaaccacaccagcaaccgccgagaagatgcaaagccgatatgcttgaacctgttaaggctgagattcaacgcttatatgatgctggttttattcgtccttgtcgatatgctgaatggatttctagtatagttcctgttatcaagacaaacggcaaggttagggtgtgcattgattttagagatttgaacaaagctaccccaaaggacgaatatccaatgccggtggccgatcaactggttgatgctgcgtcagggcacaagattttgagttttatggatggaaatgctggatacaatcaaatttttatggccgaagaagacattcataagacggcttttaggtgtcctggtgcaatcggcttgtttgagtgggttgtgatgactttcggcttgaaaagtgctggagcaacatatcaaagagctatgaattatatataccacgatttaatcggctggttggttgaggtttacattgatgatgtggttgttaagtctaaagagatagaggaccatatagccgatttgaggaaggtttttgagagaaccaggaaatatggcttgaagatgaatccgacaaaatgtgcttttggtgtgtcggcaggtcagttcttgggatttcttgttcatgagagggggattgagattacccaaagaagtatcaatgcgatcaacaagattaaacctctggaggataaaacagaattgcaggagatgatcggcaagattaattttgttagaagacttatttctaatttgtctggaagattagagccttttacgccattattacgattgaaggccgatgagcagttcacttggggggcagagcagcagaaagctttggataatatcaaagaatacttgagttctcctccagttttaattcctccacagaaaggggtaccttttcggttatatttgtcggctggtgagaagtcaatcggcccggttttgattcaagagcttgaaggaaaagaaagggttgtgttttattaagccgtcggctcttggatgcagagactagatattcttctgtggaaaagttgttcttgtgcttatatttttcatgtacgaggttgagtgtcacgcccagaaattcacgaaccagaattttctaagctgaatgtgcattaaacccctgtccagggccagccagggtacacaaacgacaattgttgacatacagatccacgtcttacaaaaatataaaagattacaaatgcagcggaaaaagataaaagcgagctaagcctgcagacttgactcctgcagcggacgactccattccacaggcatccttgacggcagcgacgaaaccaacctcttcgagacatcttcaactgagaaggactccaactctggtgtgggggaaaagagagcaagactgagtactacccactgtactcagcaagtcataccggaagaggaggtatgatgcaagatatatccaagggaggctaaaggttcttttgcataaagccggcatttcaaagcagtaattgaaagcagtaaaacagttgcagtaattaatcaatattaaccaatcactgctcaacgctacaccacgttgagacaggcccaaaccaccacctgaactaaccagttcccaaaagctaactaggggtgagactaatcacggtgaatctggtcgaccgcctataaccgcgggcacggctattcgaatagttttactctgatcagtggtgtacaactgtacccacaagacacagccccacgacacgttcccgtgcgccgacatgccaccacaacataccggaaagaggccgtgacaggacccttcgcataaccccctctaaccgatcgcaccacaccttagggttcgcccccgtccccagcaggcaacgggcagcccccctttcgtgccgcggtgaatccggaagccgatcaaccggacaccccggccgacccaactccatcacgcccaccctcgcctgggtacgtcggctagagaaaagctacactacaggccagccgttgcccacactggcttgtggtaagtacgataagttcttccagggcatcccgcgaaccggtccttaatcaccatgggcacgactaacaaaaccatgcacccacagcccaccatgtagtgtattttaattaaccaacaccattacggtagcactaaaccaaagctatgccgataatcaagtctatgctttaatgagattcccctttgtgtactagttgaactaagcatggctaagcatttcctaagccaacatctaatcattttgatacccaagttatcaatgacataaggtaaacaatgtatggttgagtagtatgacccatcccacatgatattgtaaaacaatgtaatatttaatagaaatgcgggacatttgtaaattgggtacaatatgaccaattgtaatgcatgacttgccttgctctcgcactgatgagaccacagcaacgtcttcaaggaaccgcggatcgacgaaacggccgaaatctacgcgacaaacaaagcacacaagcaaaacatgctataagactactgaaacagagaacaaaaccatttttaatggattctacatatttttcttgatttactgagacttgaatggacttaaacggagctcggatgaattagttatgatttttagaagattctctgtgtttttactataaaagaaaaacccttaatcaatttattgcgcaataattcatcccagggctgacgtcagcaaggggtggggcggcgccgacatgcgggccccactggtcagcggcactaagagagggagaaagggggcagctggcaggcggtcccaccgggcagcgtcacaaagggggggaggaggcggcctggctcggctcggcttcaagccggccggccggttatggcgagggcgacggcggtaagcggccgccgacggcggcggccagcgagaagacggcggcggccggcgggaagacgacggcggccagcgacgcgagcgacggcgcatcgcggtgacacgcacgcgaggagcggcggtgcgcgtgagaggaagagaaggggtgggagttctcaccggggattcggccggcgtgggtgaagacgacggcggccggcggcggcaagcagcggacggcggggcgcgcgggatggacgagacgggcctcgacctcgcgagtccaacggcggcaacggagcggcgcggcgacggcactagcgacggctagcggcggttggaggcggcggtaggcggcggcgcgtggggagagcggtgcggcggtggcgcgcggcaagcgagcggcggccgggatagccccccgcgacggcgaagctagcggtggcgacggcttcgcgcggcggcggctctagcagcggcggcgcgcgaccggaggtggcggcaagcggcggcgctagtggcgagcggcgcggcggcggtaggaggcacgggagagcccgcgaaaa

SEQ ID NO: 11033 - DNA, 593 bp, Oryza sativa
ctcttgcacttaaggaccgttccttggaatttcatccaaacataagacaagtacgaccacatgggtggaatgggacacccctggctgagtacctagcttatcagggaagccttgatgccgagagacatgtggattcgcgggggtggtgtcggggaggacccctgggcttcctggcacagtatggtctggaacctaacctgttgttggtctgggacccctctcgtcggcatatggtaaacctgtgtcggctttcgaaatgccttgtcatgaaagcttggaggtctcccgacgtggctgatccccacgggctggtgatccgggttagtaatgtcgtgagggtaaagtgtaccccctctgcagaggttaacaaactgttcgaacagtcgtgcccacggtcatgggcggatgtgaggtgatttctagcgtagttttgtttgactactgcttgtgaaattgctgttgtgaaaaggggttcgatgtttgaaaaatctgtagctgatgggatcagctaggcccgggtggccgtttgaaaagttgttggcccgggtggccgttgaaaagctgttggccgggtgccaaccttgtttcaattc

SEQ ID NO: 11034 - DNA, 1800 bp, Oryza sativa
caaccaaaactagctcatttttcagctcatttaacccttgctttgaacaatgtgatagtctcttcactgctatctcttgaccatctaaaagagttccctgcaagtgtgtgatttagtttgcacgtatatatttagaacttggtgtgaagaacatgaaaagggatacaaattgtatgatcataaaatgtattaccgggaaaacatttttttcaagggaaaaggtgaattcattaaggaaagagtacgaattattctcctaaactatcgtggttgacataattattcccactgacatcgctcaccctaaacttccaataccgaacaaattacccccctcaacccaatccagagcggttttatcctacgtgacaatccaatcagcattttattttttaaaaatggtggaacccacttgccataccccctcttcctctcttcctctcttccacatgacccacatgtcatacgtggtcagtgggcgcggtgcagaaacgggcggtgggcaccggcacgggaacgagcggtgggcaacggcacgcgggggcgggccggctgtcggccacccgagagagagagagagacaaagagagagagagcacagggattgggaagggcagagggatgacaggtgggtccatgagttttttaacttttctttgctgactggattgccatgttggtgccacgtgtacaagctcgagtcgaaaacaattcaaaacagtgcttaaaggggttatttgtctggtttgtatagttggggatgaaggatgtttggttttcgggttcaggggtaattcgtactttttccattcattaattaggagacaattcctcacacacaaggtgtggtatgagggtacaagaattattatgcagaaggaaaagtctatttatgccttgaaggaacatcctctcttctgtttttacatgttgtctaaaaagtcataaaaatataaaaagaattgataaaatagaacaacgtgtgaagtgtatctcgtgccagaaacctaaatgaacttcacatcaactagcaatgccagatacctatgagcttcacacatataacgtacaatgctcgctatctcgtcaattatcctattctgtaaacagtgatctttttgttaaatgaattttcctataccatggtcatgagctactttatctccctgtcctagtgtggtgaacttgtccaaaatccaaacaaaacaatgaaaaggtaagatcaattttacggtacttaagaaagtaccttaatacctttaaaactttgctatgtggagttaccatcatttatattagaaaatatgagaccttcttaaattttaataccttctaaaaatgataaaattgcccaattaattaaatgtaggtcatttcgtccagattttattatattatgatgataccttataaaccataccaaaaccaccttccctgagcctatttcgctcgtcgaagttatttgttgctgtctgcaaagttcggagatcaagactgaagtcatcttgattaaatgaccctgttgaataaaaataagtacatgacagcagtcagcagcccaggatatatatgcctgatcagatcggctgattttacagcctccagtttatcagccctaaaataataataaatgtggtggggagtgcaatattacgtacttagcttgttgcgatccatgtgtgttaatagtctcttcatcacaaattataataactatattttttatatatttttatcggtattcaatgacatactatgatcattaatgtattccatattatgttcccaacaaatatgaaa

SEQ ID NO: 11035 - DNA, 956 bp, Oryza sativa
aagacccgatcccctcaggccagaaaatgcttacgctattatgagggctcgaggaagttgcgccattatttccaggcgcatcgggtcacggtggttacgtcttaccccctcggccaaatcttgcataaccgagagggtactggacgggtggtaaaatgggcaatcgaactctctgagttcgatttgcactttgaaccacgccacgcgatcaagagccaggccctcgccgactttgtggcagagtggaccccagctcccgagcccgtctccgtccccgaggccagctcgggcccctcgcagctgcctcacaccgcctactgggtgatgcagttcgacggctccctgtctcttcagggcgcctttgaagaaaggcatgcccagccgacggctcgacccgaccccctaggggagacggacgcacctgaacggcccccgaggcccgtcggagtccaggcctcgggacccgaggggagcgctcccagctcccctagattgattgcttggatcgctgagatctaggcgtacatcgcagataagactctacccgaggaccgcgaagggagtgaacgcgtccagcgcatctccaagcgctacgtgctggtggaagggaccctctatcggcgcgcggctaatggagtcctcctgaagtgcattcctcgggaacaaggcgtcgagcttcttgccgatatccatgaaggcgagtgcggagcccactccgcctcacgcaccttggttggcaaagcctttcgccagggtttctattggccgacggctctcaacgatgcggttgacctggtccggcggtgcagggcgtgccagttccacgccaagcaaacccatcagccggcccaggccctgcagaccatacctctttcatggccgtttgctgtctgggggctcgatatcctgggtccatttaggcgggccccgggagggttcgactatctgtatgtcgc

SEQ ID NO: 11036 - DNA, 4596 bp, Oryza sativa
cctcaagaactctcaaacatttcttcaactgagagacgtggaacacattatggatgccaagcatgttggagggaagctcaagctggtaagcaacttcacctctacgttccaagatcctgtatggtcccacaaagcgtggtgccaactttcctttggtttggaagcgatgtactcccctgagcggagtgacacggagatacacataatcccctgtttcgaaagcgagctcccttcgtcggttgtctgcatagcttttctgccgagattgcacgattctcaatctttccctgacagctctgactttctcttctgcctcatttaaaacttctgtaccaaacaactggcgttcccctgtctgatcccagaagagcggggtacgacacctccgtccatacagtgcttcaaacggtgccatctgcagactagcttggtagctgttgttgtacgagaactcagcatacggcaagcttttgtcccatgccccaccaaagtcaagcgcacaggctctcaacatatcctctagtatttgattgactcgctcggtctggccatctgtttgtggatggtaagcggtgctgaaattcaaccgggttcccaattcttcttgtaatttctgccagaactttgaagtaaattggcttcctcgatcagacacgatcttcttaggtacaccatgtaaacacataattcttgccagatagagttctgctaatttcttccctgagtaggtagtgtgcaccggaatgaagtgagccactttggtgagtcggtcaacgactacccaaatagaatcatgccccgatgatgtcctgggcaaaccggtgatgaaatccattccgatttcttcccacttccattctggaatctgaagtggctgtagcaaacctgctggcctttggtgttctgcctttactcgttgacagacgtcacagagtgctacgaattcagctatttcccttctcatgctgatccaccaaaacttctctttgaggtcttggtacatcttagtactaccgggatgaatggaatactgagtttgatgagcctcggttagtatcaggtcttttaattccttgttttcgggtacacacaatctttctcccatccagattgttccttgttcatcctcaacaaaacctcgggcttttccaactctcatgttctttttgagctctgctatttcaggatcacttgcttgagctatgcgaacctgctccaccagtgtgggctgtgcctctagggcagccacgaatccgtgctcaactataccaaggttcagatgttccaaatcgcgttgaacctcacaacatagttgctctacccatgcaacattgcagtagctcttcctgctcaaggcatctgcaaccacattagccttgccgggatgataatgtattcccatatcataatccttgatcagctccaaccatcttcgctgtctgagattcaaatcaggttgagtaaagatgtactttagacttttgtgatctgtatatacctcacaacggttaccgatgagatagtgccgccaaatctttaaagcatgaacgactgcggccaattccagatcgtgcgtcgggtagttgccttcatgaggacgcaactgccgtgaagcataagaaaccactttgccatcctgcatcaacacacatcctagcccctggcgagatgcatcacaatagacctgaaaatctttcgtctgatcaggcaggattaagactggtgcagacaccaaccgtcgtttgagttcttcaaaactccgattgcattcagcagaccagataaacttttcttccttcttcaatagctgtgtcattggcttagcaattttagagaagttctcaatgaaccggcggtaataacccgcaagtcctaagaaactccgaacctgagtgactgtccttggtggggtccacttggtaactgactccacatttgctggatccacagctactccttgagcattcacgatgtgaccgagaaactgaacttccttaagccagaagtcgcacttgctgaacttggcatatagctggtgctcttttaacttttcaagtaccagccgaagatgctgctcatgttcttcctcggacttggagtagataagtatgtcatcgatgaaaaccacgacaaacttgtctagaaattccataaacaccttgttcatcaaattcatgaagaaggcaggtgcattagtaagtccgaaagacataactgtgcattcgaacaacccgtaccgagtgatgaatgctgtctttggaatatcctcttcgcggatcctcaactggtgatagcctgatcgcaggtctatcttagagaacacagtagctcctttcaactgatcaaacaggtcatcaatccttggcaaaggatacttgttcttgatggtgacctcattgagtgcgcggtagtcaacgcacatcctcttggttttgtctttcttctccacaaagataaccggagcaccccaaggcgacgtgctcgggcggatgtatcccttctgtaactgttcatcaacttgcttcttgacttccatcaactcgttggctcccattctgtaaggcctcttgtggatcggtgcagttccaggtaccaagtcaatccggaactcgatatccctttttggtggcattgttgtcagatcatccggaaaaacctctggatactctctgactatgggaatatcctccagcttcttagtggttttctccactgctacctcttgttcttcaccagcagcctggtttaaactgatccctggcttccgcggcactggagactggaaggttaccacctctccttttgcattggtcaacttgatggtgcggctggcgcaatcaatcactcctctgtgccttgtcaaccaatccattccaagtatgacatctaggtccttggattccagaagaatgaggttggctggaaaaatcaacccttggatttcaactgtcacagatgggcagtagtgagttgtggtcatgccacctccaggagtatgaactcgcattggtatcttaagcttcactaaaaataacccatgtgcaccagcaaaacgcttggaaatgaaggaatgggttgcaccagaatcaaacaatattactgccggtgtcgagttgacgggaaatgtgcccaatataacctctggtgctgaccgcgcctcctctgcagatgcatgattaacacgggcctgaacgaacttgggtccagtacgtcttggcttcgggcactttccaaccgtgtgtccgggtttgttacaattgaagcagagttcgggtttttctcccaacctcttgggctgttctggcagagctggccgaactgattgagctggaatctttagtgaactcggagtagggttgagactgtgctgctcactgttgttgtgactgccactatggtggttcttgttgaagctacccgggtggtagggacggtgcggtcggataaccatggtggaaggtccaccgtgatgtcccattgtgaaacgaggcttctgactcttcccctagggagtcctgaactgagctgccttcctcttacggtttattttgttacagtgctcctcctgacggatagccttatccaccagcttctcaaagtcctcataatctctagagatcaactggttagtcaattcatcatcaagaccagacagaaacttctcctgcttctcggcatcggtacgcacgtcctcaggggcgtagcgcgcgaggcggttgaactcatgcaaatactctataactgttctggttccttgttgcagagaacggaactctctcttcttttgtgccacaattccctcgggaacctgtgctttattgaaactatgacgaaactctgtccaagtaacctctgccccagttggacgggtcaccatgtagttgtcccaccaaacagaagcggggccttgcagctggtgtgtagcaaaagcaaccttctcctgctcgttgcattgcaaaagattcagcttcttctcaatggcatgaagccagtcgtgggcttcgattgggttggtggtgcttgagaaggtgggcggcttgacacgaagaaattctaacagtttggactgaggaggtggaggaccaaactgcaggttctgctgttgctgctgtgcttgctgctgcacctactgcatcacctgatggtactgttgctgcatctgttgcatcatcattgtcatcatctgagtctgattgtccaacacctgagcaattgttgggttctcgggcggtggggacggactgttgtcagatgcaccgttggcacgtgctccattgatcggctcttcgctgccactagcgttgttcgagtcgcgtgaaccattccttgtctccatctgaaggggataggtagaaatatgagaaaagaaagaaaaacagggggctcagaaactaatcttgcttatgaatttaagtgcaattatcttaatctgggattaaaacagtgaaaaagcaggcacgcaagctcctaattgaggcagtcataccactgacacatgatatcgaccgacgactaacccacaagcaacaaacctaaacacgaaaactagcaagcaaacagactaagaaggcgataaagctaagggcggcgactctg

SEQ ID NO: 11037 - DNA, 508 bp, Oryza sativa
acattttgcagtaattatatactattaacatttttaatctgacaaaatataggccaatatgtcggacagtgtcggatgctgtccatgtgttggatgccattgttgggtatgatgcacttgacgctgaagccactggagcagcatccaagtacattcctaatggtggatatggacaattcttaaggatggatggattcaaaggcaagaggattggtattcccaacggcttcttcactcaagaaatatttgagaagaaacagctgagggcataccaaaaacatattcaattaatgaggtacacaaacacaaagcacttctaaaagataatacatatgctagcatatgtgcattcagtctataaaagattttggtgatattcgtattagaagcatcatttatgaagaaagaaattgttgcagtaaaataatattctttctatgatgtttgaaagtataataaaatgttatagtcaatattgtttgtttctggcaatctggcataaaaatga

SEQ ID NO: 11038 - DNA, 1272 bp, Oryza sativa
caccggcgatgtgggggaatcggggtccggcggcggcggacggaaaacgagcggcggccgaggtgcgggcgggctcggtgagcgcgacggcggcgatggtgcggcgcggcggcggctctagcggcggcggctcgcggccgaaggcggcggcaagcggcggagctcgggtgtgacggcgcgggcgcggtagggggcacgggaggagacggcaagtgggggaaacgagagagggagctcgggagagcgatgtataggtgcgggagggggcggacgtggccggggaggtggccgatttggccggcgacgtggggaggagagagagaaagtgggggattcaaatcccccaccacttggggcgcgcgcgcgcgggagatgtggagggagagggcggcgacgtgggcgcgaggtgcgggcgcggagtggaggcgcgacgtggagcggaaaaggcggcggcgattgccggcggaggcgggcggctggaggaaggggacggcctgacaggtgggccccacctgtcagcgtcccggagagaggggaaggggaacgggccggcccaaacgaaagaggccgaacgcgggagggagtgggccgacggcccaacaaagaaaaaaggagggaaaagaaaagaaaaagagaaaaaagatttttccagggattaaaattgcactttggtgatttttaattggtaaaaattatttccaaggctctgaaaattccactaaaaatcctgttaatatattgtgacatgtggaacccaagaaaaatcccacaatgccaattccaattattatttgcatttattaattagggaattagctctaggttaattaagataatttcttcggacgatttatttagccaaatttttttttaaagcaagcaaaaggggaaacttccgggcgtgacaaacctaccccccttaaacggaatctcgaccccgagattcggaagagctggcgaagaggtgcgggtgggtggccttcaactcatcttctctttcccaagtggcctcttcctctgagtggtggctccactgaaccttgcagaatcttattactttgtttctggtccttctctcgctggtttcgaggatacgagtcggcttctccacatatgtcagatcttcctgaatttcgatgtgatccggacttgcctgttcctcaggaactctcaaacatttcttcaactgagagacgtggaacacattatggatgccaagcatgttggaggaaagctcaagctggtaagcaacttcacctctacgttccaaga

SEQ ID NO: 11039 - DNA, 8139 bp, Oryza sativa
  unsure (1)..(8139): unsure at all n locations
gtgttaggactaacttcgacaggatgtgcattgttgaatgcaattatttcagcgagagaacgaactggcgagtatgataagtctgacagatagttgttcaggtttagcttgaactcgnnnnnnnnnnnnnnnnnnnnnccacttttagtgccatcgaatatgacactcaaattagctatctcgaggttttcgattacaactgcaccctgttgccttcagagatgagtaacaattaattaaatggttgtagtttacttctggtaaaattactcaattgctacatatatgatattagacaacttcgacaaagcatcgtacagggaaaagagagaaggttcaaaaatttcgttgatgattacctctgaaatgtgataggtaaaaataatcttcaaccatttttttagtttaattcttgtagcaatacaccaataccaacttccgaaagggaatataagcattaattgataacaacatggttgttagctggggtgttggggtttcatgtatgaactaaattgctcgttttgaactttgaagtcattgtcttttctgcccaaagtcaaggcaagataacttacacaacccaacattatttttcttcaatacacaactcatattaattttatttccttgtactatgtatatatttttggcacaatcccatcatgtgtcacaaattaaacgaattacgttgaccatatcagcaacctaaattttcatgtttctcatctaataggtcatatctatttatactaccaccacaacttacagtatattagtataatatttttttctaccagagtagaactcacggttcttaaaattatctctgatggggataacagtggtcgtagtagagatgaccgtagaggtagtcttcctatatatacttacaaaatgtgaaaaatcactgaagtatcgtcataatattcttatcataggatcttacgtaaacgatacaaatatcctcgcgttagatatatattgctaagttaactaataaatattatttgggctatggtctagatccttaaaaaattacctcattgtgttgaggtgttgcttgtacaccatcttcctgacagttccatttgggaaatcaaaaaaaccgtctggtatgccaatcctcttacccttcaacccatcaattctcaagaattgcacatatccaccagcagggatatacttcgatgctgcttttgtggctttggcatcaagagcatcataacccacaatagcatccaacacatggacagcatctgccactgttcgacataacggtctgtgtatttgaaatcaaaattcaacatatgtaaaattaatgttttgataggataagaaatactttagatgtcaaattaagaaaaatgggctataagatatacctatgctcataaagtttatatggtcaattttacaacctctaaacctatattcatacaacattgttaggaaatcccctcattaaccgaagaaaaggccaaaaaataccaatattgtttgtaggatgatattatagtagtttgactccatatctgatataaattgataatcattaatgttcaattgcagaattatttaattaaggaaaaggtaagaaatatgtgaccccttgacaactacaacatggcattattatttttattctaacttttcgagttcaagagtaacaaataattaaagcaatgaaactatgtattgggatgcatcttccacacaatttagatgccaagtaaatatcggacaattgcaactattttttatgaatttttggttatcaattctaaaaaataaattaatttatatttgaataaatatattttaatttataaaaaaaataaaaccaaatgactaaaatatcgtactcatatttatgccaatgcatacttaatttgaaaatagaaacataatacccaataatgaatttaataaagctacaaagaaataattactgttaataaactgtacaaactatctttttatattataagtcgttttgaccttttttttctagttaaacttttttagtttaactaaattgatagaaaaatttagtaacatctacaacaccaaattactttcattagatataacattggatatgtttcgaaaacatgtttgttttatgttgaaaatattattatgtttttctataaatttaatcaacctagaaaaaaaggttaaaataactgataatatgaaacgtcactacaagaaaacatgcctttagtaaccatggatttagttaccaaggaatttggtggctatagtccatcactagcaaccaacatcttaatggcttggttactccaagtcgtacaacgttttagtacactttgtatatgtgaggaccctacgacaaccaaggactgaaggacttaagataattatttgaaaatacagaggactccaattgaaaagtgcagctattatctgttctcgccatggaacacatctccatcatagaaacacttcaaagacatcaaaacctagggctcagcggtggcagtggggctgagcaacttttcttatatacatgagcaacctttcttatttggtttgaccccaactttttttttatcaggtgcaccgtatcaatagccttctgctatatacatgccaagcatactgtggtcacaaacctgtcccaagctttgaaattctataaatgtacggcatatatttttcttgtattagaagtgattgggtgtgacatccacacttaagtagtattagttattttctgactattacaatgtattgttcaatcaaatatactcagatttgccataattattttgtttatattatggtgatattttgatctgtatggattgttcttgtgtgtgaccatatcttttagccaccaaggttaatattgttcttggtggcaataggtatttaataactactactctgtcccataaaaaacctaattctagctataaatctggacacttgtgtgttcatattcatagtcaggattggtcgttttttaggacggagggggtaagagccaagggttatagtgcacttttatttaccaagtactatttggttacaaaataataccaatatttactcggttactattagttcaacctattgttaccaagtattggctggtaactggaaggtatagtacgtttaacaaccggattatagccatcaagatacgtccaaggtataatggtggttacatatcatcaacagtgatcaacatgtgatctccaatgactaggcaccttaatgactaaaactcattttcctttagtgaacggagggggtacgaattaacaatttttagcatatacagctggtgaaaataaaaacttacccgacggtgtcctgcctagttgtgaacgggataacacctgaccggcttgtcaacccaaccgtcggcttaatccccaccaccgagttcgccgccgctgggcacaggatcgacgccgtcgtctccgtccccaccgtcaccgccgccatgttcgccgccgcggcgatcgccggaccggtgctcgacccgcacggatcggccgagagcacgtatggattctgcggacgtcacacgtgcgcgcgcacacacacaaacagttagatgacgcccagtctagcttgcgttcgatcgccatggcaggcggcagctgtgtcgagcttgccgccggctgcttacccgggattggccgccgcgtgcgctccagccgcggagacccggcgagctgcggaagttggcccactcggggaggttggccttgccgagcacgacggcgccggcgcgccgcagccgggccaccacgccggcgtcgcgcctggcgaccgcgccgagcagcgacagcgacccggccgtcgtgttgagccggtcgcgcgtcgcgatgatgtccttgaggaggacgggcacgccgtggagcgggccgcaacggtggccggtggcgcgctcggcgtcggcgcgcgccgcctgggcgagcgcgtcggggttgacctcgatgacggcgtggaggagcgtgttgaggcgggcgatgcggtcgaggtagaagcggacgagcgccgtggaggtgaggctgccgttgctgaagccgagctggatggcgtcgacggtggcctcatggaactcgaagccgagcgagccgccgccggcgagcgcgacagctgcgacgacgacgacgacgagcgcgggctgccgagccatggcgttcaaactggatagtttttccggtcagacgtgcactgctgtctttaacaatacggcagcagcagaacatagtgagaaagtctggtttgcttcttaacggttgcgttcatcctatttgcacacctaaactttcatttgcatgcaaactttttcttaaaaacttttcaaacgcagatgttgcatgctgtgagtactgtaactttcatatggttaaaatcaaatggtcaagagcatttttttttagtgagaattgttattagctttgcttgtaaaaactttgtaaggtatttttgtaaaatatgtagtgcaacttcatatatagtgtgtaaacctgaaaattattgttggatacaaaatggaagcctgatatttatctacgtcatcatgagtaaaactacggtgacgtagataaatcttagtcatcctttaacgatagtttcctcgtacatttgcactgcatatatatagagtttacactatatgtttttaattttttttaagtatggatagcaatactcaaactttaatattggatatgttacacgtcaaacattttaaactaatcgtattcttcctttaagtcgatcatgaggcaattttacatattttcattatttatactgaaaacattacctaagttataaaatgattcttgtgtgctttcttaggttcacttggtaagctgaaaatgaatcttaaagcaaatgggaggaatgcaaaaggtgaaaaattgagaaacaaacattccacctcaggtggcgattggatggatggttggattagggaggagatatcaacactgacaacacatactacacaataccccgcgcattgcagcgggtatttttagatgtatttgcaaaaaaaaaacacagtgaaagaacatgatgttattttaaagtgatatcgtatgatttctacttgagaaatataaaagttaactgaattgattgatacctgagggaataattacagcatatgtcttgtaggttgaggacgatatcaacatgtccctgtgtttcatgaacgcactcaactgtttgttgaagatattgatgtttctgcatcaagtatatatagtataagaaccgggtgcagctagtatttgctttttttaaaaaaaaaaaagaattgggtgcgatatatacaatagctacaacaatgttgcaaaatctggcataatagagtaaattccctgtactcttaaaaattcatgcaatctctctcgtacctctaaaatttacacgatcctttctatacacccgaaatttctacttgatccctgtctagggtctatctgataccatttgtgtgacatcccagcctaattaggatatagcttgtgtggcccatgagagctgtgtgtgcatgtttcgtaccaccttactagtttagcaagggtggaactaacttataagggtttgttctcccaaccatatcgctactgggttaacctttttacacaaagcgtagaagaaagtgtaagtggagtgatgtgtaagttggctcgtccgtcggatgtgctgggctacgtggttctgaagagtggttgttacaaatgatatcacagccgaccctcgcagttgcacgtacgtgtcaatgtgcgggcatatggtgcatgtcacatgtggactctgtgtgaggcacatggcatggcatatggcgccaacactggatgtacggacgtgcgctaagaggggttttgttcctgggatttgcctatgcttgtgtgggtgagttggaccgacggggacgtcaggtcctttgagggatcgtgtgatatcccggctgttgacggtcattagcgatcaatttcgaccgtcaatattaacaaaatagaggagaactagtcattcttgcaatgcatattttgtattaaaataataataatccactagtattaggtttactaaccttttgcagagaataaccataaagtggagaagaattgacatcaaatcaaacgatcaatcaatcggacgatgtcgagaatcagacttatgtataaaatgggccaagaactaagaattgacaagatgaattgggccaaaattcacaagtctgcaacaaggatcaggagaagaggccgccagccaaaccatgggctggttgggccgacccctggttcggtcgaacctcaggttcgtccgaacccccctcacggccgggaaccccaccgattttagggaattttatgatgtggtccatcacaaatgttatacatgttgcatgctaaactgtatggattatgatgagaaccataatcacgccacacatgtagaatttaccgtgaatctcacatgtcaataggaccgttgatgagggtgcacagtatggacgacaaaacacgcccctaatttttttaaaaaaaaattaatccattccgatacgttccaatgtgtttaaaagcctcttgctctatttttttttttaaaaaaaaccactcttagtttttattgatttggctagaacatgtttttttcttttctttagcttatataagtgttcgataattataatggtcgcctcaaatagctatggctcataacgatgatatacgtgtgttgtaggtattaaagattttgtttttctgcttatcaacaaataaatgacataatcaattttttcaaccttcatttaaaaaaaatattcttccgactttggaagagtgtcaccactaattcattttttttgtttcttggtattttctaaatataggacatcaatttgtgtttcgcgtaggggcgtcgaattgccctgtatgtgaatgctaaagcgtatttatagaatttactttgtactttccacacataaatcttagcaaatttactatatccatattgttatagtaggaaattgaagtttttttgggattcaactgtatcgtgccttgcttttgttcttgattttgttctctaacttagccaacagctaggtgaggtggggggactggatagtaaagaggataagaaagaaggatgaaaacgaaaaaatgaaagactattccatagggatgtggaaggaccttcctgcaatagaagtttctcgatgagaactttatgatattttccgcagatgatgtaacaaataaaggatcatcctttcacttatttagatattctaaggtggttcgttaaagtggtttttatatcatttatatatgcattagatgagtttatcgatgtgacatgtattgaacatatatgttaaaatcttcacctaaatcttttttacccattttttatctcccacttacaaatgaatgtcgatataatatattagtacaacattactagagattatagattgatgaccagctattgatgattgatgatatgtaaatatgtgatactggctattcaaaccactttttccaattatacaaaatcaccatccaaaaccatcaaaaggtgtaatataaacagtattgcaaagtttggaagcttgatgtctagtttcaaaattgggggtgctagatggatttctatccaaagtttaggggtatatgaactttttactaaattcaataaatcctggaagtaatttatataaatcctaaaagtaacttaacacaaataaaagtaagtttttacggaattaaaagtaaatccgttgtgtggggttaagggtaaaaacataagtctatctagaaattaaatttaatcatcgtcaattatagagctaactaaaattaacaataaaagtaaaaaactaacaatatgagaagtaatttaattaaatttaaaagtaatttacatatatgataaaaattaatttacatatacaataaaagtaatttaaaacatattttctctcggaatataatcatgtaaaatttaattataacattggataatagacctgataagtaatttaaaagaaaattttaattataacattggataatagacctgataagtaatttaaaagaaaattttatttgaaggttagct

SEQ ID NO: 11040 - DNA, 9287 bp, Oryza sativa
ccgcgctcgccatgggcgccgaccgcgccgtccacgtcctccacgaccccgacccctcccgccccctcctccccctcgccgtcgccaagatcctccgcgccctcgcgctccaggagaaccccggcctcgtcatcctcggcaagcaggtaggcgcgcccaatcttcgatttgaccgattttgtggtatagagattgaatttacttgatttcactgataaattcgtgggattgtaggtaggtgatgttcctgcatgattacctagttgtggtgattcttttttgcttcacagtgtgattatccaaggattttcttaatgggaagagttcatgggatttcaggattattatatatttcttgcctcattacatatcttttatgttttattgcattagggattagggattcttgttagcttgtgagactgggattggggtatctcaatttgatcgagagctttcattcttaatgcgaagagttcatgggatttcaggattattatatacttcttgcctcattacatatcttgttatgttttattgcattagggattagggattcttgttagcttgttgagactgggattggggtatctcaatttgatcgagagctttcattcttaatgttcttataatgttcttaatgcgaagagttcatgggatttcaggattattatatacttcttgcctcattacatatcttgttatgttttattgcattagggattcttgttagcttgttgagactgggattgggtatctcaatttgatcgagagctttcatttttgcagcataattaattgtgtgcttgtgattacattttgacggcttcatctaatcaagacatattcctgtgatttggggggcatgacttttgtgaatatggaatgattgactctgtatttggagcttagtacttcattcttacgataataaaggttgctatttccccgcaaaaaaaaaataataaaggttgctattagtgtgttttgggttgaatcttagtggtttacttcttggttcgttgaagcttgtgtaaattgacaatgttgatatccatgtgattgtatagtgcaaatttagttaccaatatgcactatggtaccaacagtgagatcccatctcaaaaaataaagtgagatctgagagaaccatggttgtgttaatgcaagccatttgctgattttgcttctaccttaatttaatttattgccctaaagtgaggtatagtattattctgagacactagggtgcatctctatacagtgtacttgtgttcaacatccatgaaattggcaaattgctcctacacatgtcctcgtagtgcttgactttgttgaccctgtttaatatgaaagttcaaagtgtagaattggtgcattttcccccctttagacctaatgctcctggattatttcatgacattgtctaattgctgcatataagacttgaatccttagtactattttattaaactttgacgtcttgattttttttcaaaatgttgacagtctttgctgtcatgagcaaatgagtacgtacaaaagacaaataagaaaatattagctaactagtgataggaaatttaacttgaaattatatatattgataatcatcaggtattatatcttctggtaattgcaggcaattgatgatgattgcaaccaaacaggacaaatgctagctgggttgcttaattggccacaaggaacctttgcctcaaaggtgtgttttttgttactccttccattgctttttactgctgtcatgattgccctcgcatgcaagtggggcgccaagagcatggcacagcaggctgggctgggcttgtcattttaagttcattacttgaagatttgttctccccttctcatcacttccccccgtgcctgttaatcctctcctcaaacacagctcctggctggggagatccagggccaaaacccccagttacccaagggttgtcccattgatatttaaacctagacaaccattacctttaatttgattaccaaatgagttcttaacaatgtatttgctccttcaatttttttctgcatttaaatgatctgctcctagaccctaaaccgtatgaagctcgtgttgaactttggtatagtttctcccacaattgtggaattggccacataggaccttacagtttttttggtttgctcatttttgtccttctgccatgtggcgtcccgtgtggacttgtccagtcagcgccttctttccaatttagactatgcaagtgactgaaatgcgtgctttgcatcacctgaaaaaacaaataatgaactacatagggtcatcctacatcgatggtaagaaaaattagggcaattcagttactttatatagtttgtagcatttgaaggccctgaatattgcctgcccgaaccctggatattgcctgcctgagaccatctgtgatgtcataagaggcattaccattaaaacaagccaactaacgaagctcagggcgctaacataccaattcacagttgaatgaccaatttgagcaagaagcaagggaccaaatgaactattaatctttcagattgtggaaggaatttctgagcactgatggaagtttgctgttccgtttttttaatcccattttaggaacattaattttttcttctttcaagatatctgatttccttttgttggccgaacatagtagagcaaccaaaaaaaatcactgtaatggcgttttctatgggttcacattgaccaagtgtttattggttttctcttatcatggtgtttccaattcaagtttgtgttacacaggcagttgtattcaaagatgctgtttgattctggcaggttatattgaacaaggaaaaggctactgtggagagagaggtcgatggcggaatcgagaccattagcttggatttgcctgcagttatcacgtatgttccatgaaacatttattttctttcttttagttttatttaacaaggctagtacttcgattcttcataagcattgcgatcatttagtgatctctgtcacatagctggatctttgtattgcattgtggttttgagccaatttcagaaattgcctaaactattgtttgatttttgtgacagcacggatttgagactgaaccaaccaaggtatgcaacattgccaaacataatgaaggcaaaatcaaaagtcatcaagaaagtcacccccgaagatctggatgtagatatcagatcagacatggaagtagttgaggtcactgaaccacctaagagaaaagccggtgtcattctttcatccgtcgatgagctcgttgacaggttgaaaaatgaagcccgtgttttataacattctttgtactaatgctcatgagctaaggaatgtggcatatgcaaataaagtgtagttataaatggtcatcgtatgcaataaaaatgtggcgttcccgtatagcaccagtatacctgctaatggtcatcgaaatgctagtgtgtgtgtgtgattttaagaagccatgtaagcagaagtgttcactaaaatcaatcaatctttactcattcagaaaaaaagataattctatttatagaaataaagatctaggcatctagcacacgtatgatgtggtaaaattagtttcgtctccactagatatgccttgagctctacaactatttacgtttcaacctcgttgctgttgtttcgtgggatgtagtgctggcttggtaaaggtaatttggttcaaagctgaaatattttcaagttaataaatcgagaggacaaaaacattgagctaggaaagtgttcataaatgggaagtgtctgatttttcttttaactgaaggagctcatgggttgtacttggaagcagcttctcactaaagtcagagatataggtccaaacaggagggactcgtcctcatggacccatacatcaaaaacacacatcccaacttatataggccgtgtttatgtcccccttcaaacttccgaaaatttcgtcacatcaaatatttgaacgtatgcatggagtattaaatgtggataaaaaaaacaattgcacagtttacatgtaaattgcgagacgaatctttagagcctaattactccatgatttgacaatgtgatgctatagtaaacatttgctaatgatgaattaattaggcttaataaattcgtcttgtagtttacaggcgaaaaatgtataatttgttttattattagtctacgttaaacactttaaatgtgtatccgtatacttaaaaaaatttttgccaagtaactaaacacaaccatagtatattacattacatgagtcttatcaggttgtattatcagatcgtactaagtacatgaataaatgggagtgacatacagtttgagccgatctatacatactctcttcgtcccaaaaaaagataaatcctgggtttccgtgtccaacgtttgactgtccgtcttatataaaattttttttataattagtatttttattgttgttagatgataaaacatgattaatactttatgcgtgacttatctttttttttcatatttttttcaaataagacggtcaaacgttggacacggaaactcagggtttgtcttttttttttgggacagagggagtacaaaatatcactgaccccctggtggaagcagatcgtctgacgttaggcgcacaacgtcagagggacgtccagcgtcgatccatcgtccgatcgacatctcacggtgctgctgcttccttcgttccgcatcgcacgagcacggcgaggacggcccattcagcccatttacgagcaaccgcggagggacaaaaacgaacgagactgctcgtcattcgtcaatctgccatcgcgcaaaaaaaaagaaaagaaaaggcaacccccggcatggctgcccaccgctccgctgtggctcgcgcctttctcgacgcgggcgtgagaggagcggactgccgaggaagactgcttcgacctcgccctcctctccatccctcggccccatgtcctcccccacgcgagagcttccaggcattgccgtcctcgacaacgacggcttccacagcggcggcggcggtcgcgcgagcgcaacgaataaggcggtcaaacgggctcgcggtcagcccatgccagtgaaaatggcccacaaacatcctcaatgtcgtgcgccgccgttcgttgctctgtttctggaggggaaaaagggcgccattatactcggatggagggaaaaaaaagaccattcggctgctgttcttacggcgatgaagatggtgagcgagcaacaagaagcttttctccacttgatcgtaagtctgcactagttacctatcttcttctatatccttcattaatagcttcttagaattcatcaaactccccttattaggttgccccccttgccatcaaagaaacatcagactaaagatacaaatcaagttctgccatctaactcgtgagatggaaggagataggtttgtaatacatctccatgctcgtgtattcttttcctttttgtcatatgtatgcactagtctcatatttttttatagagaaatgctagtaccatgttctgtacctcacattggaatggaattcaaaagtccagatgaggcttggatattttggcatcactatggaggtcaaaaaggctttgaggtcaggaaaaggtacacaaacaaaagacaatcggatgacaaagttacatcatttagatatgtttgtggaaatgagggtcatcgaggacaagacaagagggatcatctaacaaagtgtccctgagctgaaacccgcactgattgtcaagtccgcatgggtgtagtattggacaaaaagacggaaaagtataaagtgactaacctagttttggaacacaatcactccttgcacttgcctgaaaccttgcactttatggtttcacaaaggaaaatttcagatttacaagcttttgaaattgaaacagctgatgatgcaggaattgggccaaaggcagcacaagagttggctagtagctaagtcggtggatcacatagtcttagctatagccttcgtgatcgcaagaattatttgtggagcaagcggcaaagagagatggcatatggtcaggcaggtagcatgcttatgtatttccaggacaaaattgctgagaacccatcattccaatatgcattgcaaatggacagtgaagaacagatagcaaatattttctgggctgatgctaagatgataagtgactatgtacattttggggatgttgttagttttgatactacttttggaacaaacaatgagagcaggccttttggtgtctttgttggattcaatcattttagagaaacagtagttttttgtgctgctctcatgtatgatgaaacattcgactctttcaagtggctctttgagacttttctaaaagcacataatgggaagcatcccaaaacaatatatacagatcaagatatagcaatgggaaaggccattgaggaagtatttcctgcagcatggcatggattgtgcaccttccatatttcacaaaatgctgcaaaacatctatcgcaagggaataatggagaatcaagtattctttcagatttaagcgcatgcatgtatgagtatgaggatgtgacaaaatttgaatatgaatttaacatcatgagggaaaaggtgagcaagcaaacttggctagatagtatatacaagttgaaagaaaaatgggctaaatcttatatgaggaatgttttcacattgggaatgagaagtacgcaattgagtgagagtttcaacaatgacctgaaaattcatttcaaatctgattttgatatcattcgttttttcaagcattttgaaagagtggtgcaaggaaaaagaaatacggaactagcttccgaatttgattcaaggaaaaaattgcctagaatcaaaatgagggcacctatgctgctgcaagctagcaaggtgtacacccctattatatttgaagcttttcaaggggaatatgagagatcaatggcagcatgcactaaagcattggatggcgataatgaatttctagtatcaattaggagttttgagggagatctaacatttgaggaggagtacagagttgttggtgatccttcagagcagacatctatttgcagctgtgggcaatttaataggattggaatattgtgtgggcatgctctaaaggttcttgatttgatgaacatcgagtcacttccagcacaatatatattaaagcgatggacacgggaagcaaggagtggaatagtaacggacagcaagggaataaatataattgagaacccaatgatggaagcttcccttcgctacaaatttctatcccacaggtttctcactttggcccaacaagctgctagctatcctgagtgcacattgttagtaaataatacacttgacattcttagcaagcaaattgaagagcacctcagtggatgtgctagtacttcagatcaaagtgcaacccacaaggaggttatgcccccaaataacttgttgagtaatgcacgcctaaagaaaaaggaggttcgtgttagaggttcaaagcgaaaaagaatttggcttgacaaaaaacgagacactacacaaaaacgacaaagtaaaaaagggtaaaagtccaaaggtatgttctaagaagatattgcaataccatgttactattcagtcatgtgttcacttcatccttttacattatttggttcgaaggaacaaaagactaggcaaaatgcactccatgttggtgcagcaacacaagtggcagaagatagttttgctatggacaaggaggagcctggagaatacatgcacctaaatagcttcactcagcttttgacggtaatacatgcacctaaatagctatgaaaatatataataaaacaaccaatgattaatctttttctttgtaggggcagataaatgatgatcttttagttgacgatgcattttagtgatgaagtcatgttctggaggataacccaagtttggttgcaatactgtgataatacaagtatgatggagctggggaaaaaacatgagaacttttgtgtctatggttaattttgttttggcagatcctagtgaagcacttctgttctgttttggggttatcctatccaagacatactcttatattggcagcactcaatgatgtatatatgtctagctttcatttgctatcttgaaagcaaaactttagggacaaaatatgttcagtcattagatgtccaatgcagcaacaagtatcacattttaatgttcagtgttcactgtccaagactttctgccattgctatctgaaactctcaatctgattttgtcacaaataaaatgacccaattaacttcttcacattctcaaatgctcacaaaaatcagagtatcaaattgacattattatcacattcaatactgaatcacagtttcaattgacatcgattttcaatctcaattcagatattcccaaattctaaaacagagattttcgccctcttcagaaagctatggtggtgctgccatgcttgtcgcctccttcccatgcctgtccgggcttggcagcaacggtcgccctttctcccgtttttgttcggctcttgcgattccttcgacgtgggtggtggtgaagagcttggcgccgccgccgctgtggaagccgtcgttgtcaaggacggcaacgcctagaagctctcgcgtgggggaggacatggggccgagggatggagaagagggcgaggtcgaagcagtcttcctcggtagtccggtcctctcacgcccgcgtcgaggaatgcggcgagccgcagcggagcggcgggcagccatgccggggattgctttttcttttcttttttttttttgcgcgatggcagattgacgaatgacgagcagtctcgttcatttttgtccctccgtggttgctcgtaaatgggctgatgggccgtcctcgccgcgctcgtgcgatgcggaacgaaggaagcagcagcgccgtgagatgccgatcggatgatggatcgacgctggacgtccctctgacgttgtgcgcctaacgtcagacgatctgcttcccccgctggtagatttcaattatggctgtgtttagttcagcgtaaagtttgaattttggttgaaattagagatgatgtaactgaaaaattacgtgtgtatgacaagttgatgtgatggaaaaggactgtagtttgaatccaaactttggatctaaacacagcctatgactaaccattatttgcctgcgtaatattttactactactatgaggtatttactatttta

SEQ ID NO: 11041 - DNA, 3331 bp, Oryza sativa
tatctccagatttgctaaatgccaattgacgaatccagcttgcaatgatttgacaacaaagaggataataggcagtatccaccattcattgtcttccctactcttaaagctgcacaagattccagagaaagaagagaccagcatatcagtaaagcagatatggcaaggtgcaggtttttccctaacatagctaaaagaacaattaagtcctgtgaattgccattgagaagacagttaaaagaaagtgtagaatatataatctagatatatatttaaacagtttttttaagagttcttttaacagattagacagaagacatactaaatccaaaattaaaaaaaaaaactacggattgagcttccatattcctttatcaaggtgcagaatatatgactaccacatattacatcacagatagagacaaaatcagatgtccccaatttataaaagattttggttaatgaatccaatttgaagaatgctatttattgtacaaaacaaaaggtttcaagttgttcaatttaaataaagacaattcaaataaacatactccctccgtttcaaaatgtttgacaccattgactttttagcacatgtttgaccgttcgtcttattcaaaaaattttgtgaaatatgtaaaactatatgtgtacatgaaagtatatttaacaatgaatcaaatgatatgaaaagaataaataattacttaatttttttgaataagacgaatggtcaaacacgtaaaagtcaacggtgtcaaacattttgaaacggagggagtactattttaggctggtcactcattcaggttttcgataaagtgagtatgccaaagatataggaaaatgttgttggctattaccaccaggaccaaaaacacacacaatcgtacatacaggaaatgaacattggagactagtcaacatgaactcatattacatcaattatctttctgttattccatgcaataactcttgggtgatttaaattcaatgactacgggtaactcacagcagcctatatatgataatcaggttcatgaaccacgaatccaagtatatggacatggtcacatctcctaatcaccgagagcatgcacccaacatccaaactaatcattcaactaatgcaaaaacaatgtgaaccttattatcatcacatgtatggctcatgcactcatagagaggaactgatatgctttccatggtccatcactactaaatgcatgcaggaagagacttgtgcacaaaagaacatgaacaagttaactcctaacagggactttcttaacctaaattatattaatttagatttggatataaatatatattctgttataaatgtattttgcaaactcttattattgcaaccaacagtggaaaattttggaaaggttggtagatctgtagcatgtagtctttcccaactagacatgccttgaacccacgatatgcagccacatgggcatccctaaatccccagaaatactgcctaatctcttatgttagttttgatgtgcaaagtcataggataatctggttgggaacatatcatgtgcacacaagcttcccgtgcacaccaactagcaaatgtcacagaaaattctacaaaaaattagacacatagtttcaatagtactacacctacatgtgcaatcttatcttcaaattcattatattttagccgtaacaaaaaagacaaaatcctgacagatttttacccttaaaactgtcagatttttcacttttttattacgactaaaatataatgaatttgaatatgagactttgcatatatgtgtaatactattaggagtaaatgtccattttgtagaatttttcgtgacatttcctagttggtgtgcacaggaaagttgtatgcataaggatatgttcccaagctagtttcctgaacattggaagtcaccttttctttatttggagaatgaattctggaattcaaaagaaatattagaactacaaaccttttagtgtttagtgcatgaggaacggaagacactgataaagaagacagcccagagtacaaagctccataaatgattgctacaatctgcatagaataaaaattgcatataaaatctccaccgcctgttatgaataattaagccataaaattgagtatatgaacattacttaagtaacaggatgcaaaccaactcttgttaggctattctgaaatagaactttgtaacaaagcataacagatcatgctactcatgcaataccacaaataaaggggttcttagacaaaccatgagaggaaaggcttacaatgtttatgacagaagtagtattccaaagtgcaaaaatacgggtcacggaagatctctttggtcctcggctgaaaagtgcattgagaccagcaagaaagggagacagcaaagcaaggggaggaataagaagtacagcaaggaatgctccaacagatatccaatagtactgcacaagcataagcagggtgacggaaaaatcacccagtagtataatacatataagcagctgcaaagtttcctgaaatattatagcatggttccagtaaagatgccttcctctcaaatatgtgtgtaaaacaggattatagtgcttaccgcataaccaatgggcctacaattttgcaatagcaatgagaaagggaaaagataatctcttttacattccagtgattttagtgtaccctcattgattatcccaccattcactccacctgtcaaacgctttctagaaacagcatagcttgtgcaaggctgatcttgatttagcttcttggaactgatgttcttcctgtaggattaaaagcgataccactattttacacagcaagagtaatattagtaaaatatgatattgtgattggtaattatttccataccttgagcgatcgatgaattctgagacatgatcatgctgatgaagactcttatagaagtgctcattgacagcaacaacaatacctagctgataataacaagaagcagtggcttggaaccatcctaactccactcgaacaccatgccgctcaagttggggatttccatgactattaatccaagaaacaacaggtcccaaagttgatcggatgttcccttgccgtactgtcctcaactgagcattcaagcccgcaaccaatctgttccagatcgcagttgacacatactagagaaagggaatgaagtcaatggaaatgattggataataattttgcacttctacatagaggcttcagatatctagaatatcatatctagactgttcattatctaaatacagcatctgcatgctttactaggtcccaaaaactatgcaccaaaca

SEQ ID NO: 11042 - DNA, 4010 bp, Oryza sativa
ggtagctacattttgggacggaagtattagcaaataacatcattcaaggtattagtatttattggttatttaagctaagttcagatacatctttaatgtatcattaaaatgaaactctgctgaaattggctagtaagttagttcatactaataagttctggcaaaaatgctgctacatccacgtggggtataacttgattgattttaaacagcctacatattgtataaaaccaagaacgattactgttcattatggtgcaaaactggaccagacagttcttgttttgaaagttatcaccactgctggctctagcaccacataacattattgaattacaattactgaccttcaagcctttatagagtgctcgtgatctgcaagagcgaagacatgaatggtcatattcagatttaacgtactcttgaagacgatggattttctttcttctgcgccattgcttccaagaccaggcacaaggatatgcaagtactgaaagtatactatgtatagatccttcccaccactcgtatgcagccaccaaattgatctcatcgataaaacggttaaaagcatcttcatatctggcaaaaaaaaagtaacaagatatcacctatggcaaggaatacaaacaaaatactgatggagacatgaacattcttcggaaatatatatgacatagttgggatggtgcaagtaaaatatatgggactttacggaagatcgttattcttacaaattgcatgagatgggatggtgcagccgtgcaggtacattgtttggttggttatatagcatggtaggagactatctttggtaggtcatttggtagttttttaaatgatatgcattatattgcctgtagcttagttttttaacatgattacatgaatattcatttctgccaataagttcatgaaaatgaccaaaagattatttggatctttaaaggtatgtttttatatcgagtttcatctgtaacatcagtactaagcatgacattttgatctgagtctaatcattataattccaacttccaatcgctcataaagaacaatgcaattcttatgcaggtagtaaggtatgatgctagtagtaggatgcaatgtagaatgagccagctattaagaaatttaaatagtgtatgttttccctgttcaacattagtaaatagtaacacgtaaagtagctttttactatagaaaatgtatttacattgtgaatcattatgagatgaaataactataagtgatactctgctaatgtagattcttagaaaatcttacacgattccgattatagcatcagggggtgagtaaggaaggtgccaaggttcccggaaggtgttaggtcccatgaagtacattctgtgggcatggctttgtgtttcttctgccctgctagccccaggtacctacagaacaaatcagtgccaccatttatcgaaacaaatacaagcagaaagatttctttaacaacctgagatagaaagcataagtggtttctggacatcctttaaaatccaactgcactttgaatcagaaactattggagaaattatgaatttgtaaaaatcatggattgagcatttgactattgtgagttgacgtgcagatgccagatctagtgatttcacaatggggaaatatccagtgaaaaccatcaaataagtgaaaacccatgaaagccatgcccataagttctctaaatttagacatagatataggcattaaatacttttctaccaaatcgcaagtccaaatacagcttcatttgagaaataagacaaatttcaggtgaatagcgtcatgttactgttcacctgaaatttgtcttttttttacgcctaaataaagtttgagattcggtgggaatgtatttcatgcctacacctatctctagtaatcttttcataaatttacagaacttttaggtccagtttcacgggtttttacttatttgatggttttcatcgtatatgtcccctttcacaatagctctacattaatatttaatcgatcctaagattatgttgtatgaattgatacatacctcagccaatgaaagcaaaaaggggaaagaagcacagccatcattgtggattgcatttgttgaccggtatgtgatgtcactctcaccaatcttgactctgagagcacttaagacaagtgccaaaagaataatggtaaaagataggataattgcaaaagaccaaggaccaccaaaagtataaataagttcctcaagtggtgtgtaacagtttggcatcttgtacttagaagatatgcacttatatgggcaggacggctcggtaacaccacctagcatgtaaaaagttaatggttagtttctccaatttaacatcataaattttggagttacaaggcaattaaataattatagttccacataagaccatgtctttccaaggacctacctcttacatatatgaagtcagcgcggttaggaagactatccagagaacaaggcatacacagagatgaatcggacccaacaacatttttgtatgtaccgattgggcattcctggaatataatttaatcattactggttgcgaacaaactaataaaaagcatttgctagttaccaaaacaatagtacataaaaagaaactacctagttgcaaagtattgaccatatcaatataggatgttttattagctcatggatacagatagaaaacccggagtacacaatgaaatcctacatagttcagttaaaattaaaagcgtgtctgaatttgcaagtgacacagatcaacctggccattatgaactgttaaaagcataatataaacagaggtctgtgttcaactaactgttggttaagaactctgagcatcaagcagtagttattttggcaaaatgttgcttaagattatagcagtggcacagttatttgcagttttgcaccctctggggggcaaacagtttacgtagtagctgccatgcatcaccacaaaaaccattatttataaggaacaaataaccaccccatcctggtatttctggataagggcgagaaaccagtgtggcaacccaagttcaaaatagtttatctacgagtggtggtgatatcagaggacataaaatctcctctataacccctataattttcctctattcacatggagagaccaaattttggctcctattgcacacatctagcatgaggttaaccaacaggacagaaggacacaactatattctccctcttacatataagccttatatgaaataaagagattaaatttcttgaatacacacatttaaaataataatattatttcctatggattaggttattatcataacaggaacatgaagcaataaaggcacaatgagagaagtgctcatacggtgcaaaatgttccatatagtccaacaggacacttttttcctgttactgttccagtttctccaaaatgtccatcatcattaccagatcctccactatgcaaaaataaaaacaacaataaattttcagaatatttttttctaaattctagtactcaaatactttttgttctagctttgtcctaagtcaagcatgtatatctttgaccatcaatttttagaaatccgtatagttcaaaatatgagttgtatttattaaagtatttgtcagtgaatctaaaaaaaaatcatatgatgttaaaccatatgagtttttaaaaattgatggtcaaagatatacatgtttaaggacaaagctagaacgacaagtaatttgaaatgaagggagtaatacttttcaggatcaaagcaacacgcaaatttaattccatgacaaataaataatgggccatgcaacagcaatactagtaaaagcaggactatatcctgaaggtccacgaggatggtaataatagttgcattcatgaagtaagcatgcatttcgaaaaaagatgcacaaggttgctcaggatcactgatcatgtagcatactatctgtaggtccctgaacacaaaaactcaactggcaggacact

SEQ ID NO: 11043 - DNA, 644 bp, Oryza sativa
cgagttcaagctaaacctgaacaactatctgtcagacttatcatactcgccagttcgttctctcgctgaaataattgcattcaacaatgcacatcctgtcgaagttagtcctaacacaattcactaattcatacttaaatcctttaccttctttcaaagcaagataaacctctaaattttactgacagaatttctgagctactgagctgcaggaggagctgaaagagcatggacagagcatcttgctgatgtctgaaaacacagccgggatcggccctgcagagaaggctgcgatccgtcgtctcaacgagctgtcagtgaatggggtcgagaagctcatgaacgatcatcagctggacgccatcgtgacgccggactccgccgccgccgtcgtcctcgccttccatggcctccccggcgtggttgtgccggcagggtacgacgagaaaggagtcccctttggtgtctgcttcggtggattgaaggggtacgagccgaggctaattgagatggcttatgccttcgagcaggttaccaaagtgagaatgcctccaatgttcaagccatagattatgcagtttaaggttgcaagtgtaaaaaaaaacaaactagatgatatcccgagtgttgctggtgtgccgttg

SEQ ID NO: 11044 - DNA, 1160 bp, Oryza sativa
  unsure (1)..(1160): unsure at all n locations
gaattcgagctcgttaccccaaattgaactgcagagatcaaatactgaactggagcaagcaaggagcactttggctgaggaaagaagaaataaccttcgctcctgcaataagatcaattctaataaaaatagcagctcttcttctagaaagcatctacaaggcagagtatcctcaaagagtaaaaatacggcaaaggaaagtggagctgttgaaaacttggagacactgtaccgttgtgattctgatctgggttcattcatggctagaactaagaatcctgagctgtatcgcaatgggtgtacacaacgtatccgtgcaatcaagcagcgaagtccaaattcggatacatccctggtagaaaacagcaagcaaactagtgcactgaatagccgttctaagactggaaaaactgataccaacagaaacccacagagcacaaggtccatcatggaacagatacttcaaacaaaatttctggccaactgcaagagaaagagaggtaggcgaagcaggccaagttacatgcatgataattctggtgagcatgggcaaacagagtacaagtcgtctgatacatctgatggaaatgggtgtttgctgctacttcaggctcttgaacaagatctttcacctctaaaggcgtcttctggaagtgttggtgagggattagctgaccagaaggatgaattgctcaaggatgaaaaggatgctgacttgaatcttcaccctgcttcccctggaccaaatgatggaccttcagttaaccacatgccgatgtaaaggagggaaaggttttaggctattagagtccttggatttgattttgaggccaaaactgcccctgtatttgggaaccccctgccaaaatccagttattattatagcatggttaatagtggacagaggtttgattcacctgctggaaaccatggtcctggtttgccatggactggtgaaaaccttaaggaagtgactgaagctgccaaaggtggtccaataaagttttaagaccggttcccggagtgtcctccggtcacaaaaagtaaatgnaatgaaggacccatttagaaccttggtttttttaatttacaacataggcctcggtaataactttcggaatatgtattgagccctgagcatggttaatatgatgcaggta

SEQ ID NO: 11045 - DNA, 660 bp, Oryza sativa
ttggccctccgggcctgtgctcgcacgtggtcctgggagtacgtgaagcgatccggtgggacagcacgggtagcgcgagggtctgggagtggggtggagggcgactgctcctgcgtgtgcaccggcggtgcgcctcaagctgtgagggaccgataatgtccgggaagtcgaagtcactaatgtcgaagtgcgtggcggaagcccacccgtgctcggacgaagtcccggtaggaccctgccaagacgtgccgggcggctgtgacgaagtcccggcgtcctgccagaactacgcagacagcgaggccgacacacctgcctgtgacgatgaccccgcagcctgccaggagtgggcgcccggcgtcgtcccaggctgagcgaagcctacacatcgacgacgcgacacttgtaagcttacacataaattgagtatcaattgattgatgatgtacaaatagaccttgaatatacgtacctccgaagggagggggtgtcggcgtaggaacgtgcgcagctggacgaggagcagtcggtcggggacgcacctgtggtgctgcgtctgcctgagcaacgtcggcagcacgacaggtcagcgcacggagaaccgagcgcatcgagtcccgtatccgcgtgtacgtcgacaggtgctcgtctgcccccacc

SEQ ID NO: 11046 - DNA, 3223 bp, Oryza sativa
tagtcatccagtacgcttggtccctcgtgcagagtgtggacaggcctagcggcgcccgactgtgggtaagcaaggcactgtagggctcccacactacgtccgtcggcagaaggcggtcgaactccatcacaaactccgcgtacgaccgcctaacctgcacgtgagcccatcggcgctgcaatacaataaggtcagtgtgacgtaggatgaagttaacaatagtaggacaacattaccaaatactagcgacgtacctgacgccggcaccacagagtacccatcgttgggtagtcgaccgccggtctgttctcgtacagcgacgcgtcgtaagggtggtgctccacaagggggcggccgatcgcaatcctctcagccgcccaaagagaaatgaagagagggcacccaccgaagatcgcgccagggtccgtcctggtacaagcctcgcagaggccacggtactgagccgccagcaacgcggagccccaactccactgaggcacctcaccgaccgcggcgtcggcgatgctcctggcgtagtgcacgagaccccggtcgaccgagtgtccgtgactaccacagaacatcacccacccaaaaagccacaacaagtacgcctccaaacaacggctgaaggagtactcgtcggcctcctccggtagctggtcaacctgcaagcgttggatgaaatgttaggcactttacaagttacgtacataatacacgtcagtttaggtagaaagaacttacagtgaactgaagcagccacctcttcgtaggcccggtgttgcggtgctgctgcaacggctcgagcggtagacctggtaggcgctgcacgggtgcgaaacgtgccgtcagctcgtccttccagtcgacacccatgtcaactggcccgacagcgtctcccgcgagcggtagccccaacaagtaagagacatcctgcagggtaggggctacctcaccgcacggcaggtgaaaagtgtgcgtctccggcctccaccggtcgaccaacgctgctaggagggacctgtccgggtcccaacgtctcgtcacgtcatcgtcgccggtcgcggcctcaactagccgagccaacggtaagagaccggcctcacgcaacctgcgaaagcgaaataataccagacgttaaaatgaacacattgctaagccccctccaccgtagtaaggtaagcccggtgtcgtgaacacagtaaaaccatacctctcgacgaaggagtcgtgaaccaaaagtcgctcacgtgacgaccgtggacggaacgtcccaagctgagccccctccaccgcagtaaggtacgaccggtggcgctgatctatcgccggatccaacaactcaggatgtgccatctctgcaagtaacgtgttacatgttagggtaaataagaaggtaataatataattgtaaaaacaagttatctgaaacggaagaatacttatagagacatgcaagagtgcagattattgagaacataactttcgttacacaaaggcacgtaacgagaatgaaataacataaaacaaaattacaagccgtaaaacataaagacattacatgcggaagtctaacaagtggttcgcaacacaacacaatgcgaacatatcgataagttcgaacgaaattacaagcaaagccttttgccaacatacaacacacgaactacaccacgtaaccggtcgttccacgagaacgtctaggacggggtcgccttgaagtagtgccttcacccgtagggcgagctccatctgctgctgatcctgatagacctgcctccgccgcacttggtttttccttgtctttaggacaatacttgtaggtgtggccacgttcatcgcatttgctgcaccgcttcaccctgcctgcctccgactcatccatatcgttgcggatgcgccgagtcttcctccgtcccgccttgtctcggagtttcgttgggtcaggaatatagattatcagatcgttaatatttgtgaactccccagctacaccgaagccaaaaatctcgccactccatgtgtgatatattgcttgcttggagaagtattgtgacacatatactgcatcttggatgccacactcagatgccgcggaaatgacatgggtgcatggcctgtggagcagcgtcggctttctacaggagcagtgacatgtgccgtcgtctttgagaacgcactcctgctttactctcttgcggtagatacccctgcctgccttgtcttggcagagtacctcaaacctgtgttgttgggtaccttgcactagagctcgatgtttcatggcctttgcacgccactccgctagttttttctccatgaaagttccaaataaaatgttgttgttcggcatagagggaaaaactgcttggaaccgctccctgaaatacttgcatgtcccatgtaaaatgaactccactataccaactagtgggagtccacggacaccgcgcatcacccagttgtaaacttccgccaaatttgttgtcattataccatatctagcaccacctgtgtcataagtcttagcccatttctcttttggctcattctcaatccactgagaaaattttcgaatttgctccccagttcttctaaccaatgttacactgtctgttgggagagctccgagtgcttgaggagggtcaggtacagcggccgctggtcttgttgcacgctggtcactacatttgcctgtcaactcatctaatctcttccaaagctcattgaattttttctcctggttctgattgcatagcctcttgaacatgttcatcaactccttgttcttaaattgcttgaagaaattagctcccatgtcgccatgccccgaagtatcaccatgatactgcaaagggggaaatcgtgacaagaccctccacataaccctcccctaaccatccacaccacgctaaggtttcacccccacccctcaaaaggcagtgggcggtcccctcttgcgccgcggtgaatccggcagctggacaaccggacaccccggccgacccaactccatcacgcccaccctcgccaccggtgcctaggaaagggtcgagctatacttcagatcaagcagttacccactcccgcttgtggtaagcacggtaagtctcccagggtttcccgtgaaccggtccttaactgccatgggtgcgaccagcaaaaccatgcacccacagcccaccattcagtgtattttaattaactcacaccattgcgg

SEQ ID NO: 11047 - DNA, 511 bp, Oryza sativa
atccccatcaacccctcaccaccaccaactcatttctccatcaaactctccactcgatctcctctccgtctctaccgcttctcttttttctcctctgcaccattgtcatcttgtctcctggtgctcgacgaggcgtcgtctaatagctggaaaaacaaaaatgctttggttacttacccaacggtgtcctgtcgaggggtgatcgggatgacgccggcccggctggtgagacccaccgtcggcttaatcccgaccaccgaattccacgacgccgggcagattatcgacccatctgtctccgtccccagcgtcaccgccgccatgttcgccgccgcggccaccgccgaaccgctgctcgaccagcacggggtagccgtgaccacgtacgggttcttcctcatggacaattcgacaaacactttgtttacgcgatgaaatgctggggagatgacatgcacagaggtttggggttgccactaccaccacttaccagcgtctcgcccccgcgtgc

SEQ ID NO: 11048 - DNA, 1611 bp, Oryza sativa
catttttttccccattgccatcccaattacaggacttggctatttatgtctcctctccacactgttcaattggtcttctgaaagatatattccctaaagttaagtttagtgtcaatgtgccatattatctgcatccaatccagcttgccttggcaccaacagtttgaacatccttacctgttgctgggaccaggttgttcattacgaatttcagtaattactagtccagcctgatgacctatcacaaccctgcatcagtagattgtttgcattacgcaggtttcgcaatggagagaaagaacgtctggaatatcaacaaagaatgaagaccacattctgagatgtcaacatattactaaaattcatgtttgcagtcaagcttatctttctttctttttttttgcagggaaaacttcttttaatttagacttgcagaagatgcagcgaagcagtaacatgctcaacctcaagatgaatagcagggtcctttttatcactcaccgttttgaacccttcaaacaaactatagcgccgacttttccaagttcaaagtccagtacaccctcaagcctagaaaattatgaaaaacaatatcatttctgaaacttctcacacaggaaaagtttttgaaccggcacatcctcctcgacgagccggcgcttttgcacatgaaaatttggcaagatcacatcacaagcctagaagttatggatgggcgcagttaatgtagcagcttaggaacttacttgaaggtaattgagttccacagacgaactgtctcatcattagaacctgtaagtaggattggcaggtctggatgggaacaaacacaggtaacacaatccatatgccctatgagtatttgaacacaagtcctgctcttgcagtcccagatctgactcaacaagatgaaataattacaacggcatttccacaaaaaatgatcaagaggtatgacaatactcttgcaattaaaatgtcttaccctagccgttttgtccaaagaaccagttattatgtattgctgatttccacgagtgaagtaatcgaaacagctcactgcagatccatgcccaaacaatgtgaattcacgacgggaagaacggaaattccaaacctgcatttgccatattatagactttaattcaaaaattctgtctatcaaaatgataggaggtaaaacctcaggccttcactgcacctgtacattcatcatggaagcagccgcaaatttgtatgaatcgtgcgggttaaatttgattccatgtgctaggacaccttgcatgtcaaacatcctaatgcactcccagcccttgttccagtcccacatcttaattgggtcaagcaagccgaccgacagcacataaggctcagttggatgaacgtccaaacaggtgatgttccatgaatgagctttgaatctcttcacttgctgtacaggggattcgtatgtgtacactcttatgaaaccatcatgatatccaaccacaagccattgcttccgcgcaatcaacttggctgcgctagctgcagttttggagtgattgatatgttagcatttgctgttacaccaggggtaaagtctatggctagcagtgagttaagtcaggt

SEQ ID NO: 11049 - DNA, 1479 bp, Oryza sativa
ggcgaattcgagctcggtacccatgcaagtacatatatgtgtaatgaggtgacagtcatcgatcaaaattgaaaagcagattattcatggaattattgtcatgagttttctacttgattataaaaataaattgaataatttgagaattaaacttaaataataatttataataggtaggataggaagtaggagtacacatcatcaaaagttacatagcttatcatttacccacgtacatacgagacaaacatactatttataagtgtaaacaactataagacagttgacaaaggcacacggacagtaggaataaggtaaagatcgttctttcttcgaattgtagcacccaactcctccatcatgtccaccttggttggcgagatgccatcagggagctcccaatcaaagtggtaaagcaatgaggctagagcgagctccatgattacttctgcaaatgccatgccagggcacatccttcgtccagctccaaacggtataaattcaaagtttgttcctttgaagtctatatggccatcctcaaatcgttcaggtatgaatgtctcagcatcctcccaatacttaggatctctacctattgcccatacgttaacaagcacagtagtacctatggggatatcgtaacccatgacctcacatgtctcccgacattccctagggagaagtagtggcactacaggatgtaaccttaaggtctctttgataataagttttaagtacttcaattcatttaagtcatcttcagatatcgtttgctttcctttgatgacgttacttaactcagcttgtgcgttcagcatcactcttggattcattatgagctcagtcatcgcccattgaagtgtattagctgatgtctcgctcccagcaccaaaaagttcctatatgcatgaaaaaaaacatgatttcccatatatgtaaaaaaatatgttatcaattacttccttcctttgttcagtgtgcatactttttttttattttcatatatactcgctccattcatcagttaaagttatttaattttattcttaaacggtaaaactttgtagattttgacattaacagtagtcaaattttaagtgcactcaggtaaaagaggtttggtaaaatatgtcttatatttcatcctttcacgaatataatggattatagatccagaaagtgtgattgaaccttcactaaattagggaagagaacgtacgttagggtacgattgtagatacgattgaaaaattaattattggtaagataaatactactctaagctcagaagtattcgtgtgcaattaagggagattagtacagtattaatcagcaagtacttgtctacttaccaggacgacggcttgatattgcccatggtgagaggcatctggaggctcccatccttctgaaccctgagaagcacatcgacgaggtcctcgtcgtcgtccacggcgccggcggccctccgctcctcgt

SEQ ID NO: 11050 - DNA, 697 bp, Oryza sativa
caacaatggagagaatcccacacttgcccaagtcctggcttaacaggcacattttatgaacatgatgatgcaacaacttcagaaccagcagaaccagggaaataaccatgccccttcccagaacaagttagccaaatttcttcgtgtgaggccgcccactttctctagtaccactaatcctgttgaagctggtgattggctgcatgccatagagaagaagttggatttgcttcagtgcaccgatcaggagaaggtctcatttgcatcacaccagttgcatggccctgcatctgaatggggggatcacttccgcctgaataggactactgctgaacctatcacttggcttgaccgctgctttccggaagacgcatataccatcgggagtggtgtctctcaagaagaaggaattcaggtcgctcactcaggggtctcgctctgttacggagtatctgcacgagttcaatcgtctggctcgctatgctccagaagatgtacgcactgatgaagagcgccaggagaagttcttggaaggacttaatgatgagctttcttatccactcatgactggagattatcctgatttccagaagttagtggataaggctatcgccaggaggacaagtacaaccgcatggagcagaagaaacgccggattgctcacttcaagacacaacaagggaataatcagaggccg

SEQ ID NO: 11051 - DNA, 1539 bp, Oryza sativa
ttcaggggtatagaagggatcgggcaaatttcaagggtatgaaagggatggagtgagttttcaaaggtatacagggaattgactctttaaatttaagcactcatatcagccttcttactctaaagtagagtaaagcaggcaaggggcatcctctctattttggtttaagctcacttccaaggatatacagggaatttactctttaaacttaggcactcatatcagccttcttactctaaagtagagtaaaacaagcgagtggcatccctcttcattttatttagctcatctactgattatctaaccgaaaaagcaccccaacaccagtttgatactgttcgaaatcactgcaacgagtgggtgacacaatacaaggacaccatagtgcaccgcaaagcaaattttggttcgaaattttcgaaattcttttcccccccccccccaacggtatgctcaaatctcgcctaaaattttgggttttttgtaacttttttttgtgaatttgggcaatttttattggaattcattcagattttcaaataatttcggccagaaatttccgtaatttcggtgaccccggcatataaaatccaatttcgaaatttcaaaccctgaggagacacgcccgttggtaatgttgttacagcatcgacatgttcatcgaaatctgaggtgctacattgcatacctctgagtccaggtcattgccttgtttcgtacttgtacgtgtgggcgatttcagggaccagaggatcatcagggttcggatcagtcagtacagagcaaattgacagcaacacctgaaagcaaacagagagcacatgtttgtcggatttgttcagcccaactggaggaaccaagcaatcgtcttgcaaaaggaaaatagcattacacgagagaggcaaccttggaaatggttagtgctgtgaagaaaccatagcaagtaaccatcgaggcatcgacactgctgaggtctcgctgatatgagtagtggtgcacggctgcgaagtcacgggtagaagggaatggggaagaggagaacgaaagggcaaacaaacgaatgggcctggttctatgggcttaaagtgtgcattgccgacaagcatgcacgacttagtttttccggttttgttttgccacgccaatctatctatctattatattgctaaaacaactttgaaaggaggtatcatattcatcgtgggggctacaaattcccacattaatcgaagaaaaggaaaagaagagtccaagtagaaatataatttaaaaataactgaaattcggaattaaaaataagcaatatagaaaaaatgcacgtgcgttgcaacaggtaaagacggttttttcagtgatatatcaagagaataagtggtaagcaataaataaattaaaatattaggatcactatacattataattgaaaatgttaatgaaaattctaacattgggatcgctatatatagattataattaaaaaaggtaatgaattttttttcttggtttttggccgaaagcatttctttcttttcaaacgta

SEQ ID NO: 11052 - DNA, 3009 bp, Oryza sativa
ctacaaagctgctacattgaggtcatgagagctaacggagggaataggtacaagatccctcacatgaacaaggagaggctagaggcacttggcgttttgcctaaagcccttagttgtgatcgtggactatatgagagagtcatggagtctttggctaactagtggtggctattttgtgttatatatgtaaattgctatcgctatctatgtaattgtggtttggagaactaactggtgttattttgtgttatgcgtgtaaattgttagcgtcatctgtcactacgccatccgctggttttggcaacaaccaatatgtattgtcaacagtcatcatataatatgtgttatatatgtattttcactgttcgttccatccttaacagatacatcaatggctgactatcataaaatattcctaaactatatgaatcatgaatcatgcatttcgttgttattatataatgatacttagtttacacaagcatttactgcatgttatcacaaagaaaatataatgtcggttcgattgtgcaccaaatgcttagcatactcaactcgaaattttgcaatactatatttacaatcaaaatcttgcagcatagactacaagaagttttttttaggttcgaggtgcaaggaatactgagctaagtaaacaaattcaccaaagatgacacaaataagctttaaaaggtccttataattaattagttaattacacatattgatcaagcatctactgcttacatactacgcaaaagggagtgtgcaccaaacagccttggtagtcatgctagttcttcattttttacatatatgcagagatcaaagcggtttagccaaaacaggattccatctctagccttgatctcctcattattaatgcaatactaatatgtcttactcctagtgatattagtactaatactcctagatggcatatcttccatggcattatttgtgaggtatggtgaagtacaggggaagtaaaatccgtaacatactttcgcgaatttcagcaaattcgtcgacgcccccatctccggcagatacaccaacatcatcttgtaggccagccacctcctccccaccgaccagctgttcaatgccatccatgtgctgctcctccaagttggcgaagatgcctttctccggcttctgctccaagttaaggacgccgccaccacttgcctcatcctcggagtcagggacgatgcagccttcgggtggcagctcggagtcgtggacgccaccactcgtctcgtcctcggagtcagggacgacgcaaccgtcgggtgccagctcgaaatcgtggacgcagccacttgcctcgtcctcggagtcagggacaacgcagccattgggtggcagctcggagtcgtcgccaccactacttgcctcgtcctcggagtcaggaacaacgcagccatcgggtggcagctcggagtcgtcgacgccaccacttgcctcatcctcagagtcaaggacgaagccgccgtcgggtggcaagtcggagtcagggacatcgttacttgcctcgtcctgggaaacatggacaaatccactgtccggtggtagctccgagttgtcgatgccgccacacgcctggtcctccgactcagggacgaagcaaccgccggggtgccactccgcatcagacaagtatccacatgcatgctggtcctcggtgagtaactggacgccgtcggcgccgagcaccccaccaccatggcgctcctcggtgagtacctggacgccgtcggcaccaagcaccccaccaccacggccaccatggcgcctacatccacctcgccttgctccacttgcctgttgtgcttcaatgttcagttccgccaccctccgcttgggtgcggcccttctaaccagccgagccgtttcctccaaagccgcgacgggcagtgaatcgacgcgcgccggccgcaccattgccacgcgcccacgccgactgttgaggggagaggcgaggtgaggaggttagggattggggattgaagttgagtgcaacataggaaccggattgaggtgggagagagtgaggatcagggttgggggtgacggaggaaccgaatcaggtagggaaagattggggatcggcgatggttgggggcgatggagattggggatcggcgctggttgaggacgacggagagcgatggatgggggcgactagagagaggataagatcggagtagtactagcgcaacaaataaaaacgcacttcttttttctggttcacctccacgtatacggaggggcccaccacttctctctcgacgacattttttctgggacaatccaggggcggtgaaacggcaggttttgtgggacggagggagtaggatggagcatccactggggtgctgatattgggcttcgggccttacgtacggaccaaagacatgacctaagcatggcccactgtcagccattcaagcctgccacctcgagcccggttagactagccccgaccccgatgtggtaacctcagatttccctcgtgttggtggtcacctcaagcgatggaattacgtgtgcagccagcagcagggcagctttacagtgctctcccctctgcgctcttgccacccgtgagcgagggagcggttgattgatttccgttatctcggtccggggctacggcctcgccgagtggctggctctgtgtgaccgcgcgcgcgccttggaaaaggatgaaaagaactgtgcgcagcagcagacagggcgcggaagagatactctaggcagatagcacagcgcacggcagggcagagcaggaggaggatatagcatcgggggtcccggcgcgccgtatcggaatggcaggcagcgggcagcggcagtatcccgagcgcagcggcgcgggcgacgacgagaccaccgcgtcacgcgtgagcgttgcggatttgttgggattggtcgatgttttggatgcatttcgggggcggtgcgtgtgctgctcctgtatgtggccaaccaaccccaccgcgc

SEQ ID NO: 11053 - DNA, 1385 bp, Oryza sativa
caaaagaccatttaaccttatcataggctttctcaaaatcaatcttaaatattaccccgcttttatttttacgacacatttcatgaatagtttcatgaagaataacaacctcttccataatatttctcccaggaataaaagcagtttgagtaggactaattactttttgagtaacgccaattattctatttgtagcaaccttggtaaaattttaaaactaatgttaagtaagcatataggcctatactgttgaattttcatggcctccacacacttaggaaaaagaataatagtaccaaagttaagagagaataaaggcaaagtaccattatgacaatctttaaaaagatctaacaagtcggctttaataacattccaaaacacttggtaaaactcagctggaaatccatcaggacccggagccttgttgtgttccatttggaaaattgcctctttaatctcattctcggtaaattcttgagttaaagcctcattctctaattgagatacttgagggatatcatcaattttactctcataaacctgaagatcaaaatcatctggaggaccaaataaacctttataataagtggtaatatgcaattttaaattcgcatcaccccttattaattgatcaccatcctgtaattgaaaaattctggtttttctatgcttaccatttgcaaccaaatgaaagtacttagtattagaatctccctccaagatatctttagtcttagccctttgataccacctaatttcctcttctctcagaagcgtagataatctatttgtataatacactctaatatcaatttcctcctgagtcaaaagaatggtttccgtttttttatctagcaaatccaacttatctaataactcttttttctctttttaatagatgccgcttgtatgtttagcccatcccctcaaatgttgtcttaaacgatgaattttagcctctcaacgctccatgggagtattaccttcatcaacattagaccaaatctcttttaccatatcaacaaaaccatcccgtaatagccaacctggttcaaacttaaaactatgttgagcattacccggagacgaagaatttgtatttaaaagtaaaggagtatgatcagaaatatctctattgagagcaaaaaccgaggataaaggaaatttatgttttcactccgttgacattaaaactctatcaagtttctcatagattggatttgctagattatttgcccaagtaaaattcctacctaacataactagctctctaagactcaacccgtcaataacagcattaaaaagaaagggcaatctatcatcataattagcattgtttttctcatcagggctacaaaaaatattaaagtcaccaccaataa

SEQ ID NO: 11054 - DNA, 1052 bp, Oryza sativa
gcatcttttaaatggttgtggtcggggacgcagattctctcacccaaccatacagttccttgctcatcctccaagaaaccgatagcttttcctcttctcatattcttcttgatttcttgaatatcagaatcattaatttgggcttctctaacttgatcaattagagtgggcttcgcttctaaggctgcaacaaaacctctactgacaattcccaaatttaatctttcaaattccttgcataattccaatggcaactgtcgtcattccgtagcattgcaatagcctttcctgctaagagtgtgtgcgacaacattagccttttctggggaataatgaattcccctgtcataatccttaattaattcccacctatctccgttgtctcatgttcagatccggctgagtaaaaatatactttaaccttttgtgatcggtatatacctccgtacgagtcccgaaaagataatgacgccaaattttcaatgcatgaactactgcagctaactcaagatcatgagtagggtagttcttctcatgcggacgtaactgatgagatgcataggcaaccaccttcccatcttgcatcagaacgcaacctaacccaagtttggatgcatcgcaatacacttggaaacccttctttggatcaggtaaaatcaaaataggagctgatattaagcgattcttcaattcttgaaaactctgctcacattcttctgaccacttgtacttcacatctttctgaagcagccgtgtcatgggcttagcaatcttggaaaaattctctataaacctccgataatatcctgcgaggcctaggaaactgcgaatctctgaaactgtctttggttgttttcaattagttacggattccacattgctaggatcgacggcaactcctcctgctgagatgacgtgaccaaggaacttcacttcagacaaccaaaattcacgcttactaaacttagcatacagttgatgttctcgtagcttctctagtgcaaggcgaagatgttcctcatgctcttctctggttcgggagtagataagaa

SEQ ID NO: 11055 - DNA, 1108 bp, Oryza sativa
gggcaagagcacaagaagagaacccggggaaaactacttaggactgagaattaatttaacttttattgatcttaagtgagtttcattattacaaaactgaagactctcacaccactaaactcaccaactacctaacactcgaaagcaaacaaacgcatgcacttacatcccaccactgatgtaaatcacatgcgaggcacacacaaccaaacttaaaacaagcaaactaacacaacgatctaagacaacggtttgacaaggctttctaattcttccgggcatcggagttgattgaaggctcgttcggctcgtcttcatcatcttgaattgctccccactcgatcttggaatgggtgcgcttggattcttctacttcatcatcacttatgttgacgaccggagaatccgctagggctggggtaacttttttttccaccacacggacctttggcgccaattggtagcgatggacaaatagagctctcttccttgcggtaagacgaaccctggccttctgcggtggtgcttctcccttcaacgcggctagttccttctccaaacgatccactttgtcttctagcttgcaaatcttaccacgattccgatcttcacgatcttgagctgctaacacagtctccacacggctttcatccatagcccacagcatctcaaccaaatgccttgtggtagcatcattctcaattccttcagtcttaaggtaactgccacggtcacttccctggggttgacggggatggtagcgatactcagtgtcggccaactgatcactgtagcgatcgcggagctctcctatggcgatccttgccacctcctgacatgtatggatgtagtttcttcctccagcttcgaacatcactgaggggatatcttcactattactgttcaaggtgactttgactccgcacttctcttcgtgacgatcatgaggaatctgggcataaaaaggagcagtcccaaatcctatggcaaaggacatcgtacgcaactcctggacaaatccttcaacaccaaacaagtactcaggcttgtagcgcggcatctaaagacaagtgaaaggacggaattaaggcatttattccattaatag

SEQ ID NO: 11056 - DNA, 1339 bp, Oryza sativa
ctattggaatatcaaggtcgcgcgagttctcgtcgatggcggcagctccatcaaccttctcttcgccagcaccttggacgcgatgggaatcccacgaagcgagttgacaccgactgatcaacccttccatggaattactcctgagtcatcgtccaagccattgggcaagattacgttgcctgtgactttcggccaagcaaataacttccgaacaaagcagatcatctttgatgtcgctgaatttgatacaacatacaatgccatcatcggaagaactgcacttgcaaagttcatggccgcatctcactacgtgtatcaagtgctcaagatgcctggtccgaagggaacaatcactgttcaagggaatgcaaagctggcggtgcaatacgactagcggagcctcgacatggtcgagcacacgcccagcccacccgccacagctgagccacccaagaaagtgagcaaaacgaacaagacgccaaaaccagacggtgcaatcaagatcgttccgcactccagtgccaaccccgacaagaccgtcaagatcggggcatcactgagcgaggaataggaactcgcgctcatcaccttcctccatgacaatgcagacgtgttcgcttggcagccgtccgacataccggggatcccagggaggtgattgagcacaaactcatggtgcgacccgatgccaagccagtaaaacaaaaactgcggagatttgcaccagatcaaaaacaggccatacgtgaagagctcgacaagcttctcaaagctggcttcatcagagaggtactccatccagagtggctagccaacccagtcatggtgtggaaggccaacgggaagtggaggatgtgcgtcgacttcaccgacctcaacaaggcgtgtcccaaggatcacttccttcttcctcgaatagaccaactggtggactcaacagctggttgtgagttgttaagctttcttgacgcttactccggctaccaccgaatcagcatggcaaaagaggacgaggagaaaacagcattcatcacgccgttcggtgtattctgctatgttaagatgccgtttggactgataaccacaggaaacactttccaacgcacggtccaaggggcacttaatgatcagcttaggaacaatgtcgaggcctacgccgatgacattgttgtcaagaccaagacaagtgactcattgattgacgatctccgggaaacgttcgacaacctccgacgatatcgcctcatgctcaatccagagaagtgcacgttcggagtaccatcgggcaagctgctcgggttcctcgtctctggaagagggatcaaagcaaatcgagaaa

SEQ ID NO: 11057 - DNA, 1443 bp, Oryza sativa
ccctacatgatgtccgatggcctaagagattccgactgtgagcaattgaaaagtacgatgggagcaccgacccagaagaattccttcaggtctactccacggtactctacgctgccggagcggacgacaacgcgttggtgaattatttgccggcggcgttgaaaggttctgcactttcatggctagttcacctcccgccatactcgatttcttcatgggcagatctgtagcagcagttcgtcactaacttccaaggaacttacaagcgccacgcgatcgaagacgacctacacgcgttgacacaaaatccgggcgaatcattgagggactacgttcggcgctttaatgagtgcagaaatattatccccgagatcaccgatgcttccgtgatccgcgctttcaagactagtgtcagagatcgctatatgacccaggagttggcgacaaggcggatcacgactgctcgaaaactattcaagatagtcgatcgatgcgctcacgcggacgatgcactgagacgcaagaacgacaagccgaagacgggaggagaaaagaaaccagcgaaagacgcacctgaatcaagcaagaagaagagtcgcaagagtgggaaaaggaaagctcaaacggaagtcctcgcggcagagtacgcggaccctcccaggcacccagacccacaaggcaacgacacaaagaaaatatggtgccctatacacaagttggacagacactctctggaagattgctttgtcttcaaaaagttgctcgcaaagcaactggcattggagaagggcaagcgagtacgtgtagtcgagaaggccgctgagcagctactcaggactcggactcagcatatccagattccgatctccatgtctcgcacatcttcgcaggttccacggcttactcctcaaagcgagagtacaagaaagtggagcgtgaagtttgttcgacatggcaggggggtgcgcccaagatgaagtggtctgaacagaagatcgagttctcagatgaagaccaccccaagattgctgtcatcccaggacgatatccgatcgtggtcgagcccactattcggaatatcaaggtcgcgcgagttctcgtcgatggcggcagctccatcaaccttctcttcgccagcaccttggacgcgatgggaatcccacgaagcgagttgacaccgactgatcaacccttccatggaattactcctgagtcatcgtccaagccattgggcaagattacgttgcctgtgactttcggccaagcaaataacttccgaacaaagcagatcatctttgatgtcgctgaatttgatacaacatacaatgccatcatcggaagaactgcacttgcaaagttcatggccgcatctcactacgtgtatcaagtgctcaagatgcctggtccgaagggaacaatccctgttcaagggaatgcaaagct

SEQ ID NO: 11058 - DNA, 3054 bp, Oryza sativa
cttagtaagttgtggctaacaatttgatcacctcaccttaggcaaggtgtggcaacttttgttggcaagtaatggtaaagtgtggctgggaaccaaacagccccagtcatgggcccgttaagttttgtcccccccctttcggagcttttacttaaaaaacctagtagtaagcacaagtttatatatgaacacactcacgcacacacaatctctataaaacagttttttaaactagactgttatattttgagattgataaaatcatcacaatcatatcactgtcgacggtcacgtctactattgaaggaatagttagacgtaaatcatggtacaatgtaattttcattttatactagtcagtataactatatcagtccatctccactgttataatttgatccactgtgatatagtgatttaatgacttaccttttcttttattaatgttagagagtccacagtgaaacgtctaccaacaatcatgataagatcgtacttctgtcctatattacgctattcctccacctaatttctcatattaatcaatcacaatcattatttatttaatttatttatctatttttttcatctcaaatgctatctctgtttcatattataagtatttttaactttttttagtcaaattactttaaatttgacctagtttctacaaaaatatagtgatattttgcacacaaaacaagcatattattagaatatattcaatattggttttcaataaaaataatttgatgttataaatattgctaattttttctataaatttgatcaagctttaaaaaagtttgactagaaaaacagccaaaacgatttataatataaaatagagagagtaatcacaactatttctcatctcaatcttaatctctcgagaaaaataaaagtaacataggcggtagatcatattaaaatatctaccaatcaagtactatatactaatatagtactccctctgtctgggttacggataaggtataccctctacccttggatatacatcatgtatcaatatggtatatctgcgcgtatatggacgttctttgtacacgttaagaaaattcaccacggagtcatagatgtaaggattcctactcggacagaactgggtcgttactatatcgtgtagggtccgatgtctccgagttctacttagagaccaactaacctgcggtataaaagggacccccgggaggacctaaggcatcgaatcttaccgccaacacatctaccacggcctacgaagccggagcctacaggagccaagttgccggatgatctagtcgaaccaactcgactacgatctcgtcggtatcaacgagttccactattccctttgtaatctgtgttttccgtcatataatcccatatcaactggattagggctattacctattaaggggcctgaactagtataattcctatcttttgtttgcttgatgtcgtactacgtcgatcctcgtaccagcgtactccaataccctctatatccggtctacgggtatcccccgtcgacagtggcgcaccaggtagggggacttggtactcaaggttctactactatgtcatcaagcttcgttgacaacagcgtcaaccccggcttcaaccaaggagtttctacttcaacaatgttggcgtggactcaagtcggcgaaatcgtctttccggtttacaccacggtgctgatctcgactggtccatcaatggccggaagcgagaacgccgtagttataaccctggacgactccatgtcgaaggatcctcccgctgaagtggagaacagaacgtcgacaacatctgagcccgagaaggatcctagtgcggccaaatcttgtccctccgacgagaatcacgagccgacaaggacaacttccgaggcgacaaggtcctggtgccctatccacaaaaccaggaaacacaccttacaagcttgctgggtttttctcaacgtacaagctgagatccgtgcctgcaaagagcgtggaattcagcgtacttctccaacttgtgatgcctattgtcctgttcacaagacaaagaatcacgacctctcaagctgcaaggttcttctcagtgccatgaggacgtcacctcctaaagttcagcagtcacgaatctctcttagagatatggacaaggaacgaggagcgacagttatctcttagagattcgttggggtaatcgacatcgatccccatgagccgtcggttctacacttgctcgaagaccaggcctcatcgtcgacgagcacaccacgcgatgtgtttgctataggtgggaccagcacgtctgcatgcgccgacgcagaagcggagaatcaggtggcaacactggcccagcacatcagggccatcaacacaatactgagggagaccccttatgatcccgttctgaacgatgatcttgcgcagtggtcagaacgattacgggaattagtggccaacctcagcaacgtgttcgaggaggccgctgccagggtaccgctagaacaaccgccaaccggcggcgttaatggcgaactgcctgagcagcgggcgtcacctcgtcaagccacccctccccctcgcggcaccagcgatctccgtgaccatctgaatggccgccgagatgtacgacgcacgcggaacaacgaaaaccgttcccgacatcatgtctcttcgcgacgtcgcgagaatgaagagcgaggagacccgacggaaaccgagaccgtgataactgccacaaccgccacaatcatgacgatcgcgaacagcggatgccgggcgatactagtcgatgacgccgccataatgatggtgatgatggagatcggcgccgggacaacaacagtgggcgacgataggattctcgggaacccggacgtcatcctcataatcgtacacttgaaccaagtgactcatcgtcgtcgtcatcatcctcatcatcctcatcatcagatagacatccacgaaggacatacgatcgccgacaacccaccgcccccgatggcgggtgtagagctttcagccgtgctctacatgatgtccgatggcctaa

SEQ ID NO: 11059 - DNA, 2551 bp, Oryza sativa
agtttaatagtagaactcactacttactattagtcaatgttaaaactaacatatatagtaagttggctataaggttatctttattttcttcatcctctctctttctctcactacgaatttaatgcatatttcttggagcttgtgtgtagttagctcttgcatgagagccaacactccactatacttttgtttatctctctcttctacataagcatatagcttgcttatagcccactattatccttactctcagtagcaccttaggtcatgggttcgactccccatgggagcgaattttccaggatttaaaggcattatgctttcagtggtaggcgacgtacccgtcgacagcgaggcgcctgtggtgactaggatttgccggcccggtcttcaaagatgctcataggggtagggtttgtgtgcgtgcgttcataggggtgagtgtgcgtgtgttgtgagtgtctgcgttgaactgtgtaattcttaaaaaaattgagaaattttaaattctattatataatgatcaatttttgaaggagggagtacaaattatgttacctcggaatcatcaacaattaagttacgactgtactaaaataacattccatggccactaacgccggacgcatagttaagcaagtttagattttaaatttaagctcaaattctaaaaagtggtcggagatgtaatttatcttctgttatcttcttatctctactctttgaaagaccagtcatccttcttctctcaccctacaacgcgcgccaaaaaaaacctgtaaaaaccgaatcggcccccctcccatcgtactgcaaggtttttttttttcttccaccaaagaattaaccgatcagaaaaagcaaatagagaaaactaaacctataatacaattattttgtcttattccttcatatatacttatatctcattgtaaagcacagccatagcgcaatggggaaggagtcgtttcgggtctcgttggttgccgatggaccctgacccgaactttagcatcaacggctaagatggaatactatactgttggaagtattttttagcacactggagctctcccattagtttgttgatcgctttattaattgtcttctgtgtttctcgcgaaaacttgttggtgatgtagcaaaacttgtgaagtaacagcaatagagtttgctggttccgaagataataaagatgaagtcgctccaccatgatgacaaagttgtgttgccgtgatgaagtgaaccggtagtgaagacgcgcagttgtgaagataaaagcaccagtcggcggcggcataacacgagtcggcggcggaagacgatgatgtccatcagtagtggtagctgtataaaccagatgtagaggcgagggcactagtcagcagcagacgagacgaccggcgatgaagatggtaaggccaatcaacactggcagaatcatgcagccatggaagtgaagaaaccagtcggcagccatggcaaacgtaggcagcttgtgttgaagatactgatgcctattagtagtgacagcgatgtagccagccgtgaagaagatagcatcagttggcgttataacaggccagccgtgcaggcggtgacaccagtcaacggcggatgcggcggccggtcggtgaagacgtagacgcccaacaacggcggcataaaggccagccgtgcaggcggaaacaccagtcggcggcggcgaaggcaagccgatcggtgaagacgtagacgcccaacaacggcggcataaaggccagccgtgcaggcgaggacatcagtcggcggcgacaaaggcaagccggtcggtgaagacgtaggcgcccaacaacggcggcataaaggccagccgtgcaggcggggacaccagtcggcggcgacgaaggcaagccggtcggtgaagacgtagacgcccaacaacggcggcataaaggccagccgtgcaggcggaaacaccagtcggcggcggcgaaggcaagccggtcggtgaagacgtagacgcccaacaacggcggcataaaggccagccgtgcaggcgaggacatcggtcggcggcgacgaaggcaagccggtcggtgaagacgtaggcgcccaacaacggcggcataataggccagccgtgcaggcgaggacaccagtcggcggcgacgaaggcaagccggtcggtgaagacgtagacgcccaactacggcggcataaaggccagccgtgcaagcggaaacaccagtcggcggcggcgaaggcaagccggtcggtgaagacgtagacgcccaacaacggcggcatacaggccagccgtgcaggcggaaacaccagtcggcggcggcgaaggcaagccggtcggtgaagacgtagacgcccaacaacggcggcataataggccagccgtgcaggcggaaacatcggtcggcggcggcgaagccaagccggtcggtgaagacgtagacgcccaacaacggcggcataaaggccagcggtgcaggcaaggacatcggtcggcggcgacaaaggcaagccggtcggtgaagacgtaggcgcccaacaacgg

SEQ ID NO: 11060 - DNA, 1402 bp, Oryza sativa
tttatctcgtgcgaccccgttttattattgccgaattcatgtttcgacagttggcgcgccaggtaggggttgcgtcgagtttcctatcaacgagcgcgatggaatcaatttcatgagtcgccgacttcgctttcgctttgggagttttcacttcctttccgtcgaccacttcttcaagctcctcttctctgacttgatccaaatcagtcagggggaaactcaatctgatttttatcattatttatcatattgatttttaatctcagattaatttcttgctattttttgttgttgttcgcatataactacgcggcactattgaggcgattgatgctggtcatggactcgaggcgtctcagctttccggtcgatcggccgcgagtccactccgccggcttgtcctcgccaccgccattgctgatagcaacaacgacttcaccgccggcctgcctccgtcgccgccgactggtgtcatcgcctatacggttggtcggtcacaccaccgttcatgggcatccatgtcttcaccgaccggctggccttcgccgccgccgactggtgtttccgcctgcacggctggtctattatgccgccgctgttgggcgtctacgacttcaccaccggcctgcctccgtcgccgccgactggtatcctcgcctatacggtcggttggtcacaccaccgttgatgggcatcgtcatctacaccgctggcctgcctccgtcgccgccgactggtgtccccgcctacacggtcggttggtcacaccaccgttgatgggcatcgtcatctacaccgccggcctgcctccgtcgccgccgagtggtgcctccgcctacacggctggcctattatgccgccgctgttgggcgtctacgacttcaccgccggcctgcctccgtcgccgccgagtggtgcctccgcctacacggctggcctattatgccgctgctgttgggcgtctacgtcttcaccaccggcctgcctccgtcgccgccgactggtgcctccgcctacacggctggcctattatgccgctgctgttgggcgtctacgacttcaccgccggcctgcctccgtcgccgccgagtggtgcctccgcctacacggctggcctattatgccgctgctgttgggcgtctacgtcttcaccgccggcctgcctccgtcgccgccgactggtgtccccgcctacacggtcggttggtcacaccaccgttgatgggcatcgtcatctacaccgccggcctgcctccgtcgccgccgactggtgcctccgcctacacggctggcctattatgccgccgctgttgggcgtctacgacttcaccgccggcctgcctccgtcgccgccgagtggtgcctccgcctacacggctggcctattatgccgccgctgttg

SEQ ID NO: 11061 - DNA, 1382 bp, Oryza sativa
cagtccatcataacctgcagctgtgaccgaatggtgttagctttaaggttaagtgatttacataaaccactttcaaacaaataccagcaaaacttgatcagatcattctttttcacataaggaaacataattcattgaacactcgcagcaaaaataattcattgagcaatgaactcatttgatcagtaatatctctaggaatctaagaggccatttgtgatatacagcagctacaccatgcttcacttaatcatttatatagcaagaatatatatagtaggtggacagcagtaccatgctttactcttattattgacttcagtactagactctaaggcctgttggattgcctacaagttgtagtagaactacatgtcaacagacttgtctatccttatggctgtattattaaaataacaatgtgtgcagtgtcaaaaataaatttacacagctaagccttggaaaagcattctctgattgcacatatatttaaagtgtgtaggtatagtgtgcatggcagatttaaaagtatactaaccaacaagtatttggatagacaacgtgatgcaccatgtggcgcacatcgtgcatgggagtgcacatgtaaatgaggaacaagaagaaactgaactaggtaaaattcatgttttttttagaagtttgaataaatgtacgcattcttattaacccatattaacttaccatgtcaaacattttgtagatgaccatgaagcattgcaatttgagctggaagccttggagaatgatcttcaagactacggagtgtacgccgaagctgtcaatgttgtctttgatgtagaggagttgcccgactcagatgacgatcaagaagaacatgcaaatgaaaatgtggcaagtaagtcaaaagatttgacaaacatacaaaggcgaggcatttatcaattgttgcttcagaaaagtaaagatggaaaattagaaaaacacaccacacgtttagttgctcaagagttccatgttagcatccatacagtccaacgtatttggaagagagcaaagatttgccatgaacagggaatagcagtgaatgttgattcaaggaagcatggaaactctgggcgcaagaaggtcgaaatagacttgtcagttattgcagctattccattgcatcaaaggagaaatattcggtcactagcacaagcccttggtgttcccaaaagcacattacataggtggttcaaagaagggctgatacgacgtcactctaactcgctaaagccttatttgaaggaagcaaataaaaaggaaaggctgcagtggtgtgtttctatgctagatccgcacacattgccaaacaaccccaagtttattgaaatggaaaatattatccacatagatgagaa

SEQ ID NO: 11062 - DNA, 1070 bp, Oryza sativa
catccatacagtccaacgtatttggaagagagcaaagatttgccatgaacagggaatagcagtgaatgttgatcaaggaagcatggaaactctgggcgcaagaaggtcgaaatagacttgtcagttattgcagctattccattgcatcaaaggagaaatattcggtcactagcacaagcccttggtgttcccaaaagcacattacataggtggttcaaagaagggctgatacgacgtcactctaactcgctaaagccttatttgaaggaagcaaataaaaaggaaaggctgcagtggtgtgtttctatgctagatccgcacacattgccaaacaaccccaagtttattgaaatggaaaatattatccacatagatgagaaatggttcaatgcatcaaagaaggagaagactttctacctgtatccggatgaagaggagccatatttcacagtgcacaacaagaacgccattgataaagtaatgttcttatcagcagttgcgaaaccaaggtatgatgatgagggtaattgcacttttgatggaaagataggcatttggccttttactaggaaggtaaaatatccttcttattacaaatgttgttaatgtacatttctttctgatattcatgggcaaacataactaatttcatatactaacaggaaccagcccgaaggagaagtcgtaatagagaaaggggaacactagtaaccaagccaataaaggttgatagagacaccataagatcattcatgatctctaaagtgctgccagctattagagcatgttggcctcgagaagatgcaagaaaaaccatatggattcagcaggataatgctagaactcatctacctatcgatgatgcacagtttggtgtggcagtagctcaatccggacttgatattcgcctcgtgaatcaacctcccaattccccggatatgaattgtctaggtcttggattctttgcttcacttccatccttaacacataataggatctctagaaacatggatgagctaatcgagaatgttcccaaggaatacccgtgactacaatcctaatacttttaa

SEQ ID NO: 11063 - DNA, 910 bp, Oryza sativa
caaatgtgccatacctcatctcaatgatcttttgtttggctctccaggcctttgcatagcttatggtgtacttgaatttgttctcgatgtgcctaataattgattttggttcaaagccaatgttaccaacaacactgctgtacatctcacttgccacaaaaactgaagtgatgtttcggtgatacttctccaccccttgtaagtagcacttgtgctcggtcacaatgctaactttccaataatcattccatttacccttatatgcatggacacgccacggacattcttccttcatgcacctcacttcatacacataatttgttgacttgaccaccctaaactctctctgcaatgaaactgcccaatgcttcaccgcctccttcatctcatccttatgagcataccttgcaccctcaattatctcgttctccttatactcccagggtacatgatcaccctctgatataacaagaccagagaagtcctcatttgcccaatcagtggccattacatcaccttcctcatcggatgatgcgtcgtcctccgcttgctcattatccgaatcttccctctccatttcatcaacaattataccgactctctccccctcatccgccatgcccatggcctgctcctcccttggttgattttcctcattttgcatcgatggtccaacaacatcccctgcattgctaggaccctccacatcttcggtttgcattgaaacatttgtatctttctcttgtaccgacacaaatataatgaggggccatgaccgttcaaaagccatttccacataccgtctccaagcagcagtgctgtccatcggcattagttcccaaaaataaccttctattgcacgactcactacaacagatactgacattgtgtagacttcttggtctattct

SEQ ID NO: 11064 - DNA, 1186 bp, Oryza sativa
ctgggacgccgccaccggcgagggtgccagcttcacacaccggcattctccttcgtcatcaacccgcccaaacaggacggcggcatcgacaacaagggcgccggcatggccttcttcctcgccggcttcccgtcgaggctccccggctcctacccctacaacctcggcctcaccaaccagaccgccgaccaggtggccgccggcgacgaccggttcgtcgccgtggagttcgacaccttcaacgacaccatcgtgcacgaccccgacgccacctacgaccacctcggcgtcgacgtcaactccgtcgagtccaagacgaccttgaccttgcccagcttcaccctcgtcgggaacatgaccgccgtcgtcgagtacgacaacgtgtccagcatcctggccatgaggctgcacctcggctatgggcttagtggcccccgtcaccggccggattacaaccttagctacaaggttgacctcaagagcgtgctgccggagctggtctccgttggcttctccgcctccacgaccacatcctttgagctgcatcagctgcattcatggtatttcagctcatcgttggaaccaaaggccgcggtgcgtggcagagttgtagcgggagccaccgttggcacggtaatgttcgtcatactcctcttcgccatggtagcagtccttgtacgacaacgtcagagcaagaagagggagacagaggaggcaaagaacggaggcatggatggcagcgacgacgacgatgacgacgacggcgagaccatcgtagagatcgagatggggacggggccaaggcgatttccatactacgaacttgtcgaggcgaccaagagtttcgcggcggaggagaagcttgggcaaggcggtttcggcacagtgtatcggggctacctcagagagcagggcctcgccgtcgccataaagagattcaccaaagattcctccaagcaaggcaggaaggagtacaagtcagagatcaaggtcataagccgtctgcgccaccgcaatctcgtgcagctcatcggctggtgccatggccacgacgagctccttcttgtttacgagctcgtccccaaccgtagcctcgacatccatctccacggcaatggcaccttcctcacatggccaatgaggttattaactcttgctaattttgtcttaatctttgtagtgtcaa

SEQ ID NO: 11065 - DNA, 986 bp, Oryza sativa
tatccatattttctagcgagcagttcagtacataaagaaccaacaaatgctatattaactatctattatatacttaaaaattcattaaactccctacagatcctcttaaactgtcacatggttttctacaaacactcatgagatgccatgtagtgctcaaataaattaaaagttcctagaaattatgataaaaaaatcaaaccattgattttcctttaaataggtagatccaataattataactgctacatctcacaaaaataaatccggtacccccacctccacccctaccgtatgtgagcatgcatgtacgtacgtacctccaccgtcctactcatctctgggatccaattctcatatcctatttttaagataacttttcctattttctacctagcacataatatatagaaaaataataatagctaaatgatcatgactctcaagttacatgtacttttctcagtttatttgactttttgtgttatttataattaaattcaagacccatattgcacatatttactatatataagttagataatactgctatctaactacaaatatttgagcaaaatagcacttcgaaaatgatgaatgaattcaaatgtgtgggtctaaagtccaagttcaatcatcaccaaagaagcttggaaccagaatgcacactctgggcctgaacccgatgaaggcggagctataagacattattagcaaggtggacactgacggcagcggcatcatcgacttctacaagttcctggacctaatagcgcactaaatgattagatgaaggacaaggactaagaggaggggaccagagggagacgttccatgtcttcgacaaggactagaaaacagcttcatctttgccaccgagccccaccacgtcatgtctaatgtatcaagagaggctcactgatgaggaggtcaacaatgatccgcaaggctaatggtgacaggtggatcaccacaaggagtttgta

SEQ ID NO: 11066 - DNA, 4869 bp, Oryza sativa
  unsure (1)..(4869): unsure at all n locations
agttgagctttatttatattggttcaactaaatattagatataattgcttagccctgcttagaaaccttagcacatttatgggataacttatgattcactattatttcatgatggtttattgatagttcacgatggtcaatcgtgattagttaattaattaatgtgccaactaaaacctgataatggtgggttgtgagcacatggttttgatggtcgtgctcatgacaattaaggaccggttcacgagtttcggttgtgaaacattaatcgtgccaaccacaagccagcatgggcaacggctttatcttttgtatagcatggttcgttgcggggcaccagactgagaagtggcggagataagcccacgggggtcgctggggagtccatgccttgtttataagggggtgattatgatccaggaaggtgcgctgcagtggattgtgttatgcgaggggtattgtcacaactcctttccgaggtaccgtggtggtattgaggcacatggtgacatgatgtggggttgtgtcttgtgggtacagtggtacacctctgatcagagtaaaactattcgaatagccgtgcccgcggttatgggcgggtctaacaatgtctttcgtgattagtctcacccttctcaccatagtaaatgatgctataattggtaataatttgattagctcctggtttggaatggtacattcctggtttggagatagaactgtgcagccgggatggttgttcagaatggttgggcctatacaacagggtatgttgtatagcgttggattaatattgtttaattacttaactgttttattaaattctcaaatgtttgctaaatgctgcttttgcaaatgaaaccctattatgccatcctttgttatcctgtgcacttgcatatttgctgcgtggcttgctgagtatgtcatatactcaccttgcaatcattcatcagaggaagagttctacaatgaggctgatggtgtggaggattaggtgtagccttggtcaagctgcctgtggagtggagccgtctgcgccgtttattttattttccgctgcttagatctctattgattgagaggaactatctacctctgtaatgacattttattcgcttattaattagagtaataattgtactctattatcaatttgttattgtgtgcctcggctgattcctggacgagggttcacacacatgtaagcgtttggaattttggatagaaattccgggcgtgacaaagagctccaatggtctagatgtggacatgatactcttagtaggatgagaacatgcaacttatttgccggcttgacaagcactacaaagcttatctttctcaaacttcacatctttcaagtccacaactagatcacgttttgaaagtttgctcaattgattcatgccaacatgggctagcctcctatgccaaagccaacccaatgaagtttttgcaactaaacaagttttcaaatttgcttcactagaattgaaatcaaccaaataaagatttccatatctaaaacctttgaacacacaagacttgtcaagaaggttagaaacaataacttcttgcgggaagaaagcacatgacaagccaagatcacaaatttgagcaaccgaaagcaaattgaaatttagagatttaacaagagagacattatcaattgacaaatcattggagatagcaattttacctaacccaattacctttcctttgctattgtctccaaatgtcactttctcttgttcattccctcctacttcaaatgtggtgaacatagccctatcaccggtcatgtgttgagtgcatccactatcaagcacctaatggctcccaccggtgcagtagttcacctacaaaagaagatcaagctcttttaggtacccaaacttgtttgggtcattggaggttacagaccaaagctttgggcacccaaatggcattctttttaccaccgagtataggggaacccacatatctatcaacaatgctaccatcatgagccttcctaagcatataatgagaatcaaacatgcatgtcttaggaggcttaccaccggggcaatcattcaccaaatgcccaacctcacgacacttggagcaatacttaccattactcttgacaaaacgagtggcacggtgagaaggtttcttacccttctttggaatgaatccaagtccctccttgttaaggatgcaccgttgctcactcaaaatcttgtcaagagtgttcttacccttgaagcacctctccaagctcttattgagcttagccacttgctccttaagctcattgtttttaacaacaagtgaggcatcacaaatagaaacacaagagttagagctagagctagacatatccacaagatcatcacaagaggtagaaatgctagatgatgcaacatgagcaatatggcaagtagcactatcatcaagcaaatcacaagatatgccaacatcaatgagagcttcatgttgagtagtggaaaggaggttgtcatgagcttccttaagcttctcatgagaaatggtgagtctctcatgagaagtctttagctcctcatacaagacctccaaagaagcatgatccttctttagggccttgaacttgacaatctccttctcattataagcatggagctcctcaaacatactcacaagctcatcataggaaacattatcacaatcatcatcactctcactatcattaaaagatgttaccttagatgagtcctttgccatgagacaaagtggaccgaagagtgatggagcctccttgatggcaacaacgaccatcttcttcttcttggagcttgcatcatcaccaccttcttcctcggacccggatgatgcgaagctctcctcatttgagtcccattccccgatgaaagcctcaatcttcttgccttccttcttgagcttcttcatgagcttgtagcctccactcttcttcttggatgacttgtctccatcatcatccttggaagggcattggaagcaaagtgttgaagcaaagtgtcccttctcaccacactcaaaacacctcaagttggagagagtcttgttgggtcttctatttcttctcctattggagttggagcctcttcctctctcctttctccttcccaagagatcattgaactatctagcaagaagggcaatctcttcctccaagtcctcattggcttattcaccttgcccttgccctagtcttcaacttcggcttggagggcaatgccctttttagaaggtgaggcttcctccatctccttcttcttcaacttgtacatgtcattggtgttgatcttccccaagaggcttgccggtgtcatccttgacatgtcggagttgatgagcatggtgataaggggtctcatacttctccggtagagccctaagcatcttttgggcaacctcaagatcggtgtagtttgccccaagccccttgagatcattcacaatgacattgagcctcccatacatgtcattcacactctcatgaggcaacatggagaatgtctcatattggatcttgaggaaatgaagcttggcatccttgtactcacttgtgccctcatggatctccgccaacttgttccaaatctcatatgtggtctcaaggtttctcactctatcaaactcctcttggctcaaagagttgaacaaagcattcatggcttgggtattgagttggaggttgcggtgatcaatctccgtcaagggcgtgccggtgatagcaaagcctacatccacaatactccaaatatggaagctcatagctttgaggtgagtagacattttaattttccaaatagaatagtttgtgccattaaacatgagagccttccctacatggttcacctcgttcgacatcttctctctaggcggtgaagcccaatcaagagagaccaagctctgataccacttgtaggatcgagatgtcgactagagggggggtgaataggcgatttaaaactaaaacaccactaatcaaaactaacctaagttgctaagcttggtgaaggtcaactctaactaagcaactaagttatgttttgcaaacctaaggtgatagtggttcaattatatctctaggaaagtaaatcacactcctatgtcaatgtttagcaatccttaggtgatatgatctcaagtatgtctctagaaatgtaaattgcacaaatataaatgtgacaatcaaatgagacaaggagacaagagatttttcaccgaggtttggaaactcgccagtttcctactccctgttgaggcgagcccaactccaccgctcaaccacgaagccaccgcacgcccccttcgtcaaggggtgggtaaggcgggagccggcccacggaaaggactacccaagcctcaatcactagggtagttcttccttcactccaaaggtggtgaactccaaaccactcacaaaccggcgccgggcctcctccacaatcttttcggagaggtcaccgggcaactcctccacaacccgtctaggaggtggcaacctccaatagtaacaagccaatgacccgcgtggagatgatcaatcaagtgccacactacctctacaaatgaaagcaatgcacttgactcttggctaatcaaccttctaacacactagatggatgaacacaaaactcaagtaggtgtgaaaaaggtgcaaaggatgtatgcaattgaattgggtgccaaaaaagtccccttgctgctggtgggggagtatttatactcccaccccccaaaactagccattgngggcgaaatcccaaatcattgtgctctgtcggtctgaccggaggtatgtggccggtcagaccgtgctactctgcaacggctagaaaactagccattgaa

SEQ ID NO: 11067 - DNA, 1573 bp, Oryza sativa
aattgctgatggaggtgtcatgcagtgcactagggaaattgctgactgtcgttggtggatgcagggacagagtttctgcagtaatttccgactgctacccctgggaaattatgatgccatattgggtatggactggctcacaatgcacagcccaatgaaggtagactgggttcaaaaatggatggaattccaatacctgggaagggatgttcgaattcaaggaattactaatcagccagcacagtgttctcatataacacacaaccagttatctggcatgaacaggaagggttcactgttgtattttatccagttacaaaatatggccatacaggagaatagcactatttctgattcagtcaaacctatgttgttagagtttgctgacctctttgaggaaccaactgaattacctccgagaagagcttgtgatcacagcattaacctcattccaggggctaaacccattaatctgagaccttataggcacaatcctgctctcaaggatgaaatagagaggcagatagctgagatgctcaagtctggggtgattcaacccagccaaagtcctttttcttccccagctatacttgtcaagaaaaaagaccacacttggagattggtaatagattacagaaagttgaatgccattacagtcaaaacaaaatatctagttccagtgatggaggaactactggatgaactatctggttcaaaatggtttaccaagctggacttaagatcaggttatcaccaaattagaatggctgagggagaggaacacaaaacagcctttcaaactcattctgggcactatgaatataaggtgatgtcttttggcttgactggggcacctgcaacatttttgggggctatgaatgacactctaaaatatgtacttagaaaattcgtcctggttttctttgacgatatcctgatctatagtccagattttgagtcacatttgactcatgtcagacaagtcttacaactacttcagcaatatcagtggaaggttaaattaagcaaatgttcttttgcttagtcacagttatcttatttgggccacatcatcggtgcaaatggggttgcaactgatccacaaaaggttcaggatatactcaattgggagattcctaccaatgttaagaagttgagaggatttctgggattggctggttattacagaaaatttgtacaaggctttggtctgaaaagtaaacctctgaccaatcttttgaggaagggtgttccttttgtttggagtacagaagcagattcagccttccaggctcttaagacatctctggcctcagctcctgtcttggctttaccaaattttcaaaaaacctttgtggtggaaactgatgctagtgactatggaatcggtgcagtactatcacaggagaagcacccaattgcctatataagcaaagccctgggtcccaggaccagaggtctgtccacttatgaaaaggagtgcctagcaatgatcatggcagttgatcactggaggtcttacctgcaacatgttgagtttataatactcactgatcaccacagtctcatgcac

SEQ ID NO: 11068 - DNA, 32555 bp, Oryza sativa
gtcacatatgcatgcgcccgcgcgcctcggtttagcagttccatgctattttggccggcccccttttttccggtcgaggcacgtactgtactgtactacgcgctcgctctctctctctctctttcccgtccttcctcacatggtcgacccgtcgccctctcactgtgctggtcctgcacgccgttttcgctgctccccggcgaaattttgttttgcgcgtcgtgtacactccatatgcgtgtacggtgtaatggcacgtgaaaaatttctctggagcaccggatatatatatatatccagatgcactggtcgacgggctcgattattattacacagggaataataaaaaaaaacgaggatggatgcatgcatatgaatgcatcgcacgtcgtggcacacgggttttttttgtatcggtccgtgggggctcactcactcacacgctcgatttcttttgcctttgcttgttgtttcttcttcctcctcctcctcactttgagtgtcaaaaaaaaaatactagtacatgagtgagcttaaagtcgaagcaatcacaagggaggcgtgcatcagtacatgcatgctagcaaccgagatacaggcttaccgacacttggtcctccaggatgcaaacaacaaagttcatagctcgatagattgacttttctctctctctctttctttcctttttgcttttagatacgttgaatggagatcgagcatatgctcctgaaaatgactaaacagctcagtccaacggaacaaataaccacataacctcgcactgaggacagtttgcgcatctactacattcaagttacacagatatactactgtatgtcaacttgccaaggcattgattctgaaaataaatgtaaaggaaagttcaacgcgacgagcccgacgcatgcagatgctccacggtgtgtgtgtgtgtcactctctgaacgccaacacagtaactagctggacgcctggagagctaaaaacagtgacctctcagctgcctgcctcacttatctctgtttcagactaacaatggaaccttgcttgtcctgaagacatgaggcccagctttaggtgcacactacactgtggttgtgtttagttttatgtgtgtaaaatttttaaatatatgaatacacatttaaagtattaaacatagactaataataaaacaaattacagatttcgcctgctgcaagacgaatttattaaacccaattaatctgtcattagcaaatatttactgtagcatcatattgttaaatcatgacgtaattagacttaaaagattcgtctcgtaatttacatgcaaactgtgtaattgatgtttttgttaaaaaaattttatctaaacaaggcttataaagctagtacggacgggcagcgaggtgtcagggcacaggcaatcatcgcagaaaattaaagattatgtgtaaacaggcaagcacggtgtttccaagttgagcacttgagcatccggtacgcggaagggagaaagccaataccgggtggattttctcatgaacgtcgcgacctatttattcggcgcgtcaaaagatcaatgttgatatcgatcaatcggccaaggccaaaggagacgaccacgtagccacgtaggagtaaaaagcaacgaggcggcgtcgcggcgatactttcgtctgctcaactgtcggaaagggtgcaaggcaaatactccctctattccaaatttataatgtcgttgattttttacataacatttaatcactcatcttcaaagtgtgaaaacaagctaaatgttaaaacctcgtaaaaatcgtatctgaaagtttcataaataaacgaagttgagtttggagctgggatttggtgagaatgtatttcatatctacacccatctctagtatttttttcatgaatttactaaacttttaagtatgattttcatgagtttccaacacttagctcatttcatcggatatgtccctatttattttattgtgaattattttatcatcaaataaaatacaaacttaacttattctttaaacatatttatattaattttttaataagacgaatgatcaaatattatacgaaaagtaaaccatatcatatattttgaaatgaatattttgaaatgaagatggtatgaacaaatgagtacggaatgtctgaatcactgacccctagtagaacagttgtggtcgggtagctttggctaggtgtatattaaggctgcgttcgcttgggtgtgatatagggtgagaaagcacctcgttttccacgcgcacgcttcccaaactattaaacggtgtattttttataaaaattttctatagaaaagttgctttaaaaaatcatattaattcatttttgaaatttaaaatagttaatactcaattaatcatgcgctaatggctcacctcgttttgcgtatcttcccaatctccccaatctctttcttctcaaacacaccctaaatcagcccggttgctcatctattctcttcgtcccataaaaaataaacatatgaccggatgtgatatattttagtacgataaatatgtacatatgtatatctactatgatgaatctggacatatgtatgtctagattcgtagtattagaatatgtcacatctagtactagattgattttttatgggacggagagattaccttgtactgtgactgtttttagctagcaatgataccctttgtgattgtatataagcagaatgtagggacacccacaccctatgaagctaccagtctactttacaaactttggagtttttccctccgtgtcccacgatatagaaatgtaagcatcagatgagatatttcatagcacaatgaatcaggacattccttgttcagatttattgtactatgaaatgtcatatctggttctagatttttatattatggaatgaagaaaataataaaatgatcactgtccaattcattgtaatataaaatatcatatctggttctagatttttatattatagaacggagggagtaataaaatgaacgtgcatcctctatacggtattgccgatacatttgactgtccgaaactttagcacctgtgagcatatgaacttctaaggaagaaacacaatcaaccgtcacataatctctctctctctctctctctctatatatatatatatatatatatatatatatatatatatatatatatatatatatatatataaactcgagtacgttgcaaggcatcaggaactttaagtacatctttcttgatatgcacaaggcatgaaaccaccacgacgaatttaccttgaaacatgggaggtggtggagagcaaaagactccgggggcagtgtgagtgagtggcgaggccactagaggcggctgcctccttgtgcttcttccccttggacatctaccaccgcacctagcaatgccacatacctaccaggaaaagcagcgcatatgcattgctttgcttgccacatttgcgctattctttccacttgtggcatcacacagaattcgcatcacttgtccttgaaacattttcaactcaacgaagctcctctcttctatgagatgcccgcaaagcaacagtggttatcttttgctatgctccatggaatctagtacatatataccgtatatgcaaacgcatcaaaagaaaaggaacctagaaaggacaagtagacctctaacatggcgtgtttagcaaatgggcagcatctaaaacaataggatccaaccaatatgccccgagtgtgcaatggaatattggaacaatttgtgaggttcttggagctcgcgccgtcgaagaaatcttctccaacattgcacttgaaaagctgcaaagacagagaaaaaaaaaagaagtgggctggttcttccggtaaaggagagggaacgaatgggatccaaatcaaccagttggggcgtagaaaaaaaagaagaaagaattcaggcaatcaaaggatcgaccaggaaaaagacggcatgttacgtcggtggcgcaacttgaatcaggattgtgtggatcgcaattggaagaagggggagatggaaaagtcctggaaaaaacaaaggagatggtacatggttgtatgtggccattgatgtgaggtcacaatcgtcaagtacttctttatggcctctttttggagaattatgcagtgtccaataagcgcaataagcaaaggaacagcgagttccacgtaaatctgacggccgcaagtggccctttccagttctgaactgtcaaacagtttaccctagtcgataagtcattgtaaagcaatatgagtgaacaggaaaacaattatacgagggaacaggctaaatcggaacataggatcctaccatagaaagcaggcagattttggagagcagaaatcgcacatatgacccaactgatggaaactataataacgactttagaatggaggatggcgatggtgatggtgaagaaaccaccatttaggtgtacagtgaaaatggcatctttgatagttttggtggcagcacgtcatacaggatcataagtactgtagcacagctcttgacaaaaaaatatatactcaatagtcgaggtacagaaaaaaaaattaaaaaatgtgccaaaacccaaaaaaagccgacaaactatcctgacaaaactattaaaacatgtgatcttcaaatgacctaacatcatgagtttattgcttgctatccccttgctggatacttgaatcatcaaagtcaagaaggcagatggtttttcagaatctgaatattgttttgtcattttcaagtgacacggcacataatgctttacatcagaaccaagaggattgtttatatagaaagcatccactaatcacatagaaatagtccacaaattattgtcaaagatatcaaaactacattgaaatgctcaaaagtttgacgctatagttcattgaattaccgtttgctaaaaaatatataaaataccaagatggaaagggctgtcaaaacggttaaaaaatcactgtacatgtatagtccacccaatgcttagatcgtaaggtcacaatatgagctttggatatcctccagacaattttataatacagcactttatctctcagtgcttcaccaaatctgccttgatcctacaatggaactttggaagcattaagaatcactaacaatttaagcaagtataccatttggtttttagaagataacttaacattgcagtctgcagatacttttccatgagttgtcaattaaccaaaactgtctttatcttactccgatacatcgaaaaggaacatggacatttgtaagatagaaaacgaggaagcacgtaatttcagaatcaatgcaaagaaaattggtaatacaaaagccaaatacaacaaagttacaattagatgtcccacgatatcagcagactacaaagccccagaagcctaggctatgaaaaaaaaagccacaaacaggctcgagacataaatagtcacaggctaaagaaactatttcgaatttgggccctaaacatggcctgcaagattttaacccagtccataaagcattcctatacaatactatcagattttgcagttcagattgtaaacttagaaggaaacaatatcaactacattcaggggatagtaattagctacaacagtacaagtgatgtttattccctgcattcaatcactgacttggacaaaaaactgttggacacttggaaccatcacatgccaaatcatcataaagaagctttgtgtgttaagaattatgacataaactataaaagaacgtgcaaatcagttaaacccagtaaacatatctcaacaaaagaatacaaacaaagttacagaaattaagctgatagttgtgacttgtgagagaaccagatggcattcatagcatcatcctgaacttaatctgccacttgcatcttcaaccttttaagacttattgtcctttgcaacaaatatggtaactaatatgatatccacataaaaaagctcacactaatcattccaaaacacttgacttttcaaaagtcaaaccaagtacagagtagttagtactgatatcattttttgttctcagaaaagaagggaaaacaaatcactatggacttgtttgcatcaggcctttagtgcactaatcctctggttctaccattgaagtatctttctgcttattaatcttcccagcactattataataataatcatttgttcattttatgtttcattaagggatcattcagaataattcaaaggccattaaggcttgagaactatcccacagagctagtctgtaaaaaaaaaaccatagaatactgttctatgcatgctgatcaatcattaatgtgtgatctttcctctaaaccaaacaatcacacctttcaaactaaatctaagattaagtacttttgatcactgaatatgaattaaaattatcaatagtccctcagattaaactaaaggttcaactgttactaaattccacatgaccacagaagacattaattagaagcagtgaaatgatagatatatgtctagttattatgaattgtctgtacataacataattcatcaggtaaagtgtaagacaaacatgaatacccatgtacggccaagttaaccttaaagaacagtggctacatatttcacatgaaaatacttgaaaataatatgatgtcattaaaacttttcacaacatctaagtttgcaatgctactacaaatcaacccaggcaacaattttgcaatgcagctgcagcatcaagaaagcaaacagccccaggaataatccaatttgacaattcttcacaatagcactatcaccgataaatttgatattgagcaacaagaaaatatccacatatgccattaagatgagtggaaatactcaggcattcaggcttatattgcttcaaacgaaatcttcaaaccttaaattgaggttctttgagcatagcagataacaaaatgattccgcgctattcattgtggcactataattctataattccattgattcacacaaaaaagaatcagtgagacatatttgcagtaacaacaatagatgctataatacaactcagcactatatcctcatggttaagaaactaattttccacaacaagaagaaacaggctatctccacaaggaatcaactgaaagaaccgaacctattaaatgcctggactcctcaatggcgagggctctgtctggtaatgccaactccgccggagaagatgctagcaaaggcctgcaggttctcgtcagaggggcttatgtggatctttcttggtaatggtaggatacaaggcccgcaaaacaccaccccgcccatctctctcaactcctcacgctcctcatcgctccgatcatctgcgccattgttcagcttcaccgcaacgtccagcttgtcagcgcacttcttgttcggcttggctgcaatctgctgcttcttggtcgtaagaaccgtcggagagggtgggggcgtcggaaacgagcggttgaggacgcggagcacgcggcctgctgggatgggcgccgtggagaggccgctgagggagacggcgggggatgagcggagagcgtgggcagctgccggggacggcggcgcggcgacgagactggccgccacgttaaggaggccgtggacgcggccggaggggcggcgcacaccgacggcgaacatcgacggggacccgacgggccgggacaggaggccgtggtcgccgagcaggaaccgggcggagccgaccagggagtcccccccgatgtgccagccgccggcgggcgcggcgtagatctcgacggtgacggcggcgcgggagtcgtcggcgagcgcggcctcgtggacgcggaagaggaggcgctcgtgccactccgggtcgaccccgcccgcgcggtccggccgcgtctggagcctgcgcgccgcgtccacccacgccacggcgtacgcctgcagcagccgccgccgcaggccggagggaggcttcagcccctgcgcggagatgagggtgacctccagaatccgctcgccctcggggagcgccagcccggcctcctcgtccggcgccgcctccatcatcgccgcccaagcggcgtagggtttcttggtcggcgcctccgcgctccgatttggggggtgggggttttccgcgcctctcccgtttcgtccgtttcccagagagggatttgaacggacggatggattgctactggccattgaccgatcgagggtcacaaataaaccccgccagattgaaagcgtttgacagctgcacgaaaaattctcaaataaaaaggagggtattccaaaaaattcaatcacattgcatctcacacacgccacaagccaatggctgtgttcagttccacgctaaaattagaagtttgaagaaattagaacgatgtgacggaaaagttgaaagtttgtgtgtgtaagaaaattcgatacgacagaaaagtttaaaatttgaagaaaaaaaagttagaatctaaacaaggccaataagaagatggtactcggatctaaatgggggagttcacaactatgggggtgtttaggagagaggggctaaaccccctatatatgctctactctatctatctaacgtgagttctaatataagtatagtatttctagttagtggcagaatcagccaattaggacctggcaatcctatgcagctgcataaacaccatggtttgaatcaatagtgtagttgctttgctccgtaagtctgtgttctttgctcaatgttcctgtcggtgatatgggaccgggagtatcatgaccagaggcttgaggtagacgcaatcgcccgcgtggcctggcaccttcggggacgtcgggcccgagggtgaggtgtccgccctcctcctgatttcccccgagggggggtcgggttacgcttgccccggccccgagggccgaggcaccccgaccccttaaagaagtctgcgccacatatatgggataagtgagcacagctgtgctcacctaacagcatttattacagtctggtcaagcgtgtcacgctgcatgtaacgcagtacagcacgctcttttatccggtctgtgaccagtcacagaccggtcagatcaagggttaggtggcgactggcggtctgacgcacgccttgccccatcccgtcaagacgaaagcctctaggcaactcgtctcaagccggagctagcgtgttatctcttagagatggcacgttagccctggttagatttataccaggctttatcctaaccattacaggcaaggtgttacacgaagaagggcaaacatgcatcttgttaaactgacacatggtggacaagaatgaccagtctgacactggtcgcgtcagcaacgggcagccacgatcccacgttgcgcccgtctccgccgggagtggaggtaggtgtgggctgtcccatcgaagtgtcattcggatggaaaccgtaccgatctccgcccattaaagagaaaaagaacagtccagtttggaaagagaaaggtgcatgtggtatccccttgagatataaaaggaggaccttgcccatttagaggggggatttttttcccggattgaaagctgagaacgggggagaagtcagcggacactttgtagctcgttcatacacagatccaccaaaacacaggagtagggtattacgcttcgcggcggcccgaacctgtatacatcgtcgtgtctcgtgtgtcttgccgacgagtaatctgaccacatacagagagagtgagagcttgagatttcaccctaagcccccggccgaactggcaaaggggggcctgcgcggtctcccggtgaggagccacgagctccgtcatctggcgcgccaggtagggggctcagcgtgtgctttcagagctctcagactcttccgtgtgccccaagtttttcttgttcagcctaatggccgagcaaggaaaaacgcacgacctctcgccgagtgtgagcggcgacgacggggagccgaatccacgccgtcgagctcgtactcctccacctcctccgcgccaaagccctaagcagggggaggcgcttgagagggtcgacaagtccgcagcgtcaccggccgcaggtgatgcaggagaacggcgagacggggagcgtcgcctcctcgtctacggcgacggcagcacgcctcagggtgcgcttcaagctgctggcgcgctcctacgacacccgcctgtcgtccatgacccggagtctccagcccaacgatggctggaagacgtggccaacttggtcatgacggcacagcagcgcctgggtgctggtggacggtccgccaccaccaccaagacctccggcgccgctaccaccggctccgtatcatcaaggcggagggcgcggcgagtggcggcggctgcacgtcattcggctgccactccctcgtctacaccgtcgactcgggaggatcagcatggggagccggatgcccgcctcaacatcgggcgccggtgtaatagccggcgtactccccgtgcaacggagggagcctcctcgtccagagtgtcacctcgacatggacgtgaagatcagccctccgtgcccccggccggtggtgttggctgtagagcctttgtggcgagtcttcggaacgtccgttggcccccaaggttccggcccaccatcaccgagaagtacgacgggagcgtcaaccccaccgagtttctccaggtctatacgaccgggattgaggccgctgggggtgacgacagggtcatggcgaacttctttcccatggccctaaaaggacaggcgcggggttggctaatgaacctgccacccgcgtcggtccactcctgggaagatttgtgccaacagttcaccatgaacttccaaggcacgtatccgcgcccaggcgaagaagcggacttgcatgcagtacagcgaggcgatgatgagtcgcttcgctcgtacattcagcggttttgccaagtccgcaatactataccatgcatccctgcacacgcggtgatctacgcgttcagggggggcgtgcggcacaaccgcatgctcgaaaagatcgcttccaaagagccccagactaccgcggagctttttcagctcgcggaccgagtggctcgtaaggaggaagcgtggacctggaactcctccggttccggagtggcagcttcggccgcccccggatccgccgctcagacagggcggcgtgataggaggaggaagaagaggacggaccgttccggcgacgagggtcatgtcctcgccgtcgagggcgctccgcgggccacccgaaaggggaggcctgcgagcgacaaaaagaaagaggccggaactcccggcagggagcgccccgccggcaggtggtgctccgtccacaacacctccctccacgatctcgcggactgtcgtgcagtcaaaaacctggctgagcgaacgaggaagtgggaggaggacaggaggcaggaacgccgtgagggcaagtccccggtggttccatccggcaaacggcgaggtgaggccaagcagaaggcccccgctgttgacatcgatgatggtgatgatgacctaggtttccaagaacctggggccaccattgccaccgtcgatggaggagcgtgtgctcacgtctctcgccggagcttcaaggctatgaaacgagagcttctggccatggcccctacccatgaggcgatgcgtcgggcgcggtggtcggaggtcgctctcactttcgaccagactgaccacccaccgtgcattgcccggggagggcaggttgcgatggtggtttcccccaccatctgcaacgtgaagttgggacgtgtcctcatagatggaggagcggctctcaacatcctttcccccgcggcctttgatgctatcaaggccccggggatggtgctccagccgtctcaaccgatcatcggtgtgacgccggggcacacgtggccattaggtcacattgacctaccggtcaccttcggtggacccgccaacttccgcacggagcgggtgagcttcgatgtggcggacctcagtctgccctacaacgcggtcctagggagacccgcgttggtgaagttcatggcggcggtccactacgcctacctccagatgaagatgccgggccctggtggccccatctctgtccgtggcgaccttaaagtcgcgcttgcttgcattgagcagcgcgcggaccgcctcgctgctgcgtccaagcccgagggtggtgacgagaggcttggcccttctgcccccaccgccccgaggcagcggatggccacttgcgacgaggtcccggtcaaggaggttgccttgggcgacggcccatccaagaccacacggatcggtggttttctggatggcaaataggaagacgcgctcgtctccttcctgcgggcaaacgctgacgtcttcgcatggagaccagcggacatgcccggggtccccagggaggtgattgagcaccgtctcgccgtgcggccgggcgcaaggccggtccggcagaaagtgcggcggcaagccccggaacgtcaagctttcatccgcgaggaggtggctagacttttggaggccgggttcattcgtgaggtcatccacccggagtggctggcgaacccggtggtcgttcccaaggcgaacggcaagcttcggatgtgcatcgactacaccgaccttaacaaggcatgtcctaaggatccttaccccctgcctcgcatagatcagatcgtcgactccactgcggggtgcgaccttttgtgttttctagatgcatactctggttaccatcagattcgcatggctagggaggatgaggaaaaaactgcgttcattacccccgtaggaacctattgttatacatcaatgcccttcgggttaaagaatgcaggtcctacttttcagcgtactactcgaatttctttgggtagtcaaataggacgtaatgttgaggcgtatgtcgatgacttggttgtaaaaacacgcaaccaagagaccttactttcagatctagcggaaacttttgagaatctccgctccgcccgcataaaactgaaccccgataagtgtgtgtttggtgtacctgcgggtaagcttctcgggttcttggtctctgcccgaggcattgaggccaaccccgagaagattcgagctatcgagcggatgcgcccccccagcaaacttagggacgtgcaatgcgtcaccggttgcatggccgccctaagtcgtttcatatcaaggctgggagagaaggcgctacccttgtttaagctcctcaagcgctcggggccgttcacttggacggaggaagctgaaaatgccctcgcccagttgaaggcgtatcttagctctcctccggttctagtcgccccggagccaaatgagtccctgctactttacttagcggcgaccccccaagtagttagtgcagcgttggttgtggagcgcgatgaggacaatcctcattctgcgcacccccgctctgtgccgacttggcccgggagcaggcagggaggagaggcccccgagtcgaacggtggcctaaggcccccgacgaccggaggcggccctccacccgcttgtcaaacggtgctgggtgcccccgaccctcaggaaggccccgaggccactgagggaaggctgcacttaaagccctttggccccgaggctaaccctgtgctgactcgacccgggaaagagcagggagaagaggcccccgagccgaacggaggccagaggcccctgacgaccggagttggccctttgcccgcttgtccgacgatgccaggagtccccgacccccaggacggccccgaggccactgtgggagggccgctcctgtcatcctccgaccccgaggtcatcagcgcagaagacgagtgcgccccgaggggccacttggacgaagaacgccccgggggtacggcccctaacgaggaggatcggccccgccgaaaggtgcagcggcctgtctactttgttagtgaggccctccgggacgccaagacccgatacccacaggcccagaagatgctttacgctattctgatggcctcaaggaaactgcgccattatttccaggcgcatcgggtcactgtggttacgtcttaccccctcggtcaaatcttgcataatcgagagggtacaggacgagtggtaaaatgggcaatcgagctttctgagttcgatctgcactttgaaccacgccacgctatcaagagccaggccctcgccgattttgtggcagagtggaccccggctccagagaccgtctcaatgcccgaggccagcacgaacccctcacagctgcctcacgccgcccactgggtgatgcaattcgacggttctctgtctcttcagggcgccggtgcaggggtcacgttgacctctccgaacggagacgtcctcagatatttggtccgtctcgactttcgagcgactaacaatatggcagagtacgagggactccttgccggactcagagtggcggctggactagggatccgccgcctcttggtattaggcgactcccagctagtcgttaaccaggtctgtaaggagtaccggtgctctgacccacagatggacgcctacgtacgccaagtgcggcgtatggagcgccattttgacgggatagagcttcggcatgtgcccagacgggataatatgattgccgatgaactctcaaggctcgcgtcctcgcgagcccagaccccaccaggcgcctttgaagaaaggcttacccagccgtcggcgcaacccgaccccttaggggagacggatgcgcctaaccggcacccgaggcccgtcggagtccaggcctcgggacccgaagagagcgttccaagctcccttagattgattgcttggatctctgagatccaaacatacctcacagataagactctacctgaggaccgcgaagggagtgaacgcgtacaacgcatttccaaacgctatgtgctggtagaagggaccctctatcggcgcgcggctaatggaatcctcctgaagtgcattcctcaggaacaaggcgttgagcttcttgctgacatccatgagggcgagtgcggagcccattctgcctcgcgcaccctggttggcaaggcctttcgtcaaggattttattggccgacagctctcaatgacgcagtcgatctggtccggcgatgcagagcgtgtcagttccacgccaagcaaattcatcagccggcccaggccctgcagatcataccactgtcatggccatttgctgtctgggggcttgatatcctgggaccgttcaaacgggccccgggcgggtttgagtatctgtatgttgcgatcgacaagttcactaagtggcccgaggcttatccggttgtcaagatcgataagcactctgctcttaaatttattaagggcatcacggcccgttttggagtgcctaaccgtattattacggataatggcacccaattcactagtgagctcttcggcgactactgcgaagacatgggcatcaagctctgcttcgcctcacctgcccaccccagaagcaatggccaagtggagcgcgccaatgcagaaatcctcaaaggccttaaaaccaagaccttcaatattctcaagaagcacggcgattcatggatcgaggagttgccagcggtgctctgggcgaaccgaaccacaccaagccgagcgaccggggaaacgcctttcttcctcgtctacggcgcagaagcggttctcccatctgagctcaccctgaggtctcctcgggccaccatgtactgcgaggctgatcaagatcagcttcgtagagatgacctcgactacttggaagagcgaaggcggcgcgcggccctccgagctgcgcgctaccagcagagcctgcggcgctaccatcagcgccacgtccgggcccgatcactctgcgtcgacgacctcgtcctacgccgcgtccaaacgcgtgctggattgagcaaactctcaccaatgtgggagggtccgtatcgagtgatcggtgtcccccggccgggctcggtacggctggccacgggcgacggcacggagctgccaaacccatggaacatcgaacaccttcgtcgcttctacccctgaaggggggggtcgggtgtcaggttttggctcgggctaaccccgcaccccccctcgggtgtgcagggttagccgggggctaccacacatgcatatatattcctttcagcatttcaatagaagcagtttcaatttcctaaaggttgtgtctgtgccgttttttccttttgaagaatcttgacttgaaataatgtcactcgtgctcaaccttgccctcgggggctcggttcggtcggctaaaatcgccaaacggggcccagaaccgagccgtgccccggggcgtggtgaactccgggggggaatcggcaaaaacccacaatcgggtcacccatacccctcggtcaccacgttcccggcctggccagtctcgacatgcggatctccccaggcactagccccgacccgagccattcgaggaccgggacttgggcgcgagcccttattccaagctaagtcgcaaaaggaccatggcacagatcatcctcaactcatatatatagcaaaataaaactaacacaaaaatttttcatcatttctcattgcagattaagttaaaattgtacaaaaaagaggcatgaaggccttagaagaaagaacaagaaaaaagataagagtggcgggggcctgggggctcattcatatgcgcccgggtcgccggcctcgtcgccgccgtcatcctcatcgctggcgtcgccctcctcgtcggagctgggggcgaacgcgagcaaaggggccgacccctcgaagccgtcgacgatatggtcggcagcatcccggacgcgcgcgcgcgcgtcatcctcggtcccgggagggaactcctccagcgccatccagggagagaaatcggggtcccgggcctggtaactcgctagcacgagttcgaccgccccccgggcgaggtccctcgaggatgacttgatggtcttctcgagctcctcggggagtcgttcgaggacccaggccatcctgttgaggtgcggagcgaggccttccaggttgctagggcgcgtcctcgtctggcctttccagaggcccgcttgccgaccggcgcgatccatgcgggagaccgagtcccaaagcatgtcgggccctatctcgcccgccaagcggagggcctcggcctccccgatggaagaatccagcgcgcgctgcatgtcagcgacggtgtgttcggcagccgcgaggcgagcggctaagtcgctttcgcccgcagctgccccgccgataggcgccctcgcggccagctctttctcccgtgcctcgaggttggcagcccgctgctccagcgcggctctctcggcacggacgcattcaaggttgcggcgcgcctgctcctcttgcgccgcctcgcggagggagaggctgttcgccagccgttgcgtcgtggcctcggcctcctcgagagctcgctcccgctcagcgagtgcatcctcgcgaaggcggagcgcggactcctcctcggcgcaggcggcctcatgcgccaccagcgtcgcctctcggagaccagcggcggcctcgcggcccgtcaagcccctctccacggcgccggcgtgttcttccagcgccatggcacgggcctcaagggcctcttcgcgccgccgcaacgccgcttcagcctctgttgctcgctgctctcgggcggcggcggcgtcgaggaccccctgggcggcgtcgagcttgttcttcagctccgcctcccagctcccgtgttgaaggcggagggagtcctgcgcctcgatcatcgcggtggtggcgacgagggcggcctctcgctcctcctccacctctcgggcgatctccgccagcgccgccttgcgggcttcgagctccgagatgtggcggcggtgggccttacggcccacctccaccatggcgtccaccgagcgccgcccctcctcgacgcgcgcccatgcggcctcgagctccgctcgttccgctcgcaaggcctccacctgggcgctaaatccatctagcaccacggtgtttgcggcggctaaggcctgcataatgggctcggcgctcaccggggcaacggaagacgaggagaaaagtcgccttggagaaaaggcgacgcggcttggccccccgaaagatgcgctgggctcggggatgtcccccgggcccgtttgatcctgggcgtcgcccggtgaggtaggcccaggcgatgcgcccgcggcctcgtcgcgagccgcctcggaggatgtcacctgaggaccgcccgagggagtgggcccaagtgacgcgccagcagcagctgtcgcctcagcctggcgagcccgggcggcctcctcccgggcagcttcttcggcttggcgagcccgggcggcctcctcccgagcagcttcctccgcttggcgaacccgggcggcctcccgggcggcatcttcagcttcccgaaggcgggctgcggcttcacgccggtcagactctcgcctccgctcctctgcggccgccggatcttcggcctcggactggccagatttggggcggcgggaggaatgcgacgggacatcgctgaagcagaagaaaaaaccgaaagacgaacaaaatgagtaagaaaaaacttcttttttgggaggaaaatggttgcaatgagagtgagacgaacctgcgagggggtcggttgaatgaccaccttggaggggaaatcaggtttccccggcatggttccgtctcccccgtcttgcggagccgcttcttcttgcgcaccccctcgggctgcgacgtcggcgcggccccctccgggcgccgactgctggcacgcgccgccccgccccctcggggaggagatgtgggaggtgttcctcccagcttcctcttcccctgggcgtcggcagggcggctgctccccgagcccccgacgcggggcccagaagcgcgaccccctcctggggcagattgttccccccggcggcgctcgctcgcgccgtcgtggtccttaggggctctctcctctgaggccccgacccccatcataatggttagaatggaggcgcggtcgggatcgctgcagagggggaggatctcctgaggaatgcgagacgcctccgcggagctaagattcagcaccctttgaaccacgatcttgaagtcctcgggagcccaatcccatctggctccctggtgggtccgcatgtagtcttcaggcccagtgtactcccaggcgctccgggcgcgccgttggagcggcgcaatccggcgacggaggtaatcgccgtacaccatggccccggtgagcccctgggatcgcaggcccgccaggcggtcgaggacggcgtcgtactcttcccccagatctaccggcgcccgccagctggagacctgcgccgggggctggctcggaagtcggaggcgcgcttcgtcggcgaggggggtgtagaaccagtcgctcttccagtcgtcccacttcttgcggaggacgcaggggatgtagcggttcaacaccggcccccgcggctggaagtagcagccgccgaccaccgacggcggtgacaccgactgcacggtgaagaaccaccggaacagctgaagagaggggcgcaccccaatgaacatctcgcacaggtgcgcgaagatggccaatgtcatcaccgcattgggggtgaggtgcgccatctggagatcgtagaactccaggacatccatgaagaaatgagaaaatggcgggaccagcccagccattgcgaaggggaggaagaagatggaccgccccgggtagtctggtgccgggcgcccctcgcccagcatcactatctcccgaccggtggcggactcaggcatgaagcggcgcggcagtccggcgtgcctctcgttcacgatgcgggaaggcggtagtacactgccgtcgagcagagcagagccccgtgccatggcggtggaggaagagatgattgagaacgagcgcgtgtggcgaaagtagggcgtagcagagaaagagttagagctcaggcggcgaaggcaagaggaacaatggcgaaaggaaggaagcaaatccttttctcgatgcttttatacccttgccatcgctgggcctggctcctcgtttctcgcgcccactacctcgctccctcgtatctcgctatctcgctccctcgtttcccgtgcccacgcttccactaatcccattcgcccgcttacgacgcatgaagtggatatgcggttgaggcgatcgaaacggattgtatcgtgcgcgcgttaattacgctcgccgaccgaagcggcgttgccgtatctccgggcgagacgaatctgctcgcccagattcgcgcgctgctcaagtggtgtggcagtcttgaatagaccgcccattatggacaaccaaagttaccaataccaatgtgcatggattgagaccgttgggtattttgcccaactacggagaccggtcccacccgtcaccaggctttaggggtggcgtcacacctgaccgcttcccttgggaagggaaattgctctggcataacgccgggggctactgtcggtgatatgggaccgggagtatcatgaccagaggcttgaggtagacgcaatcgcccgcgtggcctggcaccttcggggacgtcgggcccgagggtgaggtgtccgccctcctcctgatttcccccgagggggggtcgggttacgcttgccccggccccgagggccgaggcaccccgaccccttaaagaagtctgcgccacatatatgggataagtgagcacagctgtgctcacctaacagcatttattacagtctggtcaagcgtgtcacgctgcatgtaacgcagtacagcacgctcttttatccggtctgtgaccagtcacagaccggtcagatcaagggttaggtggcgactggcggtctgacgcacgccttgccccatcccgtcaagacgaaagcctctaggcaactcgtctcaagccggagctagcgtgttatctcttagagatggcacgttagccctggttagatttataccaggctttatcctaaccattacaggcaaggtgttacacgaagaagggcaaacatgcatcttgttaaactgacacatggtggacaagaatgaccagtctgacactggtcgcgtcagcaacgggcagccacgatcccacgttgcgcccgtctccgccgggagtggaggtaggtgtgggctgtcccatcgaagtgtcattcggatggaaaccgtaccgatctccgcccattaaagagaaaaagaacagtccagtttggaaagagaaaggtgcatgtggtatccccttgagatataaaaggaggaccttgcccatttagaggggggatttttttcccggattgaaagctgagaacgggggagaagtcagcggacactttgtagctcgttcatacacagatccaccaaaacacaggagtagggtattacgcttcgcggcggcccgaacctgtatacatcgtcgtgtctcgtgtgtcttgccgacgagtaatctgaccacatacagagagagtgagagcttgagatttcaccctaagcccccggccgaactggcaaaggggggcctgcgcggtctcccggtgaggagccacgagctccgtcagttcccaacttcaccctactcgttttccacgcgcatgctttctaaaccgcaaaacaatgtattttttacaaaaagaaactttaggaaaattgctttaaaaaatcatattaatttatttttcaaacaaagctaatagttaattaatcatgtacgaataagtcactccgttttacgtgcgtgacgaatgatttccaactcagtttgtcaaactcatcctaagagtaagtttaacagtatagcccactactaactccaattcatctatagccgatctaatagccaattcatacaatagttgctttctatactattaatatatggtcccacctctcatacacacattgcgtcttgaagtccgtgctacagctagctacagatctgtagctcgctgctcttctctctcatcttttatctcattaaaatatgtttatagttagctaatagtctgctattgtatctgctctaagtgatgtgggtaaatccacaatctttcatggcaacgaggtgttcttttatacttttgatgcttatggattgttgtcagagatttttctttcttaccttatggttatgttgactctttcatgatcaggatattcatgtaaattgaacatcgttttacattaaatttgttctaggcagccaccatgaataatcattgtatacgctctgattagttgtcatcattgttagacatgcccagacttaggagtctatcagatttatttgacagatgaaaaacatttctaaaacctaagaaatatacatattgattggtatagttcatgacttcatgtgattaaaatttggtgatgttatgtacctattgtattgcagtggtttggtagactaatagttctcatgagtcgtgagaccatcgagccttagttccgtcaacatgcaaatccacgtgtgcaatcatagcgagagtaaatctccctcctagagagccatcacagtggtggtgagcatcccaacggaacggccaaattaggctctttaaatatctatatagccagctctccaactaatttggacagtcaaacttgttacttactcaaacagcctctccatatacccttagtattttgagcctctgacattaggacctatatgtcagtctctactatcccttcttcctcctcttcctccccctcttcatcttctgattttatccaccccttcctcttctgatcttcgcccttcaacggtggtggcggcgcatactacagtggcggcagctgccgcagcagatggtgacgatgacggtagatggcaactgcagccccacgcgaaggtgacaaaaatcgcgcggaagcagcagaggtcgcaccctccccgaatccacgtctcgctggccgaatccggtgggggcggaggccgcgtgcctccctgaatccacaccgcgtaggcctaatccaacaaggacgaaggtagtggagaccgaccggatggcacatatgacggctggtgatgacgacctcggcaacgatggcagtggctggcgacgatgacctcgacgacaatgacagcggatgacgatggttggcgacagagcaaacaacgacagtgtcagctggcgacgaagatcttggcagtagtggcggatggcgatggcaatctcgacaatgcaggcgcaacggctggcgacgctgcaacgacttcagccggcggtgggcacgggcggagatggggacgacgacggcgagctctgcgcagatccagcgtgatggcgctgcagaggggaggcggcatgtcccggcggcatcggacaaggagggaggttgagcgtgagagaggagagagatggtggggcaatgtttagcatgtcttttttggttggccaaatttggctagtgagggaggagtttggctagtcatttaacttggccatccgagtagaaaggctattggagtgcgattttatgctaaacttgtcaaatttaacttggatagtctgttggagacgctctaaatatagtgtctgtgagtctctgagagagagggtagtaaatgtttgtctagacctgaccatcacaacgttgtatagtttctttaggcagttttcataaagggagcaaataataaatatttacattgagaccggtaaacaaaaaatcactggcttgctctattgcattttgttgggtctaacaattttggtcttatcgcccatgatagctcttgcatgagacctaatttcttcaaatttccctctcttttctccctcctctaagtaagtatcaggctaaaatttttttatgtgatagtgcaattaattatataaagatatattaattgtgatattagaacaactctaagatcacttgaaagagaatgagaattaaatttgaaaatatattgttcattcaattttttctcagaaatatttgggatacaatttattttgaaaatataccgtcgattttatacaaccgttggacgtaacgtcgagggcgcggtatcgcgaggtataagcgcgagaccgcggtctcgcgcagcaatgacgcaagaccgtgcggtcttgcggaatggaagagcgagaccgaacgatcccgccaaatcaaacagcgacactgtccaatggcttcattttattagtgattaattactcaattaacaattaattaataataattaatgactaattatcttgattagcgattaattaatccagaataattgatcgctaattaaatcggcatgccacggtatcgctcattgcttcagcgagaccaaatggtctcagtctttctttccacgagaccgcgcactctcacactgttcatgcgtggtctcgccttttcaccgcgcgatatcgccctcgacgtcactcccacatcattttcgcgcaacggttgtgcgagaccgacaatatatttctataaaaaaaaattgtatccctaatatttttttaaaaaaaataaatgaacagtatattttcaaatttaattcaagagggtgattcggtagtttagaacaaataagttggccaggcgtcgctaatgatcttgtctataaccgagtgccagatattatacgtagatggatttaaaaagaacaacaaaacaatgtcactggcatgtttaaaaatatggatgcgagtgggacggataagagcatcaccaacagatgctaaaaatctaccctcgcaattttgtttttaagattcctaatcatattttgagatatgaatagattcataaatatcttaaaaatctgattctagaaaataaaagtgggtccacactaaactaccaatagagatcactctcccctccgatgtacgtgtgtgttactggtagccgatgtgctcccttgttggtggagagcaagaaggacggagaaagagattccaattttaagaaggtactttggaaaattagaaaaaaaaattgaaatcatcttttaagaaaaaactaaaatgttgagattaggagttaaattaggcatgtgttagcgggtttctttttcctgtttattacaataatggttattgttttcttctaaattatgtattggcgaatagaaaatgatatcaaagccggggttttttcaggtaacggattttcttacttgcatccctatttaaagaacttggtacgatcatactgtatcggggaaaaaaacacaaagaattcagcatacagaacgtggtaaaatatgcacgctgagggcggattgcggaggacatatggactttgggggtaccgtttaattgggaagtcaaggccccttggttgcaacggtgagcccatcgcatccttcttgggccaaaataccaggcttaccaggttgcacgcgctagttctgggctatcaaccaatgggaaggacagaggcaccgttgcctagcaaggaaaattgccttgcaatggtagctttagcccctttgatttggaggaaaaacatagtaattttagaggattttaatcctatagaaaaatttcctatgaagccctttgaaacaaagaattgaatcctatctaatcctttgaaattcctatggaatggataatcctatagagattttggaggaaatttagcaagagcttcaatctcttgctaactttccttttgagtctatctctctcatccaattcctgtgtttttcatgtggttcaatcaaacagttattcctgtgttttgcaatcctctgtttcatacttatatttctattaaaatcctacgtttttcctattcctatgttttctcaattctgcgcagggccggtcctgagtttccaaaggcccggtgcgaaaataaacataggggcccttaatatattatcccttaatatattatctaaataattattaatagatctatatatatgatatgctgctgataaatacctaaattacatggagaaataatatttatatgaaaaacctcatatgtataaccttaaatttgtttttgggtacgtatgtatttctagatgcaagtattgatgatctaccaatatcaatttctaaatttcactacaaaacaataaacctaaatgtaaaatcttactaattaattgagcgtgggtggccggatgtgcgggtcactcaagcgcaacctctgtactatacacatctaattaacaagcagaattagaaagctattaatccaacatagccaaattacagatgacaaacagatagcatggaaatttaatttgcaacaaacgagagtaccacaagaacgtggtggtgttgctactgctcacctcctctttcacatgtagtgcagtagaaagcaacctcttcaatattcagtgttgaagatcgatttaaagttttgcacttccgccggcggcagcgtcgtcgcggcaggcgacagccgactgccgatggaaggcgcgtggatgcggcggcgattggaatgtagtggatgggattcctggatggggaacgaacgggataaacggcaggcaggtgctaatgtcaacaacacgcgcggcggcaatctcgcttgtgtatggtggaattgggaacgacgtgctgcggcgctgtgagcctgtgacctatatgatacgatgcctcttcgtgtgtgctgcctttctacgtactgggccaagggaggggggaggtcaggtcggggcccctacgacctgggggcccagatcggctgcactgctcgaccccccgggccagccctgattctgcgattaaaaggggcccttaactgatttatctctatcggcaagacagcttgtacgccgtacgcgggccacaaaaccgtgaccgaaactccaacggctgcagaattttttttatttataattttttttattaaaagttttacaaaaataattttccattttgaaaattaacggaaatagtcgcctaccgcccaaaaatcgccctcccagagggcggcgaaaatgacgtggcagacggccgttcgctctcgggcgacggccgtcaacgaaatttgcaggcggcccccttgccgccctccgcgagggcgattttctactgtgcggggggccgcctgcaaatgggcggcgagggggggcatggaattttgcaggcggcccccttgccgccctccgctagggcgattttgcactgtgcgggggggccgcctgcaaatgggcggcgagggggcatggaattttgcaggcggcccccttgccgccctgggggagggcgattttgtactgtgctctatattttttttatataaatatcaatagttatcaaatctttttatattgaaaactatacaagattaaaatctccaagactggtaaaatacaattttattattttttagggcatatttggaatgttaccgtacaaatattttgttaatgccaaaatataagcaagttttggcactaccaaatatttggtaaggtaaaattgcatttgatcatatttggtttgctgccaaaatgtaaaattgtagtgaagaatgttgtacataatctcaattctagattacgtattaccaattaataggcttccattttcgtgtgtggtgtggtagtgggaaagaagatatgaagaggttgccttcagattgtcaattatatagcgtcgttttcactgcaatatatgtgaactcaatgagatacattattcattagatgtgacaagacgatcacgcgtgggcgtgattcactttatgtcaacaggcagcgccgaaagttgatagtgataactcgagctgccgcttttcatgtgtgctgttgttgactgtgcgcgctactggatatggcactaccgtgaagcgccgaaagtgtgttgttgtgagcataagttgttcaagcaccatacgaatgaaaagaactacgtagacgagacaaacacaagtagtactgcagtagtaatagcaaaagtagtactgctttacaagtttgtaagccaaaagaaacggtcacataaggactgaagaggtagaacactactgacgaggcctcttacccctgtccctcctaccctgcgccctaatgtgcccctgggagtacgtgagtcggtccgggggtacggcacggccaacccgtcctgcctgtacaggtgtgacctctggctgctcctgagtgtgcgcctctggagctcctccaagctgagaggagcctagtacgtcctggtggtctgcaccgtgcaagtcgttgtcgtagaactggctagtaggaccagtcctaccggcgtgagacgaagaggccccagtaccgaagatcccggctgcaaatcctgctggacaaggaccatcagtttcgtacaggtatttaacagtattaataaaaagtaaagtaccgtgtgggtgagggatcgacgctccgtgagaggaagagctggcgaacgcgcccgaagaggtggcgaacgcccctgcggagctcgcggaagggccggtcgtgcctgcgaacgcgctcgaaggcatacgaggtcctgcgatgaggaaacgtgcagttaaaacatggtgacacattcgtgcaaaagctgaaacaaaaatgaactaatatctgggctgaactgtaccgtgcgaaaccggtgctgtaggtcgcactgctccgaagctaggggcgctcgaagacaaacgaggtcctgctccgacggtaggaccgcgaggccgtgggtgtaccggaccagctggaggtacgacgtccacggcgctgcgacaggagaagacgcgcatgaccgcacgcatcttctcctgcatccggtcgaaggtcgacctctgctcaacgtcagtcaagtgcaaacctctgctcaacctcacctggactgcggtgatatcggcactgatatcccgtgccgcatcagcctatgcaagatggaaataaaaaattcagtagttgtcctatattatgcaagataaatgacataattgttgaaagtaatacaaattggacgtaccgccacgaagtagtctcggtcacggtgcgtgggatacgcgtccgtgacagcggcaacgtgcggctctggggcgtctggagtgaaggtcacacgcgcacgagtgcgaggaaggtaccagcgaaggtagtcacggtagttctcctccgtgtgtgggaagagctcgttgatcacctcctctgtagctaacacccagtcgtcaacgtactgctgtacacgtggagcccaaagtgcgcctgctagctgtccccgtcgagtcaacctgtgaagagaggtaaattgtagggctcgatgatgtaattatcataaaaatttagaaatgaacaatccgaactcacgagtggtcggcaggggggacggtcggctgcacgttgcccggaaacacctgcctaagtccgaactgtctcatcacacgctgcgggcagtgaggctcaacgaaaatgtcgaacaccatcggcaggatggtgagccagtaagcctggtcgcgtgtgcacaaggacgaaagtcctagcggtgctctcgcagcgacggcctcttctgtgtacggctcccagatgacgtcgctcggctggagacggtcaaactcgaacacgaagtccgggtaaccacgtctcacctggacgtgagcgtaacgacgctgcaataaacatgatcggaattagacatgttatgtgaaggaaaaaaaaagaagaggactgataaacttataacgcagcgaagttgcactaaccccacgtcgacaccagtaagtccccatcgtgggaccgtcctctggccactgcgcgctgcgaccaaccccgtagggtgcgctgtccaccactggtcgccctatggcaaacctctcggctgcccaaagctgaagcaacataggacagccagcgatgatcgctcccgcgtcagtcttcgtgcacgcctcacagagggcacggtacgtggctgctagcacggcagaaccccagctccactgcggcacgtcctgtggctgagcatccgcgatggaccgtgcgtagtggaccagccggaagtccacagcgtgcccgtgggtgctagtgaacatcacccacccgaacaaccacaacaggtacgcctcaagggagcgtcggaccgagtaatcatcagcgtcagggtgcagaaggtccgcctacagttaagaatgaaatgttagtacaaaacactcatccggtcgcaaataagcatgtatgataataacaacttatttacttacagtgaactggagcaaccaagccttgctaggcccgactgtagagtacggaggaagggtggtggtcggtcctaggtgtggaaggcgcatcacctgctcgaagcgcgcagtgatatcctccttccacccaaaaacaccgtcgacgggaccaactggtgctcccgccagcggtagcccgagcaggtacgacacgtcctgcagtgtcggagccatctccccacagggaaggtggaacgtgtgcgtctcaggtctccagcggtctacaagagcggcaaggagtgaccggtctgcatcccaccgcttcgctgggtcacggtcgtccgccgccgcctcaacaagcctacaaagtggtagaaggcctgccgcacgcaacctgtatagagcaaacttcaaacatcagtgcaaaacaaagcaaagttgagttcaaatgtgaacatacgcgtaccaaggaacgtgacgggggtcgacacgcaaccactcgcgcgacgtgcgtggacggaaggtgccgagctgtgcaccctcgactgctgacaggaacgagcggtggttcctgtcaatcccacggttcaatagcgccggtgtgtcgtacgccatacctgcatcaaataggttgatcagaaacatataaataattagttcaacataagtaataaatgttcataagcgaattactaacacatattaaacaaaagtacaaacaaacaaaagtgtttagtccgaacactaatcacgataacattatgacacaacaccgaatagttcgcaatactactagtacaacaatagtcggaggtactcattacaacaagattgaattgaaattacacgatagaagtatttagtccgaacactcattacatcattttatttcctaaatcgaaagcattgttacaccatggaatcgcctgctgcgcgacgacgccttggccttgcgcgcctgcttgttgttccttcaccaggtggtcgcctaccatcacttgcctgtccagatggactagcatcagcgccgcttggaacttctgcattcttcgggcatttcttgtaagtatggccgcgcagatcacacttgctgcagcgtaaagtcctcccacctgcttctgactcatccatatcatttctgatgcgtctagtttggcgtcgaccctttttcacccttaacttagatggatctggaatataaaaaacttgggcactcagcgttgtgtaagatcctgagatcccgaacccatatatctccttactccatgtatgaaagattgcttctttcctgaaataatttgagacgtacacattgggagatatgccacaatcaccggcagcagcaagaacgtgtgagcaaggaaggtgatgaagcttcggcttcatacaactgcaggtacatccaccatccgccttcaagaaacattcctgcacggcttgcttgcgatagataccacgcctgctcctatcaacacacattatttcataccgatgcacttgtgtgccttgagcaacaactctatgtctccgtgcctttttgattttatcttccatgtactttgtcactacgttgccaaacactatgttgttatcggccatggacggaccaattttcttgtatcgatccctaaagtaggcttgcgtgccgtgaaagatgaattcaacaatagcaaccaatggaagtacccgaactcctcgcattacccagttgtacacctctgccaaattggttgtcattatgccataccgagatccatcggtgtcgaacaatagagcccacttctccttaggctcattctcaatccactgagagaaatttctgatggccgaacctgacctccttctcattgttggtgggtcatcatgtaatgcaccaagaggtatgggaggctcgtcaccttcaacttgtggtctgcgagattgctcatctgtttgcttcgttgtcaactcatccaacttgtcccacaactcattaaatttcttctcttggttctgtgcacagagcctcttaaagagatccataagatgcttgttcttgaattgcttgtagaaatttgcacccatgtgacgcatgcaccaccgactccgaacatcaggccacttagctggaagtcccttctcatcccaaccgttctgcaagtagtcaatagcccgcaacatacccgcatgacgatcatgtataaggcaaacgttgggcctcatacgcaccactgcaatgtgcactctctctaggaaccagtaccagctttcagtgttctcactctctacaaatgcgaaagccataggtagaacctggttgttcccatcacacccaattgctgtcaatatctgacctcggtatttacctgtcataaaagttccatctatgcatagaac

SEQ ID NO: 11069 - DNA, 14654 bp, Oryza sativa
cgagatcgaggtacgaggtgtgtggagggactacgtgatttgcttggtggtggagtttgtggcttgcggggtggccattttatagggggtggatgcatatatgcatggttgaattgaaccgttccaactttgaaaaactagatggcaatttttgcagtgtactttctagccaggaaagtttggcgcacagtacaacgaagacttgaaaccatgcattgacttgtctatttcaattgtgcttgcagaaaccatgcattaattattcgaagtggactctaatttcctttagtctttatatactttgtactacctctctctctgtctttggttctaaaacacggccgggtggttgtttcagacttgtgcgcaatagtaataactagctcccggctagcacctaaataaaatcatatatttttagtatgattttacttaaaatttattaaatagctatctcattgtcttaagagtttgaaagaccaaaccttatcatccccgtgtttttaattatatagttttttaaaagtcacaccagttgctaccccttatgtcatctccttctttatttgcttgctcgatctaccactatttttattcattctccttagaaactttaaaaattggatcttatagtttttagagttttttttgtcacgttgggtttcgtttttataatttctaggcgtcccgtcaaacattgccattatactcctctatagtccgtccactatctcttctctttattgtcattgagattttaaaaatcgaacataattatcgtttgggttcatttttactttctagaagtcccgccaaaccgtcagcggctttgccattgtacttctctacgcctcgcccgctgcctcccttctttattgtcattgagattttaaaatcgaacatgattatcattattttcttttactttttagaaattccgaacctttaaaaattgaaccttgtagtttttagagttgattgtcttgttgggttttattttttataatttttagaagtcttgtcaaacgatgccactatgcttctctacggcccgtacgccgcctactttttattgtcattgtggttctaaaaatcgaacataactatcgttggaattcatttttttatttcctagaagtcccgtcaaccgtcggcggctctgcaactatactcctatacaccccgcccgctgcttttcctttttattgtcattgagattttaaaaatcgaatataattatcattggatttttttttactttttagaagtcccggcaatcgtcttgttcatttgcttcacggccttcctatcgtctctccttttaatcgttattaggattctattttgtgttttattaacagtttttatatgtcgtatcaaccgccaccactctactccattataggcatgttacttaatttatctcgtcatatgttttaaatggtcttttcgttcaatagtctttatttttatcataaattttagttatttataaattgtattccaaattgaaatcttatttttcgttttgtaatttcagaatttttttttcaattttaattaatatcgtattgtgttcttttaatatttttattttttattttcaagagaaaagcccatgcgctacaacgggtgacaactattttagtcttattattgttatatggcttagttatgatgattcatcactgtgagaatttgcttggatctatatatttctagaaaatcataagctgtggttaggagtctgttcgtctaaagttagcatgcgaattttcttatacgactcctatatttccaaaagcggacgaacttaaaaccaactcaaaggatatatattttttcaaaagcgaacaaatttataaaccgactcatacacggatgacgtaccggcaaaaatatcttaaattttttataatagtagagattttttttaaaaaaatagtagaagtagaagagaagattacggacaaaaagtcctttttttgagggaatcgtacttttttaaggaattggacgtttttatttttttttatacggtagaagttttttttctctttttttattttttcttgcctttttttctccgcagatagtcggactttttttatggagtcggacgttttttttacgtagaagtttttttttctcttatttttttctgttttttttccaccggaggagtcagtcgtttttttttttgggtagaagttgttttttctcctttctttgttttttcttgatttttttcccgtcgtctctcttttttttttccaccggaggagtcggagtcggacgttttttttacaatagaagttttattttctatttttttaattttttctcacttttttttcaccggatgacggatatgtcttttcaaaaacaaaagaacttaaaaaccaacttatacacggatgacgtaacaaaataccggtaaaaacatattcaatttatataatagtacagatttcagttgtttcaaaattgtattcctacttgaactctcttttaatttttctaattttggatattattttattttttattctgaattttaattaatcacgtattgggttgttatatggattcttctttcaatatttcttatttttaattctgaatttcagctattttaaaattgtattcctactaggactatccttttcttttctaattttagattttagtttatttttatttcaaattttgattaatctcgtattgggttcttatatggaaacttttttcactattgcttatttttaattccgaatttcagctatttttaaattatatttctacttagattctcctttccttttctaattttggattttattttatttttattttgaattttaattaatctcgtattgggttcttatatggaaacttctttcaatattgcttatttttaattccgaatttcagctattttaagattgtacttctacttggactctccttttctttctttttttttactttttctccgattaatgtaggacgtggtgcctcctttcaaagctgttttaataatttaatagattaagaaagtgagttgtaatttgagtcctattttatcgttaaagttttgctttgaattatatttaaactatttgttttttatttggatcgaataataatattactccgtgtttagttacaaaataattcttcaaacttccaacttttccatcacatcaaaactttcccacacacacaaacttccaacttttccatcacattgttccaatttcaaccaaacttccaattttagtgtgaactaaacacatccttattattgtagtttggatcatcataaataaacttttctatgtatatatatcaacaacctcaaacaaatcggctccagcacaccgccgaactcctccatctatgtgcagtctatatatttgctagagtggaggctagacatagttagaaaaaatatttgggtgatccatatttaaaaaatagcaaaaattacctagtacaaagtagaaaaaagaaaagttgatttaagggtgtgtaaagtaacattttgacaataaaagatggctcaaattacaatttactcttaagtaaacctccttactcatatttggtgtttcagacatattaacacaatcatttaaatgtaactttgacatataattaatattatcaaaaatatctaacaaagttatgcttttatgatttatgttacttcaattttggcaaaattttacacttttgaagtttacttatccaatgtaaataataagtgtcttatgttattacactatataatcagaagctcatcttcaaggaagtaaaaccataccatctaaatgtttacaaagatcatcaagattatttgcatacgaaattctgatgatcaccacgtaaaagggcttccatggattaaaaaaaaaaggcagaaatgatgtagaaatgaccgtttgagggaagcacataaggaacacatgaataagaagatatatcgataaatgattttttacgagactagatctcatgttaaaattcatccgaaattccttctctctccgttttatattataagtcgtttgattttttttagagtaaagcttcttttaagtttaaataaatttatagaaaaatataataatattttcaatataaaacaaacatattattaaaatatattcaatagtatatttaatgaactagtttggtgttataaatattgctaattttttcctataaacttgatcaaacctaaaaactttgactaaaaaagttaaacgacttacggagtataatattaaagagagggagtatgtcctaagccaattcaaaggaactttgtagaattttggatagcgatgactttcgccccttttcccttttctcatcgaagtccgtattgtgttagtttcatcgtcttatctttgcaagcaatcgattggattggaagttattttcgaacgtcctaagctcctagctgtgcactatccctctatatgatctcttattaacttgtctactcagttaagtaatccatgtatgagcaacaaggacagttctaattaagaacagaagccatattcgtcattttctccgaaggagaaaacacggcctcaatacattgttgcctacactgctaagtaatccctccatgagaacaacctgttgactgaagttccatcgctggcttaccggttactactacgcaatgtcaattttcacacaagacaaaacgggtgaaaatcctctgcaagagatgaacagaacaggtccagccttttgtgtggccacaacttgtaccatcacgaactgcatgcgagaattcacgtgtaagtagaccattaggtccagttctgcagagatgtcgacttctaatttgtggatagaaactttcctccaccagttaatcgcaacccgctaatcagggatgactttgacatgatccattgatcagtgatttcattagctttcagctatagaatcaatgtatcattggctcatgtcagttgataattaagtagcaacgcggctgcatctgctttggacgcggtgaagttttttatggaatacgtaattacgtatgtacgaggcaaatgcttggtctgaacttaagaaatgttaggcgggacacgtaggtcacgtcccagtcaacttgttcaggccatggagcaaaccatacgtcgaagaagttgtagtgatccagacatagtcacatgatggagattggagagtctacttaagtagaaactgactggccagtctccaactggtgatactctgctcttagttttatttttttccgaaacaacccgcacaaggtaatgcgttgatatatcaggaaaaaagaataagtctgtagttctagaagactagaaaaaaaaagaaaaaaatagccacaccacgcatcaacgtctaatcctgctactgaaaacaaaacaagcacacgacacgccagaggaatagttcttctgaacaacgtctaaaaataagggaacaacgctaagagcgccgccgccgcccgtcctaaagaaccaggacatggttaatacttaaagaaaccattagaataggagaaatgtaacaacgtcccgagaggaatgcggtgacgcaggcgtcgccgttatcggcccgaaggctaggctttcgcctgtagtttcctactttctcatgtcaatgtgtgcatgtcaagttcaacagacactactagctaatcctcttcaacacgcagccaccgtgtcgacgcctcaccaccggccggccatcgaagaagcatctcgacctctggcgtgctccagattcatccacatgggtgggctggagaggaagagggtcagagagaagatgaatcccctctccccgcactagtccatccagtgtggccatcttgcgatggcaaatcgccgccgcaagaggaccaacacctagagaggagcttgtcgcagtcctcaacgcccctcttatgatgctaccgttgttgccgccatctcgaccaggctgcccgtgtctcctacgggccgcctggtcgcatcaccttcgcctccgtcctcccactgtgacagtctcgtcaccgcaccacctcaccttgccgtgctccaccatagcaggctcgccaccacgccggccatgttccactaatcgtgctccttcatgccagggccatcatcatggtcttccctctggagccccacaacaggtgtcgcactctccacgcgcttcgccggccacacgtcgtcgtgtcggccggcgccgtgcgcttcctcctgtcacagcgccactgtcgaactggatctgggagctctagatccggcaccaccgccactgccgccaccaccttctctccagctgccaacctccaccgccgtctgcgcccctgcattgggaatgccaaatccacttccgagagcgtcggatccattgcgcccttgccgatcgactctagccgctgtggacctgcaacgccatgcgccgctccgtcctctcgtgccaagggcgagcttcgctgggtcacgactcacgatgtcctcaccaccgccttcccagttggccgctcgcctttgcagcagcgagctccggcgacggcgaggcgttgagggtggatggaaggtggcgacgcaggcggctagggtttcgcccccgagaaatctgtgcaagagcgacgcggggagcggttagtcttagttttattattagcctgaaactctgaatgagctctaagtggtccaatgaacactgatcatacgtcagaattcatttttactgcatggtagatatgcatgcaaataagtgctttgatcattattcagagtagtgagtgcactgggttaaggcccagttgtctctgttcattcaatcatcattcatcagcctgtgtttttcgacaggcctgagttttagtacttatagcctcctgtaaactcgtttctgtattataaatacctatttgccttctcaatccgacggtagcaatcctgcctttcgttgagaaaggagaaaaaacacagttgcagctgtttctaaccctctcaaccaaaccatttcttagaagaaaaattaaggactgaatttcatctgaatatggaaaactgtccacacatctagaactcagcttaaaacaataatgttctgctacccattttctactgaagggaactcgcagattttttttccctctttggatgaaataatccttgtactagtaaaccacacattcagaatttccatctttcccggacaaggcaacacacggcacacatggcacatcttgaaccaagttaaattcgtcgacaccagcggcgtgatctacggtgcgtagaccaacgcaactgtgcgtggccacttgcaacccgtagaggacaagggcaagttggatggccagccaagatagactagagtgcacatcaaaatctcgattaatccccacgaagttgcagtaattcggtggctacaaagttggacacgaagcacgagcctaaagggctcaaatggccaaatggtacgatgaaactggaaagtgcaggagaagattcaaacacaatgaaatcgggtacttcatccctttcttcttctttttttcttccctatttgtatttcgtttctgtgtaagcatccagaaaaggaaacaccatgccattaacaatctaagagataaaaataattccatgactgcatacgcagtgtttcccattgtgttcatctaaaaacactcacctcatatattatctggtctggataaaagtgaacaaggttaagagggtgagaagccaaagggtttgtctgtgacagctgataagagcagcaagcaacaggcgattactgctttcttaaccaacaaaaaggattccaaacctgtaagataggacacatctgtcaagcaatatctatctatctatctatctattatattattaaaacaactttgaaatgacgcaccatgttcgttgtgggggttagaaattcccacattaatcggagaaaaagaaaaagaaaagaaaaaggagagtccaagtagaagtacaatttaaaaatagctgaaattcaaaattaaaaataagcaatattgaaagaagtttctatataagaacccaatacgagattaatcaaaattcgaaataaaaatataaaaatccaaaatcagaaaaggaaaggagagtccaagtaaaaaaaacaatttaaaaatagctgaaattcggaattaaaaataaggaatattaaaataagtttccatataagaacccaatacgagattaatcaaaaatcgaaataaaaataaaataaaatccaaaattaaaaaagaaaatgagagtccaagtaggaatacaatttaaaaatatctgaaattcggaattaaaaataagaaatattaaaataagagtctatataataactcaatacaagattaattaaaattcggaataaaaataattcccacattaattggagaaaaataaaaaaagaaaaaggagagtccaagtagaagtataatttaaaaataactgaaattcgaaattaaaaataagcaatattgaaagaagaatccaatacgagattaattaaaaattagaataaaaataaaataatatctaaaactagaaaaaataaaagagagttcaaataggaatacaattttgaaacaactgaaattgaaaataaaaaataaaaacattaaaataacacaatacgatattaactaaaattttttaaaaaaattctgaaattagaaaatgaaaaataagatatcaattaggaatacaatttataaataactaaaatttgtgataaaaataaagattattgaaagaaaagaccatctaaaacacatgacaaaataaattaagtaacatgcctataaagaagtagagtggtggcggttgatatgagatataaaaattgttaataaaacaccaaatagaatcctaatgacgattaaaaggagagacgtcaggcaggccgtgaagcaaatgagtaagacgattccgggacttctagaaagtaaaaaaaaatcaattgataatcatattcaatttttaaaatttcaatgataataaaaaggagaagcagcaggcggggcgtataagagtatagttgcagagccgccgacggttgacaggacttctagaaaataaaaaatgaattccaacgacagttatgtttgatttttagaatcacaacaataaagagttggcggcggacgggctgtagaggggcattgtagcatcgtttgatgggacttctaaaaattataaaaaataaaactacaagtccaatttttaaaggttttgaacttctaaaaagtaaaaaaaaaaccaatgataatcatgttcgattttaaaatctcaatgccaataaagaagggaggcagcgggcgagccgtagaggagtacaatagcaaagccattgatggtttagcgggacttctagaaagtaaaaaatgaacccaaacaataattatgttcgatttttaaaatctcaatgacaacaatgagaagagacagtggacgggccgtagagtagtataatgtcaacgtttgatgggacatctagaaatgaaacccaatatgacaataaactctaaaaactataaaatccaatttttaaaggttccaagaagaatgaatgaaaatagtggtagatcaagcaagcaaatagagaaggagatgacataagaggtagcaactggtgtgacttttaaaaactatataattagaaacacgaggatgataaggtttggtctttcaaagtcttaagacaatgaaatagctagatagctatttaataaattttaagtaaaatcatacttaaaaaatatatgattttgtttgggtgctagccgcgcaattgcgaattgagcgggccacccagctagttctgattaaaacagcacgcagaactggtaacaaatcagagacacggtaaagattaacaaagaaaaacagcagacgaattggccccatatcatggtgccatacctagagtgagctaaccagctaaaacgtacggccaaaagaaaagagagagagaacattgcaatctgcaaggcaacaaaacaaaatcatatgcagagcatgagcgcgtgacaccattctgagaaacgctgagacggctgaactattaatgtcacaactgagcactacatacagaggagctgtgatgacgagctggaatctcatcaatggcacctctggctcacacttgcatcacgatgcagagtcacggcggtttcagggatgggccagctcctacaagaggaaacctggatttggcccatgatgattctacaaaatcagctagtagtgactggtcagtgtacagacaaacgactttcaatcgccttgtacatccagtgtgcaaactgttccggagcagcaaacatcagtggtaggcccatcactgatgaagtatcacaagaaacaaaacgcatacagttgaacttgtcccttgagaccgcaaaggacaaaaatttagatatcacatacaggaagttgcgcgatgaaaagacatgtaacttatggcgctgcaaaatttatctgtctagacatgctgtaaggacaatagctcattcagtttatatggacaggttctaaggcctgcatcaagcaaagacattgtatgcaggttttgtcgaggcagtacatggctgaacttgagaattcagataaatgtgataaatagcatagatctatgcattgtttttaaagaaaatagaggtacatttgtaaacaggcattattatagagagagagagagagatcaacattctaaagattaattaatccaatgaaaagaggcaaaggaaattgcatccatcaggacgaatgtgggatgataagcaaaggagagcacattgcatgtgacgcaacaatctaatgaagcatgcatatattcacaaagaccaggactgccaacctgattccattggaaggcattacaattaagtggtaatatcaagccgaggttcaaagcaaaagccagtgaaaagctggagaggaaatcttttgctcacagggcattttgcggaccacttccactgcttctgcttcgtatcgaaagcaagcaaagcagttgcaccatagctttggatgtagacaaggtcgtctgtgccactgctagcaaatacatcatcaaactcaccaaatccttgaaataatttatgaggcattcgacctacctcttgccattgttttttgtgaagttcccatattccaattcctttgatgatgtcaggtctgttctgttttgcaatcccaccaaccagaaccagcttctccctcaagttaagcagacgtccacaggtgagagagcaaggtgctgggatcgacgattgcattagtgacgccttagaaggcccagcaataaggtcatacatgataatgctatgacgcggttcaatattaccaagaatgcctgtggagtgaattaaacagtacaatactccatcacatatcacgctgtcatcaccccctctccaaccaatgaacacctcctcaaccgcagtcacccatgaactactctgtgagtcatacttgtataaagagaaatcccatcggacgtaatcctctggaacttgcttgcattttgccaatgtaatggtgtaattatgagaggaacgatctacctttatggcaattgtgctgtagtctggaaactttgcaccagggggctccaaaattctcttacaatcttttgtgataggattagatacagaaatggcattcctgctgtcattgtccatgaaacaaactaatccgcaagaagaagagacaaagcaactgctcttatctatgcatggaagctctaaatcataccatttgcggagaatcgggtcatatgcatacccagcagcactttcattagaagtgaacataaagtaccatggcctctgaggcaacatgtgggtccaaagaaacctgcttgagtagataatgtcatgccatcttttgcaaactgctgttgaccttatcatgcttactataggtaaaaacgtgaaaattctctccaggatatcatcaggaacaacagtgtccaatgaaagcaaaaattctttgccttcatcgttatcctcggagacaattccgaaattgaatgcagaaattctaatgtgatcaatagaaagagctgtccatgaagaattatcttccatgacatcagtcatcaagtgtgctagcatagatgacctgaataaaaaaaagttatatttataggacagttgcaaagatcatttacctataaataaataaatggaaaataaaacgaacatgggatcataagctaattacatcagtatattatttcaagaaaagctcggttaatgtttaaccacaggaacaggaagttaccattgcctattgcagacatactaacacatgatatgtaagtacatgatatcctaaaccattttatttcgaaagcgctcaagctatgtcagttactattgcagcagaactcaattaccataatgttagttcatcaatcttctgtgctatctgtaaatggtttgcatgccgtggcacagttggagcacattatgttcctcctagtctcctacccaaatgttataaggaacagatcatataaaatatttccacgggccaccgtttcttcaaaaaaaatttccagttcagcggtattttccgtgcggtttaatccgtacaaaaaatcgttttcatatcaatccaccgaataaactctgaaataagatcatgctgaaccgaacagaacaagccgcagctactccagttagtgatggtacaccgaaatattgctggtttgcttttccaagcagaggctcgcagaatgtgcagcgacgaagcaatacattatcaacaaataccaaacgcaccgccgtcacccacagttacagcgcattagaacagcacgagcaaggccatatcttatcgaatcccacatttctcacaaagaaataaagtaaccgagttttttttttcttcttcttctaattttctcaaatggaaaaggaatagagtaggggagaatattaagtgctcgtacttgcacaagcctccgccggcgacgtctccggcccctcatcctagagggcagaggcgctccgtgcccgtcgccgcgccgtccatcggaagcgagctccgagcagaacctccgacggcgccgacagacgatgctaacgcggcgcaggaagatgccggaggagggcacgaggatgctgcgagggggcggcgcgaagggagaaggctcgtcggcgggcggcgccgtcggtatttggttgcgtaaccggggcggcggagggaggcgaggcgaggctacaggccgggcttcgagaagcagaggccgttcggatttatttatagtgcaaaaggaaaggtggtgagatggcgattggtacacaatgtgtgatgttgacatccacggttaagattaacaaaccgagagaaaacggcgggggcaggattaattagccctatctataccaatctttttcacttggctatatgtatgaatcattgaatcgttctctctctaaaaatagtcttactagtgttactcagtatatatagtcggtcgttactagcgattggaaatttggaattggagataaggttggaatgtggttattagaaacaattgtccttgtagagaaacgtttagagtttttcgcctagctccacagggtggtaggctagctggcctaaattcgaaatctcaccccttttaattatttgatattaggttctttcctaatattcgtgttttttttaacattgtccttttgaaatgtttgtcacttgatttgggttttactcgtattagctttgaattttgactatataagcaaaatggctggaatggctcatttcctaaggctgcattcgttattttagattggaagagattttcagccacacgcaaaataagaaaaacttattgtcaaatgattaattaaatagtattaactattacaaacatgaaagattagatttaattaatgtttaaaaacttttatataaacttgttcaagaaaaatacgtatcatttaaccttttaaaagtgtgtttacgaaaaaaatgagaaagttgtaattgaaatttgaataaaataacaagccataagtctagtttatttttttttcaaaaaaatcctcttttctcatatactcactctgtcttctaatataagagattttaacattttacttgcaaaaaattggaattatttttttgacttactttattatccaaattattttaagcaaaacttttcgtttttttaatatctgtacaaatattttaaataaaacgaataatcaaatagtgcaagcaaaatgtcagaatctcttatattatggaatgggtggagggagtatgtggtcagaaccgattagataactcgttccgtcccctctagctcatccccgcaatgcatcgcactcctcgtcgataccgtactccctcgtacccggcaacaccaacggacaatgtacccgagcgtacacgactcggtccccctcccccggcccggccgtgcccccgcgcaccgatcgatgcgccgagtcgaacacgtcgcgactcacgagcgagcgactccccccgccgcagcccgcaactgcacaccgcaaccacacctcccgcgcgcgcgacccggcgacccgagccgcgcgtcgatctgcatctgcatgtgctgccgctgcg

SEQ ID NO: 11070 - DNA, 3838 bp, Oryza sativa
gctctacctcccttagccattcatcgctcattatggatgttaactcccggacagtttctcgtaggaacccgagttccataggattgggaggtgacaaaggaacgggtggtttccttttgctaaaatagttcagggtattgccgtagtctttgtcaaaaccgtccctgaacataattgtggcacaatccggaacctgaatttcttcattctcgacaaacggctgctcaggaaccttttcatcaatcgagctagcagaagtggatggttcagtgagtggctcgatcgttagaggttccactatcttggacagggatgccttcggctggggttcattgggctgcgtcatgaaggaagtattttctaggatgcgatccaaaattgttcttccttctgacggcgttttgtgcatgaacgaccctccaacggttatgtccagatagaatgcagattccttatccaaacccgtatggaaatattgcagaagcacatactcgggtaaggacagggttggtccggattgtactaaatagtgaatctggaccaagttgcaccgattgattcatttttgatctgcttgaaactaagaatttctactcgaaaggcagtaatacgagtaactggaaagaaggcaagacagaatctgtctcacaacttttcctagctaccgtttacacatccaacggtagaggtgtaccattgctttgctctctcttgaagagagaacgggaacaatttccaccgcacagtttcttgtctcatgccacgaatcttaaggcatgatcaaacttgttcaaagtctcgcagatgatggtagggattttctagatcaaagccagaaaaaggattttccctacccacttattaattcaagacccatttccttacccagtgtattaattggccttcatgaaagaaggggcttattaaattcccccccaagaaccaaccttttcaaaccaaggttcttccttgtccaaaaaaatttgaccaggattccttttttagattaccaggggtaaaggtgaactaaaaaagtaaaagggatccagggttaacctgggttcggaattgatcaccacccgttccccgccaacggcactaggaatggctgttggtattaaatacggttacagataaaatctgcaaccgcacggatttaccgaggagcacctttccctacggagttttccaggggtatcgaatccaaatgaacgtgtatggtcaaatcttcctccggttcatccaaggacacaaagtaaatgataggccaggatagagaggatttactagtgagagacagtatctagggaaagcttaactttaatcctaatgcaatacttcaggcactggcaacccgctgttcccagatgtcgctctagtacgtacccggaaagggaggacttaagtgatctcaagggctgtcaccacctctacacctacctcaaacgtaccgtgggatacgcagcaattactggataacaattacttaaataccacgtctaagcaattaatatctactttagtgtttataactcatcaaagcaatcactatattttagttgattatagtgaacaataatcccgtatgctatttaggaactaaccaagagataattctcacaagataaatctaaattattcaagaagaatattatattgaattcagagtaataaatagaataaaagaaataggagaagattaccgacaactccggaattcttccgacttcttctactctactctcttcctattctagtgtacaatatagtacaatagagcctcttataattcagctcaagcttggaagtgtgtgtgagagtgaatgaagtgaggtccttttatagggcagttatgacggttgtgagaaggggaaatgtccgaactgcaccgcaaccgtcattggagaacatctggagcatccacgccaaaccccaggatgaacggtgatcgggggttcggccgaaccagagggttcggtcaaacctgggctgggccctcctggcctggccttcggtcggtggactctcgggaccttcctctattcatttctcggagttttcggttgatttactgatgtttcgatgaagttcacaaccctacttgtatggatacataattctcctcactttagtctgattttcctcccaacttcagggtttatcatctgcatacaaatatacaccaacacttgtggaatatgtaagattaagcacctattactatgttggatgttttattatctagactttatgaaaatgttggcggtatgggattgtcatttaacaaccgccaacaatggggcatggcatcgggtccacgagattgatcgccgcagactaaggctatgttcgtctgttcgctggagcctgttcccaactggaacagtgtgcacgaaaaataaaacggtccattaacaagtgattaattaagtattagctaatttttttttcaaaaatgtattaatatgattttttaaacaactttcatatagaaactttttacaaaaaaacacaccgtttagccgtttgaaaagcgtacgtgtggaaagtgaggaagatgagttgggaaacctgggctaggaacacagcctaagggtctgaggcagaagcggaggcgaaagtttctctttttttttcgtgaagtactttcctccgtgtgctgtgatgagatgattaaagatcaagtttctgccttaatttctcaattggagcatgatttttcattagttccattgttttcagaatggtaccaataatgttagaaggtgctttattttatacctagaaaaatgtctgttgtagagaaatgaagaggccatggtaggacaccttgccatatattttttaagaagaatggctaatatgcattggctagggtttaatatctaattttattggcacttgcccttaatggaaaactttgccttgtttaaggggaggattaccttattttcttttttggagcccacctttagaataaggaatttttaccgttcttttgataacttattggggacaagtaatattttaactaacaggtgcagggaccacctaccaaagtaatttgttatggaaaagaaatagggtgtttttggggggtttttcaaacaaacaatgtgaagtacctactttgtaatttgccttaaatatatggcataatttgaattaaagctcccattaaactgattatttttactaacacaaaattttagtcatttattaaaaaatattaaagatcgtagcgttagcacgggcatatactagttttaaagatagaatgaggccgaactaaacaatgctaatttaattagtgaaaaccgaaacaacaacagggaaaaaaacaacctaaatactctgagcaacagccacatgactaattaataagctcaaagcaaagcatactccctacacaatgccattgacattagaccatctacacccccccccctcccggggattggacaaatctagcatccctaagaagcacaagtgaacaaggtcaacatcctaaccaataccaaaacacaaccccattggacttagtgttattgttgccacatgttgcccccctcccccttcctcccacgtcaacgttgcacctctaacttcactaccaccagctttattgaaatatgcgtaagctagattagcaaccagggagcagccaatcctacaccctattagatgggagtgctaactcaaccaggaggtgggaggtgtcatcatcttgttagatttaattctcaggatctaatttgcttagcttaacacatggtcacaaattctaagtgtggaattgagatgattactgaccggatgaactgaagccataagcttt

SEQ ID NO: 11071 - DNA, 1150 bp, Oryza sativa
agcatcctagactgttactttggaggttgccgcctcctagacggcttgtggaggtgttgcccggtgacctctccgaggagattgtggaggaggcccgtccccgtttgtgagtggtttggagttcaccaccctcggagtgaaggaagaactaccccgagtgatcgaggcttgggttgtcctctccgtgggccggctcccgccttgcccaccccttgacgaagggggcgtgaggtggcttcgtggttgaccggtgaagttgggctcccctcaacggggattaggaaaccggcgagtttccgaacctcgatgaaaaattccttgtctcttgtctcatttatttgttgtatttacatttgtgctatttatattcatagagacatatttgagcccatatcacttaggtttgcaaaacttaacttagttgcttagttaaccttgcacctcaccttgcctagcaacttaggttagttttgtttaagtgtcattaagttttaaaaccgcctattcaccccccctctagtcggcctccttatcctacgtgggtttaggaggctgattgtggggtcttgctggcacggttgaggtcttttggccagttgagtggtggcgtgctgggctggtggcaatggaggagacagcgatgacgagaaacatgcagtaggtgatagtttaggcgtgtcctgctaaggaaaaaagtggaaggaattagggtttgagtatacgaagcaattgttcaaaagttgttagattttgatgggtgttttttttcatcaaatgtataatagacagactcataaaaaaggaattgattacctgtattcgatggaaaattaaaccccaaatcttgcatattggactaaaaatcaaactccaaggacccgttcgttagtcatgcagatgaggatgtagacgtaggattcatgaaattcggatgagacttcctctggttcgggaacataacagtatcctctcgcgtcgtcctccctaggggcggcacgggaggtgacgacccggctgccccttctccctcacctccctcctccgcctcgctgccgcccgagtggctactggcgcacggccacaaggacagtggcggcggggcccctctctctcgcacgctcgggtgacctagggagtcacccagagaggc

SEQ ID NO: 11072 - DNA, 2508 bp, Oryza sativa
acaaaacagaagttgcaaattgagttacgaattgcgctgcatgaatgcataggacaaaataaccatacttgtttgattaagaaaacataccagcaacaatagactttttaaatgtctctagcatgaagaaaccatgaagaaaacatcgtgcgtgtaaaatttatatgaccaagggccatcatcagtgctttagctttagtggcaggcctggaagaggaacatgagagaggacaagagaggcactatgccaaattgtcacttaataggatttaaatcctggttccaacaagtgttacacgtatatgtctgattaacaggaatttattaagacgaggaatttgtcactagacttcatctcttccattatcatgtgttataagaggtatactcacaggtatttgtgcacagcttccatgtaattaaaaaaaaggcactatatagtggcaaattcagagtaagggctcgtaactagcgcgattcaatgtcaatctccaacctcacaattacagtgctcatggtagtaagtttttgttatttacactgagatacacctaagagaggttttccattattgtacaacagtaacaacagctggatggcttgctatcaatttgagttttcactgatacgctagcattctgcagagaacaaaaaatatgtcaatagagcatgtgccaccggcccaccggccaccgccccacatgaaagtattgagttatgaatcgctagcataacagctggggctttcacttatgtgctgggatttctacagagatcaacaatgccaacagagccatgtgaaaactgtgagagttttaaactataaattgctaacagcaacgtccacaaatttccaccataaagcaggaccggttttatgccttccagacaggttcattgtttcgttgaagacgccatgctggagagcgaagaatgttttgtttaagaagctagagtagtggggagtgctttggagggttttctacctgtttatttttggttgcaaagtatgttgttgcaaggcacatgatctgtcttagactgtttcaccttttattttattttcctattttgactgggtacattttagtaggtgcagatcgagtttacctcacttcaaaaataatattctattctgtcaagagagattctgctggtgtcttccacggatgaaaagctgatgttaaaaaaaaaaggagttcctttaaacaggtaaacatgttcagatattcaggcaactttttgcgagtttgccaattatgcatgacttcaaatttgcccaccgtgtgtaagggtatgtactattagagaaaaacaagtacggttttttaatgattaaaaaccaatacttgacagtcttgcaataatgtggacggcaaatagaagaccctgaaaacatgggaatgcaataagaaaaatacttatatattttttctatttatttaatgtatagtgctcgtgtaagttttataacttttcttttgaagtgcttgagcctaaaatctaccaggcctagcaaatatatgtgaaggaaacatgaccacgatagtataactgacatgaaaccaaacagaagttcttaatctcacatcaaattcgtttgatcaaaataaagaagaaacttatatattggaggaacacaaaaggcactggagttgaattctatcttacatggccaacttatgttgaaaaggagaaaattacttcctcttgggtgatgttttgctctcgaattgttaaatttagatacaacacataattgaccagtaagttgatgtcctgctaaatgaaaggatcaatgctactgtgcaagaaatgcaagatgaattgggtggttcaccctctagatagtttcaacccacgagaaaatgaagaattataattaccagtttaaagagaaagatatttaggtgccaaacttccagagttaaacagattatttcacctgacaggactcctcctagcatgttgctggcaaaaaattgctcatgtagacttgtgcgagcatttcaccaagctttacttgtgattcagtggtaagatgcagatgatcttcatttaatgacagtccaaatgcgtccacagttacaacattgggcaggttgataccaagctgagctttcctcactttttcaatgttctttttattcccagatgcaagagcaacctgtttaatgcaaacaaatcttgatataaatgataccccatattacaaatgatatcgagtacaaataaagggtaaggttggttgacacataagatggcatcgtgtgtgtagaaagagtgaaaccagccatcttatattggtaactgaataaagaaaattcaaggttcaaaagaaagattacagagccatgcaaaataaaacatattagtttactagttaaaaccaatcagttatcttgtactgggggatgtaaaagagggcctgatgatgtattaaatcgaaactattaacttcaactttatacatcccttaaagcaacatctaggcacatgtataatcgt

SEQ ID NO: 11073 - DNA, 2917 bp, Oryza sativa
caggttttagtgggcaagtaattaattaaccaatcacgattgaccatcgtgaactatcattaagccatcattaaataatagtgaatcttaagttatcccaatagtgtgctaatgtttctaagcatggctaagcaatcatatctaatatctagttgaaccaatatatatatagcccaactagtcaagttgtaataacccaaggtatcaaggaataaagtgatcaagaacaaaaaaggctataacaaacaataggttaattccacccaatgacattcgaaaataaatgcaatagttgaatagaaacagtagctttaaacgggatcaacatgctcaaagggttgtttaggatctgtgtgacttgccttgctggccttggaactattcaaattcttctcctgcgaaaacggactctccggaaacgtcggaatctaaacaggaaagagcaaaatcaccaaaacagcacataaacaagcatgaacagtacatgtggatatttttaacatgtagatctcaattttagaaaaatttagagacttgaaccaactaaatccgagctaaaatgaattagttatgaatttttgaagattaaatcggattaaaacacttatatggattttaattgaattatgacgcaataatgaattatttttgaaaaggaaaaggggtttattgcgtcagcggctagggtttgcgggggaccgggcccccggcaacggttcacgggaacgaacggccgaaatcgatccatccaaaacggacggccgaaatcgatcgggtctacggcggctcacggcagacggcccccatgacgtcagcgggaacgtcacctccggcggcggttggggggttcaccggttcgggcgcgcttgctcgccggcgaacgacggcgcgacaacgcggacggagggcaccaggacgtagagcgcggggcggcgaactcaccgatgaccaaaacgtcggcggaagatgaacggacggcggcggcgacaaaaaagaagcggcggagaccttcggcttgacaacaacggcggtgctccggcggtctacagcgacggcaaaggggcggacaaggacggcggcgacttggcgaccacgatggcgacctccccgagcgatgacgacgaccggaacgacggcgaagcacggctggagcgacggcgacaactgcggctcgaggttacacggcgctagggcgcttccgacggcgagagacgaagacaatggtggtggcgggtagcggcgacaccggggatccttttataggggcaaggaggcagcggcgaaggcccacggcgaccggcgacgcgaaagaaacattggggttcggaggaaagagatcgatccgattcgacctcgaatccagaactttccaaagcgatttagccgatgattccaaaagagaaaaggtagaggagatcccgaagattgtttcccctctattgatttcaccggatcgggaaagacgcggccgaatttggaaagcgggcggcgggcgacttgccgctagggtttccggcggcggcggccggaggtaaacgaagactgacaggtgggccccacctgtcagcgggcggacgcgcgcgcgcgagcggcggctgctgctggactgggccgactgggccggggagagagagagattttgggccgactttcggcccaaagccaaaagagacttttaaaaaacctttttcaatttaaattattcatgaaatgcaattccatttattaaaaatacttccttagctcaaataaatcccagaataatctaggaattatagaattaagcaaagtatttaatgaaattttatctggccccattttatattggaatctattaattaaaattagatttctcttctaggcttttaaaataaattctaataattccaattaaacaacaatttatatattttggatttttagggtgtgacaaacctaccccccttaaacagaatctggtcctcgagattcggaagaactggcgaacagatgcggatgagctgacttcaattcatcttctcgttcccaagttgattcttcttcggagtgattactccattggacttggcaaaaacggataactcgatttcgggttcttctctcatctatttccaaaatacggattggtttctcaacataggtcagatcctctgggacttctatctggtcaagattaggcttcttcggtaggtacccttaaacactttttcaattgcggacaccatggacacacattagggactccggccaaagattgaggtaactctaactgataagcaacctctcctcttctactgacaatcttataaggtcccacaaaacgcggtgccaattttcctttggtgtgaacacgatgaactcctcgaacaggcgtgacacgaaggtacacataatctccttcttcaaaactcaaatctctgcggcgattgtcggcataactcttatgacgagactgggccacacgcaatctttctggaatgatcttaaccttctcttctgcttcccttaggatatcagtcccgaaaacctgacgttctcccttttgatcccacaaaagcggagtgcggcacttccgaccatacagtgcttcgtaaggagccatctgaagactagcttgataactgttgttatacgaaagttctgcataaggtagattcttatcccaacttccaccgaagtctaaagcacaagctctcaacatatcttccaaaatctgattcaccctttcggtttgtccgtctgcctgtggatgataagcagtactaaagttcagcttagaacccatctcttcttgaagcttcttccaaaaatttgaagtaaactgactgcctcgatcagacactatttttttagggacgccatgcaaacacacaatccttgccatatacaattccgccaaccgacttccggaataagt

SEQ ID NO: 11074 - DNA, 946 bp, Oryza sativa
cctgcagcccatataccattccaaaccacgaacttaaccaaatattaaccggtaatagcatttttaattatgatgagaggggtgaaactaatcacaaaagacattgttagacccgcccataaccgcgggcacggctattcgaatagttttactctgatcagaggtgtaccactgtacccacaagacacagccccacatcatgtcaccatgtgcctcaataccaccacggtacctcggaaaggagctgtgacaataccctttgcacaacacaatccactacagcgcacctttcctggatcataatcacccccttataaacaaggcatggactccccagcgacccccgtgggcttatctccgccacttctcagtctggtgctccgcaatgaaccatgctatacaaaaggtaaagccgttgcccatgctggcttgtggttggcacggttaatgtttcacaaccgaaactcgtgaaccggtccttaattgtcatgagcacgactctcaaaaccatgtgctcacaacccaccattatcaggttttagttggcaagtaattaattaaccaatcacgattgaccatcgtgaactatcattaagccatcattaaataatagtgaatcttaagttatcccaatagtgtgctaatgtttctaagcagggctaagcaattatatctaatatctagttgaaccaatatatataaagttcaaccagtcaaattattataacccaaggtatcaaggaataaagtgatcaagaacaaaagggctataacaaacaataggttaattccacccaatgacattcgaaaataaatgcaatagttgaaaagaaacaatagctttaaataggatcaacatgctcaaagggttgtttgggatatgtgtgacttgccttgctggccttggaactcttcaaattcttctctggcgaaaacggactctccg

SEQ ID NO: 11075 - DNA, 4320 bp, Oryza sativa
ttaccatccacagaccagtggtcaagcagaaacatcgaacaaacaaatcaagattattctgcaaaagcggtcaacaaaatgggaacagaatggaaggatagattgcagaacgcactgtgggcataccggacagcatacaagacacccattggaatgtccccatatcagatagtctatgggaagtcatgtcgactacccgtagaacttgagcatagagcatattgggccatcaggaattcgaacatggattttgagggagcaggagaatggagaaaaatgcagattgcagaacttgaggaatggagagaaatggcttaccacaacgcaaagatatataaagaaaggacgaagcgctggcatgacatgtcataggctctccagaccttccattatatttgagagatgaagtgaataattcaagtcatcaaacaagcataatgaaacatccgacgcctcgagagaggaatattggagacattgctgggcccttagcctgccagtcaacttcagcctgagatgtgcccgtcaaaccactcgaaggcggcgatcagatgtgttacacattcaggagacttgacaaaaatggctaaagatctgcaacctcccaaatattcctaactcatactcatgtgaatctagttcccaggatgtgcactagattcacactttcatcttaagcatgattatacatagcaaacacaaataagatgaaagcgattataaactacatctactttagttacattggccaaccggccaaataaatatatagaacaacggaagcttgtctacccaatccacaagcacaccgactaggggtttaccccattaagttcaagtcctagaagaagcagtcgattacccgcatcactcaaagactaagactaaaacctgcaaacaaaagattaattcaatagcaagagtcagtacattattagaaataatgtactggcaagcaccaagacaagcctaacaccctactggtaatatggatagtctctgtccctgtattcacattccaccttcaacaaagtgttgatttcccgtaaagctaactgtagtcctttaagtaagtagatatcttaggcttttgcaaggcatataaccaaggaaggcataatatggttctttttagcataaagcaagttttatttgcataaaacatttctaaatcaggtttactttcaaataaatttcagcaaactagtacttgacatattgggcatcaaggtaggcattaatcatgtataaatatgcacctcattgccttccatggcagcaaggagatcattctcaaatctcatcacaatttgaaggtaaatttcagcatttagaagaataaacacaactctacactcaatagatatccacacgccgctcatgaccgcgagcacggctaatcgattagtttaaactctgcagagtttgtacactttacccacatgatgtgaaataataatcatgcaagagcatggcacgcgatacataagttcccgatttattacccgcaacaaagcttttccaaaattcatgatttagccttacaccagcacgatacgtgttactccatcctaagccatacacgttatatgacctagaaccgttaagtggcgggcccacgccttaaacttaacgccgtggtggcggacacaacgggaacccacccacgtggcacaataccgttgtattggacagacttagtcacctaaactaccacgtcggggtaaataggaagttcctctgagttatccgaactcatacacaccggcctacagaatgtaaggctaaaccataaataatttactaagcttgggctatcccatactagcacatgtggttgtactgtatacgaaatgaactgacattgagtgaagtccttaggtcggtttgggcacactctccccctatcggtacacaactaatcaccacatgtgcaccacttgaggcctaaacctaaaatccatgttttccacccttttatttattcaaatctccagtattaaaggtctgcccagaataaatataaatcaattttcaagtttgtaatgagcccataatgtcaaggaaggcccttcttagcaagggttagctttatagtaacctagtgtcccccaaactcatataaaaagtgggatagtcataatggtcctaaggttagaataataggataaggatataaggtggggtaaggttataaagccaaatataagaatttgtttaaccagttaacccccattttaatttgttagtaaaccattgacaagcaagaattggcaaccatttccaataccttccaaaacataggttcaaagtgatcaaagaaaggaaggtgggacttgccttgaatcaggaaaatgtcagcacctaaatcactttttcaccgtttaagccatcatctataccaagtacacgttatgccatttaaccccaaaatatgcgtaaaattttaaatgctctaaaatggatgatttgtgcacagtgaatagggactggtttaaaaagaaattaggtggaagaaattccaattcatccttttttaattgggagttatgaattttacaaggttcatcgggataggataagaattatttaaggactaatgtggaaagctggtgtaaggttaattttaattaggttaaggttggttaatggacaaaagtggttttttaaaactaccccattgggttcaccaattttggaagttaatatgaattctttatgcattttacaagttataacgtgttacgggtgtatagtgttatataggttcatggctttagaggtttaggtccagaacttgcctcatctagctagtgatgtataaaatgagtattttagttaactaatctaatcttagttcataattttagagtttatattattttactacacattttataattagggatgttctatgttagttacttaacacaccaacctagaaattgttatatgagttaagtttgataagttttggtggaaggggatggaactatgcattcactggtctaacaagttttatttgggtttcattatagctagagtgtatttctatatacatttatatatatacatattgctcaatcaatactatgtgattagtacctatcctataaatttaaagtttagagctataacctgtacagaaggttccatattttattttaatatgttgaagcccactgtttgctggttctatagatatttggttcacttcatttagactaaagatgaattttctacaaattttacaatttaaggttgctctatgttggttattacttacataagtatttagaggcttttatcatacagtaagtatataattttattttataatttggaagtatatgttttggtgattctacaaaacttgggtttactcaaaaaggatctaagatgaattttatatgaacttctaaagttcagcttatataaactagttttttttaaagataatagttttagaggcatttgatgcagaatgtgtagatgttttattttactttgtttttagagaaaatgttggtggatctgtagaaactaagtttgctctgaaatgagttgaaatgaattttgtatgcattttataattttgagcatgctttatgtgtgatttaatttggataaatttgagaggctaaatttgtactgtgagtgcaagttttgttccataacatcaaagttcccaatttggtgagttcacagaaatttgaatcatcttaaaatgagctatatttaattttatatggattttacaagttttagttactgttcttttataatttcagattttgttcctaggtgtgcattgtcagtcccaggccaatatgcaaaaagacccctagagtttcagtaaataaacccgcagtcctaggcccatatgtcattgagtgaaaacattacataatgaaccttatagttgtttaaattctccaagcgaggtccctgtctccttttccattcgataagcagcagagcagccatgggcggcatctctgctcgccggtgtcggcgacaaacggtgactccgttggggttgcgaccaaaatagaaaatgaagggcatgatattgcgattccattcctatacatttctcagacagcagacatcggagtagcgccagcggcgagtccgagcagaggaagttttcgggtggtggtgcatgtcgtgctatagactggatgtactcaaagggatgcatgcatgtggtcttccaggctctagggtactcaccgcgggttaggttgatgttttccggggtcttggtgacagcaacggctcgcgcatcctcccggcgacggcgtccttctgcgggtg

SEQ ID NO: 11076 - DNA, 3775 bp, Oryza sativa
ataggtcatagactgccctcacagaccacacatgtcttttctgcacattttgtcctcactcgtgtgcacccgggaaattcttccggtcggtcacccatcccaaattgctccaggccaagcacacttaaccctggagttctttggagattggcttccggaaaagaagttgcaacttgttgatatgagtattctattaatcctattaagccctaggccgggatgttacaccctcacccccttaagagagatcgacgcccccgtcgatcaaccctaggccaggaacgtcctctcttggccacgcccatgtgtccaatgacagcgcatgtgccatgctgtgtaaccactccaggtctacaccagccatgcgcaccatgcctgcgcaactgcgatacacgcgcccgtgaaaccgcgagagtcggctctgataccattttgtcacgtcccgccttcccccaagccgggcccacttacatctgatagctttcataggtcatagactgccctcacagaccaacacatgtcttttctgcacattttgtcctcactcgtgtgcacccgggaaattcttcccggtcggtcacccatcccaaattggtccaggccaagcaaacttaaccctcgagttctttgtgcatttggagttttggacttgtattccataatagctcccatgagcataatctaaaagaattatttcactaaacaaacctatagttaatcttgagtgataacatgtggacttaatattaaactcaaatatcatcttctcagtctaaaagaagtttaatgtaatccctataataatattagatgcaattatgaagtgggaacacatatacaaacaaaggtcatcttaattctctaaaatattttgtgcaagataaaatcatggaaaaatttatgtggacaatgattagcacaaacttatcctccgtaatttggtaacgtgttaacactcaagttgatatctcaaattaatcggtcgaaacagacaactaaaagaaatcaaattaaattttaatcggctaaaaccatatttcatccaaaagtacatttaactgcacataagtgaacatggaaaataatttattcaaatactagattagttatcatgaataaatgtaatttttctagaatttttcttctctgtttaagcctcctaaaaattcaatctagctttctaatagcccatctttgtttaatttctgtgagcagtccacccattatttttgagtgcaaccaaagaaaatggaatctaggtgtaatcatttacctccagtaaaatcaacactaattaatttggtccacacattgaattatgtagtttcaaagttagaggagaaaataattccgaaaattaatctaaaaatcaagtttacccagaatcttacccaaccctctcaccctagcctagtttgccacgacctggacccacctgacagcctcttaagcttgccttgactctgtccatcacttcctccactgttccagccgagagagggagagattgagcgagccgacgcgtggccgcaacgtgtcgtcgatctcggtttcccttttctcgctctctactcctcccagacgcgtcgccattctccacacatcactttggagctgaagaagccgagggagaggttctctgcctctccgtcatcctcaacctcgccgccggtcgtagtgacgacgaccttcgccatctccgtttgagtcaaggtcacctccatctctttcgcgttcccatctctccacacaatgccgagcatttcctcttttgacctaaacccctctcgtgcagtgcatcgccgggaacgcaagccacgtcgacaacgccctggagcacgcaccggagcgccgccgcttcaaccatcatcgtcgtccggccattctcattcacctcagagaaagctgctgcgccattgtcattgcctcaacctcctcttcaaaacgcctcaagaaccccagccggaaacatcaagaacacggagaacacatccttttcttcaccggcgccaatctaggatcgcctccgccgtcatcgtcgattaccgctgcctcggtgagccatggttcgattccttgcgcatacaccatcttcttggacctcacaaccttcgggcttgctggttggaagcagctaattgtcccgttcaagccgtcgtcgttcacccgaggaggagcgccgtcgccgagccgttccacaagtcaccgttgccgccaagacctcgacaaccctagctcgacccacggtgagcatcctgaagtctaaaaaaccacatgcatgcatccttttcgttcgtaatcgacttccatgcgcacatgcactttcaccccaaaaccaccgccgttcacactcgccatcggcgctactccgatgtcctctaaccaagaaaactagaggaatggaatcgcgagagcttgctcttcattttatcttttgacctcaacctcaagcgagccaccgtttgccgccggcgagctccagatcgagctcagccatggctagctctgctatgtctagagcagagggatgacttccgtgaattagattaagtgcagggatccgtttacaattatagaaacacactgacatatgggcctaggactgcgggttgattcctagaaaactcaagggcctttgtgcatattggtccctcacagccatggggacccatcctttaaaatctgaagaaaaattaggaaaatgccccaacaattatatgtttagcagaaaaatgcacaagttgtaaaatctatattaaatcaaatatagctcattttgaagtgattccagtttctgtagattcttgaagtaaggaactttattccggaatataaaacttgacactcactgaacaaataatgtttttaagatttattttagattaggtcatgcataaaacatgtaccaacttattaaataccaaggaaattcatttcaactcattttgaaacaaactcaaaaacttcagattcatcatcagacactttctgattaggtaaaataaaagtaatgacttactttgcttcaaaagcctctaaaactattatctttaaaatgactagttttagataagctaaactttagaaattcatgtagaacccaatttagcttcaatttgaataaacttaagttatgtaggatcactaacacatgtatttccaagttatgaaataatattatatacttgctgtgtagtaaaagtctctaaatattcatataaggatttactaacatagagcagccattaatttgtaaaacttgtagaaaattcatttttagtccaaatgaaatgaacaaagtttctatagaaccagcaaatagttatcttcaacatagtaaaataaaatttggcaccttctgtaaagaacattgatcaaacccttaactaagtgaaataagaatttaaacacatagtgtggtttaagtaatacataaacatgtataagtatatatatacactttaggtctaattaaacctaaataaaaacttgattgaccagtgaagccatagttccatcctcatccactaaacttagaagaacttggctcatataacaatttctaggttaatataatatattgctagtttagattaaagcgtctctactttataaaatatgaaccatagtagtaaagaccataaacatgtgagataaaaatgttttagttaaccaaattattccttttattcaacttaaacatgaagtagcatgttctgaacctataactcaggagtcatacatatataaaacactatatgcctaaaacacgttg

SEQ ID NO: 11077 - DNA, 1109 bp, Oryza sativa
caccctctgatataacaagaccagagaagtcctcatttgcccaatcagtggccattacatcaccttcctcatcggatgatgcgtcgtcctccgcttgctcattatccgaatcttccctctccatttcatcaacaattataccgactctctccccctcatccgccatgcccatggcctgctcctcccttggttgattttcctcattttgcatcgatggtccaacaacatcccctgcattgctaggaccctccacatcttcggtttgcattgaaacatttgtatctttctcttgtaccgacacaaatataatgaggggccatgaccgttcaaaagccatttccacataccgtctccaagcagcagtgctgtccatcggcattagttcccaaaaataaccttctattgcacgactcactacaacagatactgacattgtgtagacttcttggtctattctaaatcctctcaacaaccaactataaattgactcaaatgttctctccgcaggcctatcgatgcccttagatgtcattacaaaatctgacagatcaacaccatctggaccaaatctaatatttccttcaccgtgaactatctgaaatgtgaccttacttgacattgtgcctgatgaaaacaataactgcgttaacctcgcatttctgtactacgccctaagttacattctctacaatactgttctctaaatttctaaaagtaggttacattctccagatcaaactaaactacatcttacaattaacactactgtctatgtctcaattcatactattatattctatgctctggatctacacatatgtgctgtgtgctacagatctgctaaaatatatggaactaaaactaaaacgcaacatatgtactcaaacgtaatatattagtacaaatgcaaaagatgtatgggagcatacctgtgatgaagtgagcgaaccagcagggcttcgccgctccccttctgctgccctcccctctctctctctttcgtttttttggatttttagtgaatataatgaaatttcacaggggaggggctggggtttataggggggaggcaaaaatcgccctcccccagggcggcaagggggccgcct

SEQ ID NO: 11078 - DNA, 842 bp, Oryza sativa
ccctcacaatgggggggggcttcaaatgacgcttcaccttcatagggggagggctacgggattctgctgccccctctttttccgatgccatcaaaggccgtagtaaactcttaccatacccactgccgggagttctcactcttgggatgcggaatcgctcctccttcggagtaaacggagtaccggtgggtgtggtatacttggggagcatctcatctccttccttggtgaacagggtgcccacatagcgctcggcgagaggtggcgcggccttcccgtcatcttggaaaagccgtcgtgccttcaacaaccgagttctcccgttgtcggccgtcgcgtaggtgaatccccccagattttgtccttgtgacatggcgaggggagagggatcacgctgccgaacggggctgagaagggttcggccgaaccagggagctcgtcgatcggctccaaaattgcaggggagcctggcacagctgcaaggggttgagcccatacagcgtttaccccttccatcgtgtattcttccaccgggatcaattgatttgccggtgtcgcctctccggtgaggtcgtacgtggaattggatgaagagccgatgaatgtaatcaaggatttgccagccattggtgggtatgagtgggaattcgaggaattgggttggattggagaggagagtatgcaaaggtggagagaaagaggaagaagaagtgttctagcgagatccgagcgttctacctccaaatgcgcatctaaacaaactaggaacgagcgggggagagcgaagttcaaaaatggggctgatcgggcgcctccctggctcggccgaaccagcaccttgg

SEQ ID NO: 11079 - DNA, 809 bp, Oryza sativa
cgagctcggtacccgagaagaaattagaccatcacatatctgattcaaggtctaaaagtagaagtttgtcattcaagcgatcaattagcagggattctgcaggaaatagtagcaggcattctctagcccttccctttggcttgcctggctcagttgaattgcttgaaggcaatgattcgactgtgggggaacagacagagcagggtggtgatggtgaggtccaacagaaagctcctattggacgactggctagactaaacaagccagaggtaccgatacttttgttagcaacactggctgcaggagttcatggagtgcttttcccaatgtttggagtaatgatttccaatgccatcaaaactttctttgagccagcagacaaactaaaaaaggatgctagcttttggggtttgatgtgtgttgtcctgggtataatttcaataatatcaataccggtggagtactttatgtttggaatagctggaggtaaacttgtagagcgtgtccgtgccttgtcattccggagtattattcaccaagaagttgcttggtttgatgatcctaggaattccaggttggttgcccattctttattgggtgttttctcttcctcctaaatatcaaggaattttacacattgggaactgatgatgaaatttcatcctacagtggagcgcttggtgcaagattatcagtagatgctttgaatgtccggcgtttagttggagacaatcttgcattggcagttcaggtcgtctcaacacttatcacaggaattgtcatagcgatgatagcggactggaagctca

SEQ ID NO: 11080 - DNA, 524 bp, Oryza sativa
attaatgttttggcaattggcagtagctaggtaccataagcttttggcacaaactacataatatattcgttttcctaagaagaaatagcatatggtacatagtaaaaaaaaaagacatgacctcagtacctcactgattttcatggaaagcttatcaagcacctcaatgcgctgttttatgctttcaagagctttggtcagcttcttcttttgcacaagtaaatccacttgggccctcaatttccttttcccttttttttgcccattcggatgctgaccgcagctcttttcttaagattctcagcagcctcagtcaaccgcacaagccttaccctcgtgctatttgctacaagaacaaaccacaaatttgagtgcagcagataccacagtggctgtccactcaattcgcatgcacatacacaaacaatctaccatttgactacaagatcctacttcatttccaatcaaaattaacttgacagcataacgtactatcacaagtctggagcatataacagataagt

SEQ ID NO: 11081 - DNA, 1224 bp, Oryza sativa
aattcgagctcggtaccccatagcaccagatgctcaacaactaatagaaccaataaaggcgcgcctgttctcttaccaaggaatagcacagaacaaacggtaaatggcattgtttgcacattatgcatgcctaatttatctctcatgtggtcatgcatacaaatatacaacatttagattagaggatacttatttgtcacaacatgagggaactatactagtacccagattataggatttttagaaaaaggaaactcaagctaaagtgagaactggagcaaaaggcatatcatgcaaactcagaattaatgctgtaattttgaagttcgcaaacatgaacattttatttgagacaagactccaattttattaagaaatatgtgtgcgacaagccaacaagtcaccagacaagaggtatcatgccttgatcagctgcaattgctgctgcagctgctgcagccgcagtagttgaaagccgctgcagcaatcacatccgaacacacccgtcattaaaaatcactaaacataaaggtatatcgagacatatacacacctcagataagaggaaacggcataccctgtggaacatagagtaggattcctatactcctagtagcagccattgcctattgcaaggtctgctttatcttttggtatcttatggaaaaatcatattctgaagttgctatttttttttcagcttttggatatattcaaaccatataaggatatcaaaatcttacagttctcatctatggttaacgccttcggaggtttttctgatgcagtaagcttccagtcttcaacaattttgtgctagttctgaataaaaggatgcatagtaactttattgtttaaaccaggctgtggacacgaaatttcggaatcgagtaaagagatatgtgggcctatggtgctgtgtgcagctccgtgaaatagggcacatatattatgacatgtactgggatgagaaaccaggctggaagccccttcctccacagaccaaggtggaggaccatccaccttggttggaggtacaggaatgaggctaactacaatcacggatgttattttttgattcaaaggcaagatagattccttactacagattaactcctattatcatagcagtcactacctgttggaaatccaattgattcttcttgactgcttactgtgaaggaaatagaaatcaaatggcaatcagttttgtagctctgatct

SEQ ID NO: 11082 - DNA, 556 bp, Oryza sativa
caactacaaaaataggttttttttattctttttttttgacactaaatgcatcttttgtttgtaacagggctataggtaacgcatcaccctctatttctgctattgcagaaggccaatctgcagctcataggttattcgaaataatcaatagaaaaccaaatattgacatcactggaacttctggaataatattagaagatatcaaggggaatgttgaactcaaggatgtgtgctttagctaccccgcaaggcctgaacagttgatactagatggcttatgtctacaagtacctaatggtactacaatggcaatagttgggcaaagtggaagtggtaaatcaacaataattagtttggtagagagattctatgacccacaggatggtgaagtgttaatagacggaattaacatcaagaccttgaaactccactggataagaggaaaaatgagtcttgttagccaagagccattgctttttatgacctccatcaaagataacataacctatggtaaagaaaatgctacagatgaagaaatcaagagagcagctgagct

SEQ ID NO: 11083 - DNA, 579 bp, Oryza sativa
aacctatttaacggttagggtatggaagggatcaaaatcaaaactcagggggtatacaaggaggtgaataaaaattcaaggacatagaaggaaattcagggacatagaagggatcggctaaagtttcaggagcatagaaggaattttctcgtgctttaatgcataatatttgtgtgcatttttccagcttgtagatgaacaacgctagggtaaaagaaattacatctctttatgtcgtgtcatccaataccctgaaactacgaaaacaaattattgtgcaattttaccttggtgtcttaggccaaacaaaacctaaagtataggcaataagtgatgttccatatatctttgatgcataatattgtgtgcattttcccaccttgtagatgaacaaacctaggggagaaaaaaatacatctctttatgttgtctttgagtgtaggtctaccaacgatgcatagactccaccattgatcctcatgagagagtcatgttgtcccttttcagcgattgaaccattcttgatgactgcaatcacatctgcccctttaatcgtggacagacggtgtgctaccacaa

SEQ ID NO: 11084 - DNA, 529 bp, Oryza sativa
acgcaattttgcttggaataagttcactctaggtcccttaagtcaaaaatttatcattaaaccacaataacagataagtatgatacgtcctcaactccgaaaaccagtgaaataaggtcctaaaacggttcggaaggtgattttaactgacgttgcacttaaagttaagaaaatactatgggactcacatgtcagcgagtgttatgttaaaattaaaaaaaattgcggtgggcgccggcggcaagccaggcttgccatgctcagccccagctgccgttgccacactcttcttctcgctggcctctgcatccctctcgacaacgcctctgtacccgaagctgaagtcgtcccgctccacgccgtccgctgccgatcaattagtcaagtagcaagaacagagcattataagctcgccgccatatgcaaccacggaaataccggtgccagggagggtggtgtgtgttgtacctttacacggcgaagcgacggtgatgcggactttcttgacagcgatgcagacctagatctc

SEQ ID NO: 11085 - DNA, 636 bp, Oryza sativa
tcctgcagcccgattgcttggatctctgagatccaaacataccttacagataagactctacctgaggaccgcgaagggagtgaacgcgtacaacgcatttccaaacgctatgtgctggtagaagggaccctctatcggcgcgcggctaacggaatcctcctgaagtgcattcctcagaacaaggcgttgagcttcttgctgacatccatgagggcgagtgcggagcccattccgcctcgcgcaccctggttggcaaggcctttcgtcaaggattttattggccgacagctctcaatgatgcagtcgatctggtccggcgatgcagagcgtgtcagttccacgccaagcaaatccatcagccggcccaggccctgcagatcataccactgtcatggccatttgctgtctgggggcttgatatcctgggaccgttcaaacgggccccgggcaggtttgagtatctgtatgttgcgatcgacaagttcactaagtggcccgaggcttatccggttgtcaagatcgataagcactctgctcttaaattcattaagggcatcacggcccgttttggagtgcctaaccgtattattacggataatggcacccaattcactagtgaactcttcggcgactact

SEQ ID NO: 11086 - DNA, 658 bp, Oryza sativa
agatcgtagaactccagaacatccataaagaaagaagaaaaaggaggacccaacccgcccattgcgaaggggaggaagaagatggaccgccccgggtaatctggtgctgggcgcgcctcgcccagcatcactatctcccggccggtggcagattccggcatgaagcggcgcggcagcccagcctgcctctcgctcacaatgcgggaaggtggtagtacgctaccgtcgagcagagcggagccccgtgccatgtcgtcggagaaagagagggttgagaacgagcgtgtgtggcgaaggtgaggcgcagcaaagagagagtttagggcgcaaacggcgaaggaaaggggaatagtggcgaaaggaagggagcaagtcctttcctcgatggctttatacccttgccatcgctgagtccggctcctcgtttctcgtgcccactatctcgccccctcgttactcgctatctcgctccctcgtttctcgcgcccacgcttccactaattccattcgcccgcttgcggcgcatgaggtggatatgcggttgtggcagtcgagatagatcgtatcgtgtgcgcgttaattacgctcgccgaccgaagcgacgttaccatgtctccagacgaaacgaatctgcacgcccagattcgagcgctgctca

SEQ ID NO: 11087 - DNA, 762 bp, Oryza sativa
ctaaatggctgtagaaacagaatatcatccatgtttggaggaatgaatctaatgactatttcatgtcaccggatacctaatcatccactcttctgcagctcaatggtatagtgcatgaactgcccagcgatgcagcagaaagcttgaaagccttacaaaatcaggtgcaggcactgctgagggagcaaagaagtcatccttctgagcttctaaatcctatggatcatgatggtattcaactgtctagtggtggaaatgcattacatgatttttccaatcataggtcaggaagtacacgctacttgttcatgtcacaagatgccagttctgcaagtggctctgccatttcacttacaagtgaacccccttcccatcgtggcatggaacaccacgcaaaggttcctaacgattttgtaccgaagcatgatactcatggagaagttcaattaattgagcagtttgaacctggtgtatatgtcacacttatccagctgaaggatggtagcaaagtattcaagcgggtccggttcaggtacatctccctatccatgctgcaatctagatgttaaactgctacatcctttccatctaaaattttccgtctccttaaatttgtcggacagcaagaagaaatttgcagagaatcaggctgaagaatggtggcgggaaaaccaagagcgggtcttcaagaagaacagccattcgactgttcctcaaacaacatcaacgaaaacaggatcttctaacgaggaagaacatcac

SEQ ID NO: 11088 - DNA, 722 bp, Oryza sativa
  unsure (1)..(722): unsure at all n locations
tagtggatcccccgtgtggcgcccccacccgaagccgccgacgacgatgaggccgagcggcgcagagtcgtcgacgccgccgctccccatccaggtcgcgctcagggtcgccgcgctgaaagcggcacatccagcgcctgatgagctgccgcgcctcatgacgttgcagttcctcgccggtcagctctcccctgtcatggtcaaattgcaagggatcgattctcctcaactcgggtacatccaacctgtcgtttgattgcgaatccatgtagacgaagctatccagctgcttggtgggtgtggcgccgccatacgacggcgacgaggctaccgactcaccagtgaactacgacctctcctcatgctctcgaatccgcttccaacatcatcctcgtcaccgtatggtacgccgccaccgctcctcctctgcctgacgacgaggctgacttaccgggagacatttttgacaccgggctgaccagcacgtcgcggccgacgacgacgtacacctgcgcgagctccggcagcgtgcgcgcgcgaagagggaggaggtggggacgtcgacagcgagcacacggagagagggaggatgccgcgcgggagcaagccggggctccgagtccgccagagtccacctccacggcgcccggccctgcctccacctccgnggccaccgcccgggcgcccaaccccgccccgcctccacctccgggcccacaccg

SEQ ID NO: 11089 - DNA, 561 bp, Oryza sativa
ccttcttcaatagctgtgtcattggcttagcaattttagagaagttctcaatgaaccggcggtaataacccgcaagtcctaagaaactccgaacctgagtgactgtccttggtggggtccatttggtaactgactccacatttgctggatccatagctactccttgagcattcacgatgtgaccgagaaactgaacttccttaagccagaagtcgcacttgctgaacttggcatatagctggtgctcttttaacttttcaagtaccagccgaagatgctgctcatgttcttcctcggacttggagtagataagtatgtcatcgatgaaaaccacgacaaacttatctagaaattccataaacaccttattcatcaaattcatgaagaaggcaggtgcattagtgagttcgaaagacataactgtgcattcgaacaacccgtaccgagtgatgaatgctgtctttggaatatcctttcgcggatcctcaactggtgataagctgatcgtaggtctatcttagagaacacaatagcttctttccactgatcaaacaggatcat

SEQ ID NO: 11090 - DNA, 632 bp, Oryza sativa
  unsure (1)..(632): unsure at all n locations
cgctatagtcaaattcctaaatgatccagatgtcaaacttccagaagttacatgaagaaagactatcactacctacgtactggagcatatggcccagtctctgctttacctctatgtcgtcagccccgaactccttcctccatctaagcatttccgaccacatatgttttgctttatcaatatcaaattttcgcgctttcaggaacctacatgtgtaacatgtcataggcacatgaagaaattttaaatcaaataagnnnnnnnnnnnnnnnnnnnnnnntaaggagaaatccaagtaactgtgactctgagatcagaaaaaaattgcacctcaacatcacgtgataatcatcatgacgttctggcaacaagccctcatcatgtaagcactggtgaaatctttggacagcttccagctccttgacatcccttatgtcctctatagaggctacatggtcgccgaccctccttcttctcttccttctcaaggaacgcctaaatttattccagcactgatagctcggttcttgaaggagactgccttggcctttttgtcaccttctgcgttgccctcatcggatttccactctttcttatcatcatcatgcgcaatgccttcaaaacctgcacct

SEQ ID NO: 11091 - DNA, 13045 bp, Oryza sativa
  unsure (1)..(13045): unsure at all n locations
cgaaccttgttcgggaggaccaaaccctactaggagtttccagggaacaacgaatagcaccagaagctcctcatgaagaaggcgggtaaagcatggcccagtgtcacatcataaagtacttccggttgggaggtgcaccggctttgttacccaaaaacattgctggcgctcacaaataaacgcccatcctcttcctttgcaacgagtccggggcaggttcattcgttgaccgagttccacccctcccccaaggcggcctgtaggtcctcgtgaaccacgttaggcgcggaagcccgcgcgttgatccttttacggccgcccgcccacagctcctcccccggccgcccgggcgccgttccttccccagcagcggcgttgtccgtcgccagtagccgacaccctccccctctcccgtcgccagtcgcagagaacggagagagaaagagatgaggattggagagatgagagaaagagagagagaaggatgatgcggcaatgctaacatgtggggcccacgtgggtcccacgctgactcagccgacatgtaggataaaaccagggtcaaaaccaccggaggatctaaagtgaacggttttgttagttgagagatgtccggtatctggttttgcagttgggggacgattttgtaactcgatgacaagttgagggaccttcggtatactttttcctttaggaaattcaagtagggccagcatatgtgggctggccactacctgcctgatcaggtgggcggtaacactagctgcacaacgctgctcttctctctatcttccccccccccctcctgtttctctattttgctttcacagattcatcaggataaaggagtaatacagtactcggtatatgattttaaaactgagtgaagtacttaaatgaatcgattaatctgtaatatataaattaactttgctcatgattgcttgagtagttgttgtcggaaaaatgttttaagtattctggtagtgatgagtacgtcactttatcagatacgctcataatttcacacgttacaatgataatttcaagtttaagtccagttcagcctccggagacagcactgacttcaaatggacctagcgtcttcatgccaactccgatttgggtgatcttggacttcgtggaaagcttatctcgctacctttcaaacgcatctggtctcgtgtccaaattcatctcgagtcaacgggaatcgccaaaataagacagtgctgttgctgaaaccgaacttgggccttagccttgtaatagactaggcccatctcggaagtgtctccctccacctccacgaattagcacttaaccctaactttattttcctctataaatagctttgtacattctcaaaaacatttgggttttgtttagttgaattttgccaagtgccattcaccttgtatttagtcctcgctcgattagtcggcgactattgattcagagcctccaatagttggtgtgttgatttgccgggtcgattagatctaccacttcaatcgcaactatttctttgtgcttaatcacctattcgcaatatttagattgcatcttatcttgttcttgtagtgttctctcgtttgcattgcagggatcatcaaccgcgcgtcacggttggtacgacatcgtttgtggtgtagcgattgcacggcgttctggacttgttctggttggtagccacgtcgcaaacgtcacactcgatcaaagcgagggttatcccctcaccagaagattgggccacgagagagagcatcatcagttggtatcagagcttcagtagtctggtgaggattttagttttgtaatttttttcccatcattcactatacagccgcaccactttttcctttaccaaacattagttttgagccttgcaattttcattcaattttgctttattgagttttggtccactgtcgtatcaagatctggtcttagccctagtttcatcttggtttgggtttgcatctggttgtctcatcggttagttttgttgcggtcatctcggttgtgtttgtagagtttgagaaaagaaaaaaaaagtatccgagtttcctatttaagtcaaagattgacctccaattttattgcgcatgcatatgcatgtgtaatggtgtaatttccatccacgacttgctgattccttgcgcatgcagatcgcgggccactttaattttccgtgaaaatttcctgtgtgcgcatgcagcctagcaggttccgttgagttagttggtatcggtaatctttttttttacccagttttttttttcgtctgttagccactgtttgataaagaaaaagagagataaaaaaaaagaaaaagccagcgtggtgcaaaaacagaaaaaaaaggccgcaccaaaaaaaatagaaaagaaagaaaaaaatcaaaaaaaaagagaaaaatatcagaaaaagaaaacagtgtggcattttctttggttttttttttgagagagttgtgtgataaaatcagttgtttctagtccgagtgttaagcatttgtttgcttgagctaggattgagtctaggcaaggccagcaacgttgaccagtactttggactattattcaatttcacaaatctgtttgattttttctattccttgtgatatagttaaacctaccaagatccacatattactaacctttacaggtccggccttgcaatcgctccactcatcaagcatgtcattgtgccacgaaccagccacggtgattgacctgttttgcattctttgaggatattataataatttggtatatgcttaagtgttgagtgccttcaaaagctccacatatctatagattgttaggaactgacactttcttgtgagtttcttttgcttgataacgatgtcaggtacaagttccgacgaaccaacactggagaatctagcgcataaactgaagggcatggaaaattggtatgaagagttgatgcgtaatagtaaatcatacaaggaaagcacagataaacatttaaaaaccttaagtgaaagcctggtaaaagtagtggatcaaattgagaaaatgaatcaatcccataaacaattaactgaaaacattcagaatatgaatattggacatgaaaatattgtgtgacgcattggtttacttgaggctgcaggtgaagaaggtgcaggtgccactgctcatcgacaccaaagatatgacgatgaagacgaagagcaatctgttgctgatgatgaggaggaagacgagagtgttggaaataaaagacaatgtcgagttagggacaaagatgatcctttatctaaggtaaaatttactatgccttcttttaatggtaagtttgagccttctgtttatctagattggaagttagctgttgagcaaaaattctcttgctatgattttcctgataataagaaagttaaagctgccagtagtgaatttacctcctttgcatctctatggtggaatgatatatgtggtagaggacttagacctagaacatgggatgatatgaaacgtacaatgaggtctagatttgttccttcttactatgctcgtgacatgttaaataaactacaacttttaagacaaggtcccaattctgtagaaacatactatcaagagatgatgtttgctttgtcacgctgtgatttgcaagaaactgaggatgctagaatttctaggttctatggaggtcttaatagagagattcgggatattcttgaatataaataatacaataccatgaatagattattccattttgcttgcaaagctgaaagagaagtgcagggacgcaacaagcataggagttcttttgcaggtgctacttctacatgacagtcaataccacgtcaatctactactgccgttcgtccagcttcttccacaccacctacctccacgccatcccatgctcaagaaacaagcaaaaatgcttcagttgagactccagccaagagtgaaacttcagtagtttccactagacgtacctgtgatactacatgtcataggtgccatggcattggacacattgcacgtgactgtccaaatcggcgagctctatttgtgaatgttgatggtgagtatacttctgctagtgattgtgatgatgaatatgctttagctgccactgaccacgcatgaggacaagataatgatgacatcgaggaagtccatttgcatccagagtcgctagatcagtatcctagcctaattgtcaagctagcacttagtgctaaagagaagtgtgaagagcaaaaccaacgtcacaatttgttccaaagcaaagttcttgtgaaaggccataccgtcaaaatgattattgatagcgggagttgcaacaatttagcaagtgaagagatggtcaagaagcttggcttgactacccatccacatccacatccctatcatattcagtggtttaatacatgtggtaagatgaaggtaacccgcttggttaaaatacctttttctataggctcctaccatgatcaaattgaatgtgatgttgtgcatatgcaagcttgttctgttattttggggcgaccatggcaatatgatagagaagttgtttcttatggtaggactaatacatataaatttatgttcgatggtaaaagagttgttttgcattctatgactccagccgctgctttcaaagatgatcttgcaagacttgaatgtgaaaagaaagcgaaaagtgaaaatcagattattgctaaacatcctgcttcaactagtaaaatagaaccaagtaccacaaagaatgaaattaagttgaagggtgctttgttggcttctaaatataatatatgtgcactagatgagctagattcttgttgctatgctctattttgcaaagatcctatactcacattggctactgctcctagtactttatattctttgccacccgttgttactaaccttttgcagtaatatgaggatgtttttcacgatgagacacctccaaggatggccactggacgagagagtgcacacaatcaagaaaacgggattgagtcgaggacgactccaattcaagaaggggaggatgatgaggatatcactttgtcggatacgctcataacttcacacgttccaatgataattccaagtccaagtccagttcggcatccggagacagcactgacttcaaacggacctagcgccttcatgccaactccgatttgggtgatcttagacttcatggaaagcttatctcgctacctttcaaacgcatccggtctcgtgtccaaattcatctcgagtcaatgggaatcgccaaaataagacaatgttgttgctaaaaccgaacttgggccttgggccttataatagactaggcccatctcgaaagtgtctccctccacctccaaacttaaccctagctttatttccctctataaatagctttgtacatcctcaaaaacatttgggttttgtttagttgaattttgccaagtgccattcaccttgtctttagtcctcgctcgattagttggcgactattgattcagagcccgcaatagttggtgtgttgatttgtcgggtctattagatctaccacttcaatcgcaactatttctttgtgcttaatcacctattcgcaatatttagattgcatcttatcttgttcttgcagtgttctctcgtttgcattgcagggatcatcaaccgcgcgtcacggttggtacgacattgtttgtggtgtagcgattgcccggcatcctggacttcatttggttggtagccacgtcgcaaacgtcacactcgatcaaaatgagagttatcccctcaccagaagattgggccacgagagagagcatcatcaggtagttaaatgatacttattattaaaaggttggagagtaaattttgaaagatgtaatatgaatgatccgctacagtgtcaagaaatatagcggggaatctttggatgaccctccatatgaaatgaagatatggaggcttgcatttggatattccgaaggatcacattgctccactaaatttgggtgcgtcaatgccatctcttccctcaattcaccccaccccttaaaaaagagacggactatatttacgacgccacttccatataaacattcaaaatcaattttacactgtaaaattatatccatttatattataattacactgtataagatttaaaacttacattatagttacactattaagttcgttataacttttctaatacacactatgtaaaaaaatcatgattaaaagtaattgattaactacttaaaagaggagatataagagatataaacatacttaaaaaagcaccaccttgctatgaaaatgcaagtaattaaatgcaagcacttagtcataatgactaactgcttctctgtaactaagtgtaaatgcaagttggatatagaagaacctaaatcttgatgcaagattacataagaaaaatcgaaagataggagccaaaaatctgttgcaagtgaaatagtgaattcgaatatttatattttggaatggatgaagtacatgctatgttccgttgaacccaaaatgccctccaacaatttcgacgaaatttgctgcaacctcgacttcagtttctagttcctcttcgtttgggcagcaatgctccatagacaaacctctcttctatcatctccatcctgctcaaaccttcccaccttgtgatccagaaagtttttgatgatatgttctaccttgaccaacacccccctctcaatgtttttctgtcaacatgaagtcaaaacttcacattcatttcatactcagtacattcattcaactaaaaaaattgtatttttgaatcgccatgcattcccccatgtactccataaggctattcacaatatagtgaggtggcgtttgtcctcagtgcactacatttaaccattcacatgcgtttggcacatgtttgtgtccctagtgattgagttgctcgtccctgttaagacctagtgtcctcgtaagggagaagcaaaaaggcggcatggaaaacaaaaggcaagaaagaggggtagaaagcaggagagaaaggggaaggcatcgatgacccggaagtgtcattgacaacgaggctagctgctgccatgaagctacatgtccattgcctagtgtggccggctcgtcgttgatctcgccggccgaagtcgcctttagtaggaaggggcctcgatgactagatctatatatgaagaagttcctagacccaatggggatacagtgcactatggaggtgtgtggctctactttttttgttacgtaaagattgtgagcctggtttggtgtgccatgcgctgtgagtgccataaaagcagcagataatcatatcagacattggggagggcgcaatgtggtgatggagaagggtgcaatgtgcatcggtaaaccatatcatgtactctctccctccatcccaaaataaacaaacttctagagtttattttttttctaaaatagatcaacatctacatttttatttaccattggtccacaaatcaaaacattttatccctcatcacctacgcacccactaatatacctttactactaattatagagatattttggtcttttatctccctccttaactctatctcggaaatctaggattggagtatttttgggatggacggagtacacggtttctcttgcagtaaacggcatcgcagattaaggctgagtgaacacacaacatcacatcagggttcaccaaaccgttttggattagattatcatcaccctacggtaaggcagttatcgcggggattactgttgtttaaaaactgaggatgttatcgtacggggtaactgtgtgataactgcatggttttgcataccgtgcgtcacatacataggcctatccaactcggagcaatcgtcgtacgttacagggacatcgatctcacctttgcagatgtagggggccagcagaggaattaaattccccggtttcctctcaatcgttacagactcgtgacgtgaatggtttcagttcacctttactactcgcgcccgtacgtacttgcccagtacacattgtggtaccacccaaaaaaaaaaaaagaagctttgcttgccctctcctcgtccgtcccgactccccgtgccgcaaataatcgggacgccaacatgggacgaacaggacaccgcaccacctcggttgcagtcgcagccagccttgcaggcttgcagccgcagcgccgtcgagtcgagacttgacgacgatgtgagaaccaaatagcaccctggcctagtcgcctcgcctcgcgttgccaatcgcgtcgcctgcagccagcgcagcggccggcagggcatctccaacaagtgcgcgtacggcttggccggctgggccaaaaggcaaaagcccaaaggggtcgcaactcgcaaaggcgcacgcacgcgctgcacagtgcgcgcgcagaagcagacctcagagtcggacatgggaggaaaaaaaagaaagggcaacagcgcctcgtcctcgctatacgctcccgtagtatagacaataattgggacaacggccacccctgcgcgcgctgtgggctgcgctagctgcggctgggacacggccacggccaggggccagctagcacagcacagcgcgcgacgagacgacgacgacgcaacgggcgggcgatgatggggcgagccagccgagcgcccgagccggcccccgcgcgggcgcggtgcgagcgggcaaaacgacacacgcaggccagcgggtggcgcgggccggggaggggaagcaggcagagaggcaggcagtgggcggcaggcggcagcgcgtaccacaggcggggcaggcgtgcaggccgcgtggttataataaattgtgtgtggggggcacacgcgccgcgcgcggcaacgggagaagctagagcgcgcccaccccacttgccgatcgagcgggcgtcgcggcatgcatgcaggtacgtacgtagtacgtgaggtgagagtgcgtaccaccggccaccgggcgtcgcggaagatccaatgggcgcggcggtgggcctgcgcccgtcgcctcccgccgctttgctcgcctcctttatggcaaagcgtttttaccttacctgcgtgcagtgatatgcttccactgctagctactgccaagccagctgtgaatgtgatggatacctggatggagtatagtgtcatgtgctacctatggttcttcttgaggtcttggaatgtttaaagtagtttacaatccacatttttaatctaaaattttaacaagccataaaacatccttttgtctagtaatccagctttctaatgaacaagagtcctcactactgctttgtgttttcggccacgagcccacaaaggagaccactggatcggcatcaaacgcgggagagagagagaaccttttgctctacatgcattattcatgcaattagcacatgatataagattgcatacggtctagtgctgctgctcattacatgccaattcaagttgtagagaaacataaagttgtaaacttgatttacatatgcttacgagtgcttataccgagcatacatatatagaagcttgtcgtgctacattttaagcacggcatgcatattgctcgccaagaggttagcaaatgaaatgaaataaagcctggttccagttcggcaggtccgatattacatcaacacttagaatcgaattaaacacacttcgatgattcgatccaacgaaaagcaacaaaggatcgatccggaggaaattgagtcacacttagaacgacggccggccaatgctcacacggctatagctagcttcttttcctcttcaagccagccgccgcggccgtggcctcgccgtcgacctgatccccgtcgccgccctcaaccgccgccgctgccgctgccgccgcctccgtcagcttggtcagtagttcgccggcgttgtcggcgaggacgaagatgttccgcgccgcggcgtcgatgaacccttcctcgacgcccttgtcgaacagcgagagtaagttgttgtagtagccgtccacattgagcagccccacctaacgaaaacaacaccaacaatatttatatatgtttgttactactactagtttattcattgggagatcatgtcgaaaatgattaggccatgaagcatgacggcctagctataagctaagctaagctaagcgctatccatcaatctagctagctaatccctatccaccggccaaggacaataagattatagaatgcaaatggcagttaaatacgacaaactaagttaagctaatagtattaagctactggagtagcttttagtaccggtttgttgtggatccccagctgcgcccacgctatgatctccaacagttcttcgattgtcccgtaaccacctgcgcatcacgcggcaattaagttgttaattaagctaagatcactcctaggccctactagctaactactattagccaattaattctcgtttgtgtttgcatcagtgtcattgtgtcaatgtgtgtgtgtgtgtgagagagagagagagagagagggggggggggggttgacaagtcggctaacagctcacctggcagggcgatgaaagcgtcggcgtgtttcgccatttctgacttgcgctcatgcatgtccctgaccactttcgcctctcccaacgtctcccctgacacctaggaaaggcttgcacaaaatcatagtagtaccaccaaggtaaaataaacacgttccatatgtatgcgtgtgtgcagtaaaagatcttttaggaagtgatagacaatagaccaatcgtatactggctactccagctccacacaagagattcgcttgttatacctcttcaggtaggagagcactagggatgaccctgcatgcatttacagatgcatcgacgtgatcagcagatggatcgatcagcaggcacagttaagtcagtgactgtgtatgtgcgtcgtcgtgcgtacccgaggacgtggcggccgccgtcgtggacggtcttggagacgaggcccatcaggccgccgctgccgccgccgtagaccagatcgagctccctctcgacctgcgtggatcaatggaggccttcgtgggtgaggctaggagagggtaaagaccgagagcgaaagggagggggaataagcttgggggcgtcgtcagagctagacagtgtagaactatacccaagtgagcaggacacatcttctccatggacaatggcattggaagctgaagcttttggatggatggctagctagtagctagctaatactatcgattaattgctcaagacgcgacgagactcaccagctgctttccgaggtcgagagcggcagcgctgaaggacggccggtttccccgcctgctgccgcagaagacgcagatcgtccgcaccggtccccggcccccgcggctgccgctctccacaaccttgtcgtggttagcatccatgtgtgtgtaatggggaggacggagcgagagagagagagagagaggatgcaggggcttgtgtaagacttttcccggctcttccctgtgaagacctatttatccacactccagcaagcactccacacaagagtacaagacgtttgcttaatttgcatgctatgtaaacttagctcgcaattgattatctagttgctagttaaatgatgctctgggccctggccctctcgatatcgttttgatttctagctgcagaaaccatatactatacggttattggtttagtcatatcacatgcatgttttacgtacatatgcagagacgaagtggtaattgactatatatacggtacagtggaggtatgtgcacgtaagcatatctgaaacaaattcccatcaaaattcagaagccagtcagacagattataactactccctccgtaccattttaagtgcagtcatagtttttcgtatccaactttgaccttccgtcttatttatttttttaaaaaaaacaaaataaaagcataagtcacaagtaaagtactattcatattttatcatctcataacaacaaaaatactaattatataattttttcaaataaaacggacgatcaaagttggacgcgaaaacttacttatggttacacttaaaatgggatggagggagtatcacatatcctaaaaatctaaccaaaggttcgtgtctccctgtgtcctccaacacatttgcccatcagcccaccaggccaggtgccatcttcttttgtctatgtcaccagatcagtatgcctggatgcagtggcggagctaggaaattttttaagctcagacaaatttaaatatatctagtatttgctataatattttcaactttaatcctttcaaaacaataaaagttcaatggtgtatttgacggcgagcccggacggctgcccgtgcaagccgagcggtggctctgcccgtgcttggatgcaggggcggatccaacgtgggtgcaggggcngctgtnnnnatnnncacttttatattngtacaactaaaaccctaaaaatattaagtatttattcaaacaaagttttaaaaaatacacactatttcacctcaatagtcacatataggatctatgaatattacctgaaatcggcgtctgaatccggcagggcttgtccccttcttctttttccttcccctttttttttttttttaacggaattgaaggggaaggaattaagtctggggctggtaacaagctttttttaacaatcaggctttctgccataccaagggcggtaaggggccgcttgcaaaatggccggcccaaattggtttttttgatttcgggcccttgcgggaaagggtttattgaaaaaaacttttttttttacacaccctgcctctccgttttgccaataagattttttccaaaattgggggggggggtctattttttaaattttttcccccataaattattttttaaatatttttaaaaaattctaaaataaaaaaatatttttagaaaaaaaccgtgccgtcctttcttcaggaagttttccttccttaattcaggaaaaaggtctcaacattggaattatctccccaggacc

SEQ ID NO: 11092 - DNA, 724 bp, Oryza sativa
tctcgtgtcttctgtgattgatctcttgttatttatcgtttatttgcctatcgcttcctaacaacctgaaaatataagttctaactgaaattggtctcaacatattctggaactgcagatgctgcacaagacgcatgcccatccaaaatacccttctttcttttcaggattcaaaatgcatcatgtacaaacatactaactagtgcaagtctattttcactgtttcagttctgttccggtgaccttattaaacctgatacgtcttcactaatgaattacatggtaaatttacattaaaatgatcagctgccctacacttatacactaaaatgcaggagcatcaattacagaataaatgcgtgtcataatgccaattgtagggattgaaggaccaaatcagcaaagggaatctgatgctacctctgcttacatatcccaggctcatccaattcagttgcatcttatcgacattccatcctataactactataataatctgtgaattcatcgcgttttccaccacctgacaccaattttttagcttttgcataaagctctcttccagctttccacaggtagttcaacccaacaagcagctcaactatggcagcctcgctctttttctggtcagcaaaatgcaacgtctgcaggagcagcacacctgtaccgctcgacgcaacatttttctgctcgaaattcctctccgattgccatcgcagcatgt

SEQ ID NO: 11093 - DNA, 503 bp, Oryza sativa
aaatagtctcgactgggtataaaccacgcagagtctcagcaccaaggagaatggcatcactccctaaacaatagaagtatgttaaactatcagaaggcaattgaaaatttaacattaccaatagctcaaacaactcaccgtcaagcactgcatttgccacatccgtagcctctgcacaagtaggcctgaggttgtcagtcatactgtctacaacacgagtaacaacagcaggctttccagccatgttgcacttgtgcaaagcaaacttttgaaataaaaacacctacagtatgaccagcaaaggtcaaagagcaaaataaataaggtttacctaacccaaagacaagtattgcaccataatttgaaaaaactacaattcttgttaataaggtactaagtgtagcggatgtacaattaagcagggccttctgatgggctcgacgtaagctaaaaatactaaccttttcaggtggaagatcaattccaaggtttcctcttgacag

SEQ ID NO: 11094 - DNA, 683 bp, Oryza sativa
tcgagagctatcattcatttgaacccgcaagagctggaatgacaatatataccgtccataggccctggaaggtttagaactgatatttgggtccggcacatctgatgatctgaaggtttctgaagcaagcagattcaacattaatagtcaaactgtatgtcgtccgaagaacaccaatgcaaattttggaccatctcagcactagcagtaacatcgttcagacaatacaaattcgagcctgagatccaggaggcgacatacatacactgtacaggatgaacaaaaccgaggcaacgccaaatatatgtacaacgactaaggagcatttgtgcatccacgaacaccactactcatctcatctcaagagaaaataaaaaagaaaaagaaacgacacgcaacttccaagtgtcctatatccagatgcgacagtatttggtcaaatctggagtgaaggggcattcaacatctgtatgatgtattcctgtgttcaggtattagaatatcaacgagaaactcttgctttaacagtcaaagaatgggcgactttctttcaagaacacgatgtgaaacatgcccagtccaaagaatgagcgatgctttctgcgaccagaaacatacaataaacatgaggaccaaaacaacccaaccagaatcaatccaaaacttattctagaaattatgaa

SEQ ID NO: 11095 - DNA, 753 bp, Oryza sativa
ttgagcaatatgatattgaatttgctgaagactctgatgatgaccgtccattccctccacttactaataatgacaagttagcattagaggaatgtcgtgcgtttgagaaggtgtttgggaggaagccggacagctctgatttgtttctgggcagttgagtaccaccttccgcaccgtgtcatgcgacagttcgggaagaaacaagactggccggttgaggacatctcaactggagttgaattacacaagtaaatatttcttatctttgtttgctttcattgtcaatgttcaattttgtaccatttaacccttgtcgatgctcactattgtttcatcaccttctacttgtctaggtatgacagggtgagaacaaagaaggtgaaagactgggggctagagcataatagatacattgatgaatggaggacagccgaaaggaacgacaggtacatcgagactatacaccaaaatcatcttttctcagagtaccttcgttggctgcataggacatatagattgttcctccgccctacttggacggaagccgacatagaggatgaccgcgacttcgatgagggacggaatccctatgatatccggactagagttggatatcaaatggagcacgccccacttagagacagagtcgtaagttttcttgcatttgtcaaagttatttccatttgcaccctagaccctaacatatatcttctcacgctttcagtcgagagagctctcagggggctgcaggaa

SEQ ID NO: 11096 - DNA, 700 bp, Oryza sativa
ttcctgcagcccggtttcccccactgtttgcaacgtgaagctggggcgtgtgctcattgatgggggagcagccctcaacatcctttcccccgcagcctttgacgctatcaaggccccggggatggtgctccggccgtcccagccgattatcggtgtgacgccgggtcacacttggccgctaggtcatatcgacctcccggttaccttcggtggatccgccaacttccgcacggagcgggtgaactttgatgtggcggacctcagtctgccctacaacgcggtcctagggaggcccgcgttggtgaagttcatggcggcagtccactacgcctacctccagatgaagatgccgggccccggtggccccatctctgtccatggcgacctcaaagtcgcgcttgcttgtatggagcagcgcgcggaccacctcgccgccgcgtccaagcccaagggaggcgacgagaggcttggcacctccgcccccgccgtcccgaggcagcggatagtcacatgcgacgaggtcccggtcaaggaggttgccctgggcgacggcccgtccaagaccacacggatcggtggtcttctggacggcaaataggaagacgcgctcgtctctttcctgtgggcaaacgctgacgtcttcccatggagaccggcggatatgcccggggtcccccaggaggtgattgagcaccgtctc

SEQ ID NO: 11097 - DNA, 711 bp, Oryza sativa
ttcctgcagcccgacgagttcgtgcgtggttcgatgaacagtggtcaaaggcttctgtcacttgcaactttttaacggcagcttggtagtatatggagtacttagcttctctgaaatattgctagttgtatacttgtatctctctctgtgactttatctagctcggtctgtcagcgtagggacgggtgagtttactgataactcgctcgtacgtatgcacacgtaaggatgacgtcgttaatgtgttgccatttgattgtcatcgtcagggcttaaacggtgcggcaagagctgccgcctccggtggctcaactacctccgcccggcgatccggcacggcggcttcaccgacgaggaggacaacctcatcctgtcgctctacggcgaaatgggaagcaagtacgtgcatgcatgcgtgcgctctagtctacctgcattcacatgacctctacctctgtgcgagtatattgattatacttctgcgtgcgtcgccgtggatgtgcacaggtggtcggtgatcgcgtccaagctccccggccggacggacaacgacgtcaagaactactggaacaccaagctcaagaagaggtacttggccgcggccgcaacagaagcaaccactcctcctcctcctgccgccggcgacgatgacaacaacccaacgacacaagcctccagccaacccgcttctcctactcctccggcgcccct

SEQ ID NO: 11098 - DNA, 633 bp, Oryza sativa
acatacagacaccatgtacgctagtacacacgtatacgtacatgaaaaggcagagtgtgcgcagtacatgcagtacgtgtcgttgtagccttgcacgctcgcctgcagccagaagcagcctacaaacctagcgcggccggccggcgcggcacgtgtgcgtccacgccatcgatcagttttctttgatggtggcagccaggtcgaggcagttgctgacgaggcggttgacgtggcgctgcgccccgggtatgggcgacgtgaggtccgggaactcgtcgaaggcttccccgcagtcggtggagaaggtggaggcggacgacagctcggtcatcaggtcgtcgtggctgccgccgctcttgatcgtgtcgcgcgccttctgcagcgcgtcggccagcgacgagtaggcgcccttgcacgtgtcgagcgtcgacgacatgctcgtgccttcggccttcaccgcgcgcgacttcatcacgtcggccagccgcttctccgccatcatggccttggactccaccacccgcaacgccgcgtccagcagctgcttcggcgtcatcacccccggcagcgtcgtcagcgttccgcacagcgccttgtagtgcacctgcatcatatgtcatgccaatgcacgca

SEQ ID NO: 11099 - DNA, 528 bp, Oryza sativa
tcataagcatttaaggcatcggacaaattttgagtaaggtgctccaaaaggaaaaatatataacattttacttaattccataaaggacaaattttgagtaaggtgctccaaaaggaaaaatatacaacattttacttaattccataaaggaaggcctcaaattcaaatacataaggagatacatatcactattctgaaatgagttccttacctccttgtcctcatcagatagggtaggtaagtcgatgtgaatctgcgagcaatgcaatgtgaaaagcgacccagccagagttgctgtgttttttatcacacagaccacatcatttcctttaatttgagaaacctaaaccagacaaattagagttttggtatcggaaaatgtgggcacaaagcaaatcctactgacattgacataagaaaaaaaaatgcagaacgctaagcgcagtatgccgaatatttttacctctaacccaactgaagtagtctcactgcctgtgaacaagtattgcccaacaaatattgtgtcac

SEQ ID NO: 11100 - DNA, 544 bp, Oryza sativa
ggatctgctcatactggtccggctttaacccctgctgaagttcttatagccattcatgatattaatcctgaaaaggatagagttgccctgaagaaggtgagctattggttatgttgatgtattcattatattccaacatctcaacagcataaattagtgcccagtacacaaattggatgtcttgatggattttgtatcaagagttcaagacagacatgcatatgcacctgtgcagtagatatcctttttcttggttgacatgagttttttctcgtttctgatggaaatgaaaatattttcaggtcactgatgcttgcacagcttgctttgaacagcgcacggtatttactcagcaagttttggagaagtcactgaataaattggtactaacttgactgctgttattctttacctattattcttttacatattcttctctttgattaactgtttggattgttatgtaggttgacaatgtaccaattccacttcttttcatgagaacagttattcaagcacttgatgctttcccagctttggtaca

SEQ ID NO: 11101 - DNA, 5745 bp, Oryza sativa
aactctgtttgcaccatgtcaaaagagaactggtcagcttaagttagatgaaacaagaatacagattgtacagactttacaagggttatcacctggtgccatgtatcctacagtgcctggcatactcgttaatgtgatagagttgtcatctccaaacagcaacttggaaattccgaagtcggcaacatgtgcaaccatatcattgtcaagcaaaatattgcttggctttaaatcaaaatgcaggacaacctcaaagtgatggtggtgtagatactccattgccatcgcaacatccagcatgacactgagcctttggatgaaactgaggtgcagcccatcatttgagtacaaccaattatccaaacttccattgggcatatactcaagaactagtgctttgaagtcaagattagagcaagtgctaacaatcctcaccaagttgcggtgatgagccattcgtaacacgcggcactctgtgtcaaagcttttggaagctacttcctgttgcatgtttaggacctttattgtgacaatggactcatcatctagctggcctttgaagactttaccaaagcttccactccctagcaggttatcatcactgaagtttcttgttgcacggacaagttcatggtatgagattaactggtaattcagcaagtctgcatctgagggtagtggcatctttcctggcttattcattttccttcttaccaacatacacaagcaaaatgctaaaataaaaaatgccacaactgcaggtaatatgaattttagtagccgttgtattgaccttgagtgagttttgctctggcatgattctattccttggctcggaaggccacatagtgccttgtttcccatcaatgacttgacagtgatgtttgagaacacacctccttctggtatctgaccctccagtctattgaaagataggttcaaattggcaagataagtgagattggccaaggactttgggatgacacccgaaagcacattggaggaaaggtctaactcctcaatacttagtaacttgccaactgaatctggtattgaaccttggagtagattactggatagattcatatagatcatcatctggagttcaccaaaagaaaatggtatatcacctgatagctggtttcttgatagatccatcttagtaattgctgtcagttttccaacatcagcaggtagagaaccactcaaagagttctgtgataaatcaagctcaataagtttctgaagatgccacaaactaattggtattgttgaagacaacgagttttgggacaataccacaacttgtaactggtttaggctaccgatggtacttggaataggactgacaagttgattgttagcaagattcagcttaactagacttgttaatccagtgatttctactgggatggtgccagacaaggtgttgttggagagattgagttcttggaggttgttcattgatgtgatctgcgtggggatcatcccgcttagctggtttcctctgagagatagcatcagtaggttggtaagcttagccaatgtactggggatgcttccagtgatcctattgttgtctgctacaaaaatttcgatcagtgtgctaaggtttccaacacagggtagtaaactcccttcaaatctattgtatgacatgccaattgtgttcagattactgcaatttgataatgcagctaggaattcaaggttcccactgagctggttcccatcaacatagatgtcacgaagattccacaagttcccaaatgacattggcaccgatccagttaatccgtttacgaacaaatctattgtggtgaggtcagagattgcctatagattcgggaatggtacctgttatttggttgtttgcaaagcttatatacctgaggtttctcagctgtccaaactctggtggtatttctccctctagattgttctcgctaaggtccaaagcaagcagcccagtatgattgctcagttcaactgggatctttccagtgagctcgttggttgacaagtaaattgcagtgaggtttggcattgtcgccagccatgatggcacagaacctgtgaaattatttacagctagggagaacaaatcaaggttttgacatttggaagggcccgatgggataggtccatcgaaccaattttcaccgagagagaaaaattccaacatagggaggtgaaagctctcgtttccaggaatcggacctctgagattgttccgtgtgactgctatggcttgcaggtaggacatattgaagatagcagcaggcatggagcctgagagaagattattttctaggactagcatctccagcttcgacaatgatccaacgctaccaggaattgctcctgttagcctatttgacccgagttgtatcctactcaggttgggtgtgttattgaacaggccttgtggtattggtccgctcaagtcgttatctgacaatcttaatatctgaagattgttaagatttgccaactcttgtggaatccccccaaagaatttgttgctattaagataaagagactcgagccttgtgaggttgccaaggatggaggggatggtacctgacaggctgttgtatgaaagaacaagagtttgcagtcggggcagcctatcgagctcggttggcacaggtccgatgagggtggtgttgctgagtacaaggctggagaggaaggagagattgccaatctgcgggctgatggttccttcaagtgccatgtcttcaaactcaagcccagtgacccacttcccgctgctgtcgcatgagaccccaatccatgagcagaagggtgcactggcagtccaattgctggcaaggatgccattagggtccttgacttgctccttgaagtcgagcagtgcagcgaggtctgtgttgttgtatggaggggtgagtgaagtggcgcatggtgccaataggatgaggagcaccatgctgatgcagagaagagccatggtagtgaaggaatgaaggttgatgatgaggatacacaattacgcatgagcagtgtgctggttctattggtggttttattggaagtgtggccgtgtgggatgtgcaattgacatgtgcattgtgttgaatggtcaaaaagttgttttttttagtggaaatatgtgtgaaaggaagaaagcgttttagactttttcgtttgaaaacaaactttcatttttcagagctggttgtacactgcagtttcttggtacacttcaaagtttcaaaatagaaagaaggaaaaaaatgaattccttccaagaaacaacctcttccagaagtcaaggagcaaagctgtaggagtatgtcatttccgtcattgatagcttcgttttttttctgttctgtttttaataatagattaaaacccggtctctacaccaacatgggtgtacacagccaactttgatgcttcatgcttggcgccagtacttatgtttgtttgattttccaagaataaaacatctggtttaatttttttttcagaaaatcacttaaatagtcgttctacgctagctagatttttttttaaataaaaactgggagataatctaactccaagtatatttttttgaaagcaaactccaagtatattcatatgccatttccatctttgatactatcttggtatgcttggcaccattacttatgccttttcttttcacgaatgaaacatctggtgtgatttttttcaggacaatctttttaaaagtttgttcctggctgttgtttcaggtatcaaagaactgtaaaaatactgaagcgcttctatcctagagatccatttcttattagggcccgtctagttacccaaaattttttttccaaaaacatcacatcgaatctttggacatatgcataaaacattaaatatagattaaaagaaaaactaattgcacaattatgggggaaatcgcgagacgaatcttttaagcctaattagtccgtgattagccataagtgctacagtaacccacatgtgctaatgacggcttaattagtcttaaaagattcgtcttgcggttccgaaatccccttccgacatccggtcaaacgtccgatgtgacatccaaaaattcccttttccccaactaaacacacccttaacccttattcagcagttgactaagagtctaagagaagcaacactttccatgtgtttggtcaatcctgagtagactatgctctgaatcgtgctcaccaacgcaccatttcacaccaaccgccatttcacatgtctattattgaaggcggtcaggttcagcgaagcaagttgatgatagtcgctcttccccatgctagactatccatatccatggagccatcaaacagcgtcatgatcactgataattgatagtagtacattgaatacaagagaagctgtacgtgcacaacttcccttccattaagtatttaattgcttgcttgcattgtttgcttattttctgtacgatggagggtgggctgtgggcatcatgatggaatcgtggacctctcatatattgttgggttaactgaaatttttcagtggtcctttgaaaactagtagaaatattcattgcgttctttggcaggttattggaggattaagccctaaacaactctctaacacgtagtatattactttttgttagatggctgcaaacctgcaactcaactactgttacaggtatcttttcaaggaaggctacagctttcatgatgcagttcagcatttgcaaccaccacagatgacacatggccttgccagctttgggttatcatctgcagggctgcaggacaagactatctaggcttgtaatacctccttgatccgctgcagtttcacagtcacatccttcatcgtcaccctgtcctcaggcaagtctctggtacactgcagccccaaatccagcagctgcgctaagcagctcctgctgccggttgattcaccttgggcatcatcgctgctcaccgtgtcgtcatacagagagatgccaggatgtacgacgtcggcgagccttgacgggagcgctcggttgacccactccctcaagctcagctctccgacgaacatggcgtcggttggcttcttccccgtgaagacctccaggagcatgaccccgtagctgaacacgtcgctctttcgcgatgcttttcctgtcgacccgtactctgtgatgttcatggtaaacaaagatcaagggggatctgcagaaattggcgatttcagtggaaccaaagatgaacggtaaatcgacaagtgattacctggtgccatgtatccgattgttcctggcatgctcctggagaatatggaggtgtcctctcctagcaataaccttgcaattccaaagtctgcgatgcaagccgtcatgtctgcgtcaagcagcacgttgcttggcttcagatcacagtggaggactacctcaaagtgctcatggtgtaggtaagccatagcgagcgccgcatccaacatgatgctcaccctctgcatcaatccaaggcaatgcctgtcactgtacagcaaccattcgtccaggctcccattgggcatgtactgcagcaccaacgccttgaagtccagattcgaacaggtggtgagtatcctcaccaagtttcggtgccgagccatgcgaagtgcacggcactcgacttcaaaactcatggtagctctttccatgtccatgttgaggacttttatcgcgacgatctgctcatcgtctagattgcccttgaagactttgcc

SEQ ID NO: 11102 - DNA, 733 bp, Oryza sativa
gggcgaattcgagctcggtaccctatgtctgcctaaaatggtaatggggcctagggattatgtatagtcaagggattgacttgaccatcaaactttaagttcattccattctggttacaagaaacaagttactttcatccttggccattagcattgtctttttggaatagtataagaaaatattggaaattatttaagggaattctgaaaatcattttggaattctgaaaaagtttcttaaaaaccactggaaaaagaaccaaaccggcatttgcacctcttaaaatggctgcctaccaacccttctgaatttgaaggtaataaatataaattcctggtaatattcccttcattccaaatattccttgattaaatggggggtcaattatggtagggcactaaccagcatgtatttggatatcaccagtggaggatttgctgaaccttacaatgcaccggtcaacacggcaaacaaaatagtcatgatttttcctcctgtgtaacctttctcaatgataagctttccaccataccaaaaggctaatccatagctgccaaatacaacgcacatgacaaagcccatgccaaaaccagtgataatgccttcctcaatagtagcctggaatgacttctttataaaataacggtacattgctatcgctttcttctcaccattgaaggacacaacctgttaacacaggatattaatcaaacttactgtctgctactccaa

SEQ ID NO: 11103 - DNA, 1244 bp, Oryza sativa
acttaaaggaatctgcttcctgttactgaaaataagtctggtagatcaccttgctaagccttgatctgcctatcttactcctgtagccctgttctctgtgttggtaagccttttaacctcatgtactgttttcacggttgtgattttggaacagaaacagttaccaatctcttgtgcgattaaaatatgcctttttgcctgccatggtaagcttatgggcttttccaacatgcaggtgaaggaaatttttgaaccaatttttaatgatcatgctagaaagactgcaaaggtcctactggtaaccgccagtgatcattaagcccagcctttgttatcatccttgaaattgcaaaattggaccgtgaccaatgacttgcatggccacttttttaccatatgcaagcaggtatggaaaatatttacagtatgtagtttattgccgaacatcctatttatggggaccaacccagaactgtgccatgcacctaaccttcccttaactttttccagttgaaaactggtccctaagacttggggtttacttgaaaaggaatttgtagtccccccatattcttttgattgagattggctgcttttcttttactttgacaacttacatttctctggattttcttcagtgttgggctgattaatgtccttgtgaaagactgggagaacataacaacggcaaattttgaggacttcgacactgtgttggttgcagacttgcctccttcagttgacgaatacattgaaatcctcgctggtgcaagctgtcatgtgctgtgggggaagtgcattgcatcttttctagcgctgatgctatgcttgcaaaacccttgtctgaagttcttacaagctgtggtcaggtagtgcctgaatttctcaggaaactggcatcctcatagcaggatcggttttctcatggcaatcatcatatagtatacgctaccatatgcatggttcttccagtcactaaacatttttgtcagtttactgttccttatcatgtaattctcacagcataacgaggatcttcagccttgttgtatctctgcaactttgtattttttgaatgcgatcaagtcctagtctgtgagaaccaattgcttttgcattcattaacattacatggtcaatagtcaagtgcaaactactaagttactggttttattattgtgaaggttgaatcagcttatgattgtcaggcaccgacctgctctcctcttttcaaggggagcaaa

SEQ ID NO: 11104 - DNA, 560 bp, Oryza sativa
ccaaatgagattgataataaccaaaccttttcaggcccttgaccctgcttcgacaaacgctcagcttcaatatcgtactttaagaccctgaagcattccagtctttcctccaaaaacaaaccgtatgtacgaacccatgaagaatagtcccaagctggataaaaagttgtattagaaacaatgggaatttaggaggtgatactaaagaaaattgatgtgctctactaaccaacaggggtggagtcatccttgaagtttgataattgcaaaatccgcactctttgtgtgaaagtaagaaactcttcacggaatgtaggatcaccatcccggagaagcctgtggatcaccacaagtgtcttcagtgcaacctacatagtgcatgaaatgaatgttacattaattggctccagatgtggaccagcgaatacttgcaaatagaacagaacactgaagagtgtctgaagtattgctgatctgctgttgaagtggtggcacgaaaaccataaatcagaaaaacttgtttgggaccaagccgatttactccctccgtttcacaatgt

SEQ ID NO: 11105 - DNA, 2557 bp, Oryza sativa
gttcttatggctacacattatcagcgtctcagtgactagtaacctttgttcatttcattccagatgacctcccttctcagcaaccactcagaatattctaagctccagtgtctccatctttggataaaaagacatgttactgttgtttaaaactatcggttgtcaaaattaagtgctgcttggatcttccacgggtaattaggggcaaatctatatgagaatcatacccttttgtgtataacaagaaggataactaggcgcaaatatgcatagagctagcgatagagccataatcgagcatcagacgggccgatggttagtacctggatggagtacttgagcgcgatgccggggacggtgtccccgcggcggacggtgtgcgagagcgcgaaccgggcgagggacgcggcgcgccagaaggccctcgtctccggctcgccgacgacgcggcgcaccccccagggcgacgcgaaggcggcctccagcacggcgcggtcggaggcgaccccgcgccacagccggcagacgcacgccgccctcgcgaggtcgggcggcggcagcctctgcaggaccgcgcgcaggaggtcccccgggaagtcgttgctccccccctccatcgcagccggggtacgatcggggcaaaggcaaagacggatcggagctcacctcgggcgagaggaggatggctgtggctgggggcgatcgtgcgcggcgccagctccgccgctaccgcggccggtggaggatcggaggagaggagggagatcgcgaggtgaggcggctcgcgtgcggtggcgcggccgtggcggagtctgggatgatatgtggtgtggtgttgacgagtggtgtgcgtgcacggcgcagcagccgccgcgtttgcttaacgatccaatttttatctgaaaaacaaaaaacataaatacgacggtagtagtattttaacggaatagctaacgcgggcctagaaaaccatgactaaatttagtccctctcacatgtttctgtgagagggactaaagtttagccctactttagtccctccaaccaaacaccacctaatagctaatcttataataacagtagtctacttataaataatttgttcgagaagtttaatattttgaaaagcagacggttgacaaatcagcttttgagaatttgaaaaactatgttttcctagctttggacttttagcttatttttaagattctaccattacaacttctcaaaatctaaattaaaggctgaactatttgagaagtttctaattctggaagaaattgaaactagaaatttctacaaaaagatcccgaatcttataactatgattaccacaagtagatcgtaaatcttatacctatgtattgtaccgatactaagggtctgtttagtcggtgaaatgaaaatttttggatgtcacatcagacgtttgaccagatatcggaaggggttttcggacacgaatgaaaaaactaatttcatactccctccgtttcacaatgtaagttattctagcatttctcacattcatattaatgctaatgaatctagacatatcccacattcatattaatgctaatgaatctagacatatatatctatctagattcattaacatcaatacgaatgtgggaaatgctagaatgacttacattgtgaaacggaggaagtaactcgcatggaaaccgcgagacgaatcttttgaacctaattaagccgtcattaacatatgtggattactgtaacacttatggctaatcatggattaattagcctcaaaaaatttgtctcgcgatttacatgcaaagtgtgcaattattttttggggcaattgtgtttcagtccttgatttacaattcaattgtgattttacccttactttttagggtttgtgattttgcccctgcttttatgaaatgaagcacccgtctgcctctggttttgacataagtttggtgggcctgaaatttccgaattaaacgaataaagaaaatgttattattatttgtgaatgaccattctacccttggttcaatgagcaaaatcccgaattcctttactgtccgggttgcaagcgctgggttgcaagtggtggcggcggcgacgcgcggccagcgcgcggcagggaggagaagcggtgcgggccagcgcgcggcggagtcgggcgcgggcagggaggtgcggcggcggcagcgtcgcggctggcgcgcgcgcagggaggtgcggcgctcgcgcggctgcacgcgcagggacggcctttggaggcgccgcgacgaggatgacggcgaggaagaggacattgccgtcgacgagagggactcgctcgggctgccgttgccggtggtgagcaactgctcctcgtcggagtgtgagtacatggccgagtcagaggctgagctggcgaagacggaggagaagtgcgcgtcggcgtcgtcagcgtcggagtacgaaaagacgtcgcagtcgagcacggggagcgtcgccttccatggcgctgccgacgccggaggagacgggcataaggtgagtgttagtgctgcttctattattctgcgtt

SEQ ID NO: 11106 - DNA, 2048 bp, Oryza sativa
aaaagtttttaggaactaaacagggcctaatctggttcatgtctggtaccatagtaatagaactggtacctaccataccgtgctgaagttacgttaatgtaattccgttcaacggtacggcgttatgtggtatgaaaatgctcctcttcgaacgttcaatcaaatgaaaaacgtcggatgcctacgaccagctcagttcttacatgctaatttctcctttctttatgttgatgccagggaaatgctgcaaatcagcagtctggtggattggacgaacccttatcgtactgtaatatacatgcacatgcctagttgtttcttttcattctttcctcctctctttaaatattttttctcctaaattacttatccgatctatggaccgatcacaccgttgtattcgttgcaattaaatatttacaataagatattacatgattatattatgtcaaaagaaaaacatgtgtttcaaaccattaaaacaaaatgtttcatacgtgttagtgatatgtttcaatatgtgtcttgtttcacaaaattcctgaaactacctgctactactctctctccacctcatgcatgcatacatgcatatgttttagcaagcttcaaaatgatttttccctcaaattacctattcaatttatgatccgatcactacattgtatttgttgtaattaaatctttacaacaagatatcgcttgattatattttgataaaagaaaaacatgtgtttcaattcgttaatacttgttgtttcatatgtgacagcggcatgtttcaacgtgtatcttcaccatatttcataaaatatctaaatgttccaattgctgattttctttttcaccatatatatagcatcatgttttacttgttggttaactgcaatatttaaccgttcgatttttttttcaatttaaaaatgtttcacctaatatagtcatgatgtttcattctgtaatgatcaaatgttaccgtgaattgaaacattctttcgctattcgctgaaacattattttcatataagatgaaacagcatccgataaaacattttcgatctacttaatgaaacaattccgatatacttggcgcaacagcgtgcaacagtaaaataattcaataataagctaattttttttatcggattatattcatgtgtggacttgttttaaaattttaattgcaatgaatttaatggtgtaatcggatcatgttttggataaatattttaagagaaaaaatagtctaaaatttgtttaatccatgcatgatggatggctggcgcacctgtgcatggatcgaactgtcgcgcgagacgtccgatttttcgtttcgcgccgtacgtccgacgcgtagcattctccgagtactcgctaaaaaaatgatccaatttgggattcacactcgtgggtttgatgagccggaagggagcacgtcaaagtggggccagttaggacggcccattaggcccggaggagcgcctatctgaagtccaacacccgtccaggcaccggctctccgccgctcgaagcttctctcttctcaccggaatctcgagagcacagcgccgccccgacgacgagatccctcaccggcgccgccgccgccgcggccaggaggccgaggggccatgacgaccatccgccggttctgctgcgacgacctcctccgcttctcctccgtcaacctcgaccacctcaccgagaccgtgcgtccgccctaaaccctcgccgtctcctttttcttctcttgatttcgagcttacccgtcggtatgctcgtcgcagttcaacatgtccttctacatgacgtacatggctcgctggcccgactacttccacgccgccgtcagccccggggaccgcgtcatgggatacagtacgtgttcttgcccttgggggcggctgggtctgtgctagctgttgctagtgattctgcgtctttgtttgtcagattcgctgaaattgtagagtaaaccctgcatttcctctggaaaacatgagaatttagggatcttttggggttacagtgcccgattggaatgtggt

SEQ ID NO: 11107 - DNA, 3443 bp, Oryza sativa
acttgtatggtgatttgccaagtgtcttttgtctccagtagtatcatctagtgatcgtgctgttttcttttctgcatcctgataagattcaacataactctgaaggtgattctatcgttttggaatggaatgcagcacttagtaagtagtctatcttggaatgaggtgctatcttgtaaccataccgttattttcttgtatcgaggagttccacgtctgtatcattagcctccacacgattagaaaccagatgagaccttagtatagataaaatgtgaatgggccaagtctgatattctgcagatgtggagttttgaccttggtagcgggcgtaacgcgagatcacaacttcacatacgttagcactgcagagaggagtaagaaaattcatcaaacatttaatataaaattgccaaatttcttaagatttcttctcaaagttacatcaacccttggaatactgataaacatacgtgaagaacttgcactcgtgtttgtttgagctatgaacgtcgataggaaaaatcatcgatgtatgtaagtcgtcctctaattggccttaaatatgactgtagccggtagctcccatatccggctctcattttatcgtgctcaaaattccactaatatattgacaatagctagaaaaagaatatccattggacagcagcggggaccgtatttaatcttgttagggcaaaaaaagattttggaattcctacaccctccaggcctttatacagtccaatcaaccagtgtctttcttattagggaataacaaaattggtattgccctaaacaacgaatttgataggatacgtgcttcctgaagtccccctatttgtatatgagagcatcacgccctggtcctacgccgatgtaatggactgggataccaaccagctcttctatcctctccacgtacaaacgagcagtctctgggagatcgctgtagtttcgtacagaggaaatgtcgtcctcccacccaggtagaacctcatatttgacctataccaacagagagaacataagaattttcatcaattaccaagagtcacattgagtgatttagtgctctcatatgctgcctgtaaaattatggcatggaatatgagtaaatggaacaggatcaactgctcttcctcaccttaattttctccagaagatcaaggtctgcagggaatgattcaatttctttaccatcttcagtacaatatgcaattcccagctttacttccttgaggccagttaacacgtcgagtttggtcagatttaaagatgagaaaccgtttatttggcagcagtacttgagtgcaactatatcaagccagccacagcgcctcggtcgacctgtcgttgtcccaaacttcattccaaaagcgcggagcaaatcaccagtcttacccaacagctctgttgggaatgggcccaaacctaccctgggtgtgtaagcttttacctgcacatggaaatattaagttttgtagggagaggaaaagtatggattgttaagaagtttaaagatagctgtaccgaccactccaatgagatcaccgatacttctaggagcaataccaaggccagtgcaaataccaccagctgagggactcgaggaagtaacaaatgggtaagtaccaaagtcaatgtctaacatggtggcttgaccaccttcaaccaatattttcttattctgcaagattgattgattcatgaagtgcacggtatcagtaatataaggtcctaaacgctcggcaaacttttcgtacttctcaacctcctctttaagggtcttgcactgtattcaaatccttcaaagcgcagagctgcatctctcagcaaggtattgagtttagcaccaaatgtatccatatgccgcagatcactgactctaagtccattccttataactttgtttgaatagcatggcccaattcccctctttgttgttcctataagggaatttccaagctctacctctctgagcccgtcaacagtttgatgaaagtcaaacaaaagatgggcacgatctgatactaaaattcttccttcacaggaaattccatttgattctaacccatcaatttctttgaagaacccaggaagatgaactactgctccattaccaactacacacattgtcttctcattgaggatacctgatggaacaagatgtaatgaaaacttctttccctctgaattatatatagtatgcccagcattagctccaccctaataacataaaacattctacaagttaaaacaatatatatatatatatatatatatatatatgatcaaatcctattggacaaaactaagtctagtcttattgccaccttaagaaaactgaacttcataaaggtgtgcaaaaacctataaaaattagtcaatacaacaagtgcagagagaacagtaggagaaatgagcactatgtaatcaaggttttccatgaagcaggataatcattttttttaacccataagaactgcttgtgtaaagtgaaaaggcaatatccttgccataaaggaaatgcaccattagttatcaatactgcattactgcctcgactagataaccggaagggttatcggtattttaagatgttttataattctattttgttagtacgaaggattcgacattaaaaaaatgaacatatagaaggaatatccattgtggttatgggtttagaaaaattgggaatagacaaaatgctttctgcagatatattaaactgatgcttagaatagttcagctatccttattcgttaatgatgatacagccataaaaattatcatcataaaaattaaagatatattcaagaatgagaaaacagcaaggctctcgagtctcatcaagaatacgttgagatcggaagggcttcacacaattcaagaaaactggggaccaatggtacaagtacaacccatgctgatatcagtacttatcatcaaaaccaagcaagaaccaaaatggaagggagccttggactactaagcttccttcgtaacacggaatttctcctgttctgctagagttgaatttcccatgtataaaacgactttctgtgatagtgttgcgatcaaaggagtacaaagtagcagtagcttacagtagtacggtaaaggcagtctgcgtggatggcgccggaagataaacacccttcaagtaacgatcataaagcaaactaacgcaaattactactcccctctgtcagaaaaaaaccaacctagtacggaacgtgagacatcctactatgttggtttttttggacagagggagtccatctcagctaaaggatcgcctctggaaactcaccagcgccaacgggagaactcgtactatcctaccacaaggaaccaattaatcgaacaccttccggacaaactgacaaagcaaagaggagcagagagcgggtgtgtttggttgcaagccacacttt

SEQ ID NO: 11108 - DNA, 2070 bp, Oryza sativa
cggcggggtccaggcacggagggaagaatggcatggcggcgacggtggagggaaatcgaggagagaatggcggctggtggtgggccctccccgcctgctgctgggtttggaggcgacggtcgtggatgtgcccgttcgttatcttctctgttcgattctcccgtcgcgagatcggacggctcggatgtttcagaaatgattttcttcaattgtgtgttccaaatcttcaaaaattcgttttggtcgagttttgggggaaagtaagttgttgaatttcaggagatttggtgaaattcgtcatatcgcccgggctcgcatttcaaacaatgactttcagaacgcgtggtttgcttatttgcgttgtactttgggagcaacagtttgaacacagatttaaatttctcgtttaaatgtgaatcgcgctgcttgtaaattttcttaattttgatttgctttcattctagccgttaaatttctggagctaagatcgccatctactcatcatgttgcattttgcagcatcaccaaccggccaacagatatcaggccctaaactcctgattaagaattatgtagctagatgagcacttgagcagcaaccgcgtcaaaatttggaagagtaatagctactaatcatcagggaacacactttggacactaggtaaatagctcaaaattttctactgaggtatctgggcatattcttaaagcccatgtaaaacacctaaacatcaaaatggagctgcttatcatgcataagaatacgtaggtgtgcagatcatggcagcaactccacagaagcagcgaccgatgaacaatttgtcaaaacagatacagcatggagcaaatgaagttcgagcctcagcgacctttggccgaagcactggaatcagcattctttttccttttcttcagcaagttcaccttgtcctttttcctttcctggttaatctgtagttgcaaagggtaacagattagtttagctcaaagccacttaaatttacgctgaaacagggaaatgcttgtggcatctacaaggcatatgttataaaatttggcaatgtggctaaaatttcaatggatgacatggctgcaacaatgaacggatgtgaaacagcaagcaagcagaaagtgacaaatacatgcaaggcataagagcgcagacctcaattgcttgaagaaggcctctctgcttgcgagacataagggtcttggaaatgtcagcagcatccttctcggcttgtttatgagagtcctccatatgatcgtcagcttctttagtatcacttttgtccacaacatctggttggttatctgccgtcctatttgagaaggtctttccttcgtattccatcctcagctcatcgtggactgcttctctagcatctccaactttagaagagaaaaaggcaaaatgagacaacagagaatgctttctgtacaagaagcaaataagatgacagcagaaaggactaatgttttgtactacatggtgttgaatttaccttcctcttcttgtcagcaatttcattagactctgatcgatcaataattgcccctaccagtgaattttccatatcttcgtcccttaaacttggcagaggcaacacctggctttgagcagcagcttgcagcctcttaatggtctctgcatactcaggaatgtaaccctctgcatcattgtccacaaagggagataaatgtggtggaggcaccctgagaccaaaaaaaaaaggaatattgatggcaaaaattaggacaaacataagtataaaaaattagatcaacttttatgcatctttatagttcatttttgcaaactgtgcaagtacagacagtaaaaaaaggctgtcaatttaactaaatgttaaattatacatgaactatatttcagtaaagttgtttccacctaagaaccatcaatatgtgcaaccaaaatgtgaaaacagcatgcgacaaattaaggtattgcagtacagtgatttttaattaagttggaagtgggacaaacattgggctctcaactacaggagtgcaaatattatataatcagcacttaacaactattaa

SEQ ID NO: 11109 - DNA, 552 bp, Oryza sativa
tgaatgcttccagtgccttggggtctgatgtccactctggcgtgtcacgctgcccaagatagatctcatccgctgagtgctttgatagaatctcaatgagcgagacaccgagaatggtttggaattggctggtgatggtgcggatgaagaacttctctgggttctcgtccagctctgtgtactccttggaacccggctcgggcatcggccgccggcttatggtcggacggtttggaagatagcccgcgtatgggtactgcccgaaattgacggctgcgtggagtgctgatgcaatccagatgattgtggtgcaggccttggtgagctcaggcaagctctgcatcttgggccaccagtccgcgtccttgagatcaccatgcccgacttcccgcacctccttccaccatgcttgcagctccacatctccctggaggacaccatcgtttgggtagtagatggcacagtactcagtgacccactgctcgattgcttgccagatcgccaggccatctgttgcataagggtagtccttgatcagtagcttcaccttgg

SEQ ID NO: 11110 - DNA, 912 bp, Oryza sativa
tttttgtcactggattgcagatgcaaagcaaacatggcgtgccacggatatgatgatatttgaacgtggacttcttaaaccgtgctccacttcccaatgtatatttgttgatgattttgtgttatatgaattctatttgataacagtggagcgattattgtttaattacggtggtgcagggttaattaggaggtgagaagtacagatgctataatactcccggattatcttcctgctatgattctataagcacttttatcttagagaaaatttcaaaaagaaaacccgtgttttggggattctgtaacacaaaacgcccagttttgcaatttgtttatttgtcttatatatttatctgtaagcacttttatcttagagaatgtatgagatactttttagtacatatataacattagttgctttttaacaagcgttgatcatttatgtgtatatttaacctattattatattataattaacatgtattatgttaatctttttcagcacaaaattgagaaaaaaaatgaagtagacgagaagaatatgtccttttagccaactaatgtgaattgatgtagaaaacaatcttatgtaataataaaatatgagtattttacatgaatatgaggtttcttaaaacatttggctcaaaacatggggcttcgtgaaacaaatcacagtaaccagggttttatgtaacggatactccaataactgtggttttgtgaaattcactctttatcttatatgtaattattatgttttcagtggtagacgatgtacccgtcgatagcgaggcgcctgtggtgacttcgtcaatctcaaaatttgccggctcagttatcgaagatgctcataagggtagggtttacgtacgtgcattcataaggtgagtatgcctgcattggagtg

SEQ ID NO: 11111 - DNA, 2228 bp, Oryza sativa
atcatccggaaggccctgttccgtgaagttccagttcttgtaaactgctgaagacattgccagagcatgtttgccaggaaagacagtttgttcgaaaatgccaccgccgttgatgagtgtctggcgtgccaatgcattgattgtcatcgtgtcgcgatagtgtggctggaggagcttgtacacagggtgtgtcacactgagctggcggtttgtagcgatcacgaagggctccatcacagcatgtgtgttgagcctacaagagtttacatcaatgatgaggttagcttactgctttcaggaaagaactacagtttgccactgccagtacgtaccagtggctgataagctggtgccaaccggagtcattaacagcaacataagccttggccagctgccacacccaagactcaatgccacttgatgcaggtgtatggaccttgctctttgcagatgttaggttgccctcgatgtgtggcaagctcagttcaattgctagtggcttcagggtatcatcatcacgtaagaacaacagggtccttgtggcataggtgaagataccatcaaggctgttaatgtcaatgaggaatggcatgaaatgatcatgatgatccagaatgtagagcctgttgctatccagtgcctgtgcagagccataattgacaacaaatcaactttggcagtttgtcaaatgactatcgattgcactgtaaatgaaatggatcactgcctaacctgttgcacgctgaggccttcgaggttcttctcaatgtgagctggggtgattgtgctagtctggtcaccgtacttgctaggatcaagagtactttttggtgggaattcctatgaacagagaattatacattagcatcagcttgttttgttcatgcttgctaggagcacaaaacatcaaagactatgtaatgttggatagttcaccgtgagacgcctgatgaccatgggattcagaccagcaagaatctctcgtgcaaattcctcatctgtcctccaagcaacctcgttctctgcaacaatgcatagtacaacagttcgctaattgtccactgctcatcgactatggcaattgacacaatggctaaatcatggtacctttgatgatatcaggtttggggaacttgagcaggtagctgcctccaaccggaagcaggtccttgataagttggacagggaagctcttgcgcagctcctctagtgctgggatgctgggaagcttcaggcctcccctgtagagcttcaagatgtcctcgaacgagtcaaattcaccaggtgtgagatcaacatatgtgcgaatggcaggcaagatgccctgaacaattgccttgatcgagtacccagcaaagtctgacatcttgaggtgcgcgaagcgctcatcgcttggcacgtaaatttgttccagcagtgataatctgctctccgagtttgggtctgcagccatggatattcacgcaaattagatcttactagtttatgaacttgtctgtcaagaagtgctctctagatgcacagaaccaagaggaacactgtaccttttttggtcggaattcggccagtacggccacgacgcgggtaggggtgcttctgcgagccacctaggacagggcgtgggttgtccctgtctggttcaccgaggtcattgtaaacatcgtaccggtagatgcggtcatgctcttgatacggcccttgcctgtcctcccctctgaggtacctcagctcgtcttcacggtatggcctcagtgcttctggcatttggctgggaaggtaagactgcatccaatggaagataaaactgtaggaattaatatccagattccagaactagagaagtcctcactttgcatcacagacttcattctcttaattattggcataatagatgcatctgatgcactcttgcagttgccacaaactttccatttgtgtctagtcattaattttggtgttcgtgatttcacagaaactgttgctccctattactacttcactttggatgttctgcatgtagtttaggagcttaattgcagaactttttactaagtatatgatcgatgattaattaaatataatatagtcattcactatcgtttaaactatgcacttacaagatgttaaattactcacgataaccttaaacaggataagaagatctgccaagaacagaaagggaggcgttgtggtatttagacttgctaatcactcctgacttacattgg

SEQ ID NO: 11112 - DNA, 693 bp, Oryza sativa
gttcacacacatgtaagcgtttggaattttggatagaaatttcgggcgtgacaacatactcctgaattgatgtaagtttcatctcccaaataaacatgtcaagaccattcaaaaagtgacgagaaacctcagattgtgtgtaattaacatcataagaacaatcaatagatctaagataactcaaaattttgttaaacctagaaagatagtcatccaaagcttctccaggtttcatctcaaattttatatactccttttttaaaagatcccgatgaagttctttaatattggtaattccttgatgaaaattactcaaaacaatccaaatctcattagcggtttgaagatgagaaacacgatcataatccgaacgagaaatcccactcaaaagaatattgcgagctttgcaattattttcaaattcaatttttaaagcagcattattaatttgatcaggaatcacataaggattagaaacttttctccaaatatcaagatcctcagccataatgtaagattgcatcttactacaccaagaagaaaaatccgttccatcgaagacatggggcgtagttgtaaatttattagccatggcaaaacaactctagatcagttaaaatccaaagaagaaaacaatgctctgataccacttgttggatcgaaacacaagaactaagccaatgatgaactact

SEQ ID NO: 11113 - DNA, 652 bp, Oryza sativa
gctcatcatgtaccctttctgcagctgctcatcaacctgcttcttgacctcggctaattcgttggccgccattctgtacggtctcttgtaaattggggcggttcccggtgccaagtcaatccggaatcaatctctctcttgggtggcatggtagtgaggtcttcgaggaacacttccggatactcgcagactatgggtatatcttccaatttcctcaaattcttctccacggtgtccactgggatttctgcttcaatctgattcaaagagaccccttgctttggtgagactagtgatttgtacaccacggtttctcccttctcgttggtcaaggtgactgtgcgattcgcacaatcgatgacccccttaaacttggtcagccaatccatcccaagaatgacatctaggtctttggattcgagaagaatgaggttggctagaaatggtgatctttgaatttctattgttatagaagggctgaattgaaccgaagtggagctattccctggggtatgaacccgcatcggtgtgctaagttcctctcttattaacccatgcatcccaacaaacttctttgaaatgaacgaatgcgttgcaccagaatcaaaaagtactgttgcagggattgagttaatagaaaacgtacccagta

SEQ ID NO: 11114 - DNA, 632 bp, Oryza sativa
ggtgcatatcgcgcgaggcgattgaactcgtggaggtactctgtcacagtcctgttgccctgatggagtgcccggaattccctcttcttttgtgccacaaccccatctggcacctgcgccttcctgaagctacggcagaactctacccaagtgacttcagtacctggtgggcgggtggccatgtgattgtcccaccaagctgacgcgggaccttgaagctggtgtgtggcgaaagcaaccttctcctgatcattgcattgcaggagattcagcttcttctctatggcatggagccagtcattcgcctccatagggttggtggtgctggagaaggtgggtggcctgacacgtagaaactctggcaacttggactgagggggagggggaccaaactgttgatgctgctgttcggcgtgctgcagcatccgctggtgcatctgctggtgctggtgctgcatcatggctgccatcatctgggtctgatgtgccattacttggactagcgtcggattctcgggaagtggtggcggaccattgccggaatcgctgtggggatgcgccccatcagtgcgctcttcgccgttgctgccctcgcctgttgcgcggctaccattcctggtgtagaccattga

SEQ ID NO: 11115 - DNA, 17007 bp, Oryza sativa
agtcatagggagaaaacaaatcgatcatatttgactcttttccctccatctctcttaccggcaaaaaaagtagtactggtttatatgtaaagtaagattctttaattatgtgagatccggcttaatgcttttcttttgtcacatatactgcattgcaacaattgccatatattcacttctgccatcccattatatagcaactcaagaatggattgatatatcccctattactaatctagacatgttaaggctgagttgggcagtccatcttcccaacccaccaccttcgtttttcgcgcacatacttttcaaactactaaatggtgtgttttttaaaaatattttcaatacaaaagttgctttaaaaaattatattgatccatttttttaaaaaaaatagctaatacttaattaatcacgtgttaaaagaccgctccgttttgcgtgcaggagggataggttcacatcctgcattaccgaacacagcctaaatcttgttgtctagattcgtagtactggatatattaaatcatgttctaagttactatatactgagatgaatagaataagtaaaattagacccaccttaagtcttgatgaagttactactagctgcgtttgggaggacttcccaaaaaaaaaagtattagccattagcacgtgattaattaagtactagtttaaaaaacttaaaaaataaattaatatgattctcttaagtaactctcctatagaaaacttttacaaaattacaccgtttaatagtttggaaaatatgtcagtaaaaaataagagagtagaagttatgaaagttagaaaaagaattgttttagtagtatacagttataaactattccctctgttctaaaacataagggattatggatggattcgacatgtaccagtaccatgaatcgaatccagacaagttttttatgcatatttattctactataatatatcacatctgctctaaatatcttatatttcgaggtggagactgtcgctatgtttttctgcccgttgctaagcacacgccacccccgatgcggggacgcctctggccttcttgccacgataattgaatggaacttccacattcagattcgataggtgaccgtcgactccaagtgctttgcacaaaacaactccggcctcccggccaccagtcacacgactcacggcactaccacccctgactccctgaggcggacctgccactgttctgcatgcgaagctatctaaaattctgaagcaaagaaagcacagcacatgctccgggacacgcgccacccggcggaaaagggctcggtgtggcgatctcacagccgcatatcgcatttcacaagccgcccatctccaccggcttcacgaggctcatcgcggcacgaccgcgcacggaacgcacgcggccgacccgcgcgcctcgatgcgcgagcccatccgccgcgtcctccctttgcctttgccgctatcctctcggtcgtatcccgtttctctgtcttttgctccccggcgcgcgccagttcggagtaccagcgaaacccggacacctggtacacctccgccggccacaacgcgtgtcccccctacgtggccgcgcagcacatgcccatgcgcgacacgtgcacctcctcatccaaactctcaagtctcaacggtcctataaatgcacggatagcctcaagctgctcgtcacaaggcaagaggcaagaggcaagagcatccgtattaaccagccttttgagacttgagagtgtgtgtgactcgatccagcgtagtttcagttcgtgtgttggtgagtgattccagccaagtttgcgatggcttctcagcaggaacgggctagctaccacgccggcgagaccaaggcccgcgccgaggtgaggtttcccttcgtgcatccgcgcgcgcgcaccgcacgtacaccaccacgtttgtcccatccgttgcgcgtgcgcttacatttgttgtttgcttgtttcgtgcgttgcaggagaagacggggcgcatgatgggcacggcgcaggagaaggcgcgggaggccaaggacacggcgtccgacgccgcggggcgcgcgatgggcaggggacacggcgccaaggaggcgaccaaggagaaggcgtacgagaccaaggacgcgaccaaggagaaggcgtacgaggcaaaggacgcggcctccgacgccaccggccgcgccatggacaagggccgcggcgccgcgggcgccacgagggacaaggcgtacgatgccaaggacagggcggctgacacggcgcagtccgccgccgaccgcgcccgcgacggcgccgggcagaccgggagctacattggacagaccgccgaggccgccaagcagaaagcggccggcgccgcgcagtacgccaaggagaccgcgatcgccggcaaggacaagaccggcgccgtgctccagcaggttcattagcactcgcagatcgtgttcttttcctaaccattctattttgttaaacattcatgctaattgctgcaaaaaaacgctctcttggtgtgcaggcaggggagcaggtgaagagcgtggcggtgggggcgaaggacgcggtgatgtacacgctcgggatgtcaggcgataacaagaacaacgccgctgccggcaaggacaccagcacctacaagcctggaactgggagtgactaccagtaatacggtataagaagcatgtgtcgtctttggcactgatgccaaagtgtacgtgttgtatcctcttttttaagtttcagctcgacttcgacgtgttcggtgtcacactttggtttttcagttgtgctcaactgttcatgtttctggttccatggagggccagtgtggaggtcaatgtttaagctttcgttttaaaatctgataataaagttggttaagacctgaaagcgttatcccttctccatttagcgacttggaaaatggcaaatgagcacacaaaatgattggtgcttagaaaccacatttggagatcaacatattttgttgccagggtttacaggataaacttcagataactgttcatcagccaaaaagacaatgaaaggaagaggtcaatggtgtaaatcatagaaatcaatcacacatcacaccttgcattaatttccagatggaacacattacacatcagtatcactatatgcacagcacaatatagtagattcatttcacagatctcgcactgaaattcatttcagatacacaatttagacgatgtagtagcaaacaaatgccacttataatatacccatgaaaaacaaacaaatacacacacgaacgcacacaaaagaatggggggcagcattagcaatatagcatctgccatcgatctgcgctgctaaaccaatgaccatcacggtcagaagccggcaaacttagatttgatggcgcccacttcatcctcgcccatgagaaacgtcttggcgagcacctccatcggcatggccggctgggtcgcgaagagcgcgaaggtcggcgtgacgaggccgggcgactggctgtcgaacatggcgacgaacgacgcgttgccggcgccgacgttgagctggaagtgctgcaggccgcggggcacgacgaagagctccttctccctgaccaccttggagaagagccggttggccgccgtggtgaaccccaccatgacctcgccgctgagcacgagcacgagctccgaggcgcgcgggtgcgagtgcggcgggttgaggccgccgggcgcgaggtcggtgcgcgtgatggagaggcccagcgtgttcaggccggggaacgcggacaccgtggcgcgcgtggagttgacgccgaacgggttgctcgtgctgggcgcctggacgatggcgtcgcagaagaagtcgtcgctcaccacggacgccgtcggcttgcacgggaacccgtcgaccgctgtcgccgcccgcaggtcggccacgcagatgtcctgaagcggcggcgagtccgcgacggcgaggcgcggcgccccggctgctgccacgacggccaccgcgaccagcacccggagcacgacggagcgagacgacgccatcgtacaccaatgtacgtagccaaagcgaatccctagaagtgaggaactaactagctgctcgatttttctcgagagttgatcatggtggtgaccatgcgctgctggctatatgtaatgctagcctagcgagatgcgtgcacgggtggacgtgacgtgaaacgattctgccgatgtggatgctagctgaatcggtgatggtgtcgctgcagctcagcgcaggcggttgacggggtcgcgaagcgcgcgcgtccatggcgtgcggccggacgatagccaaatgaaatcaagtaggcgcgcgtggcggcatgtactgtttgtcgctgtcgagaccggcgcgtcgggtcgggaggacacaccatttggcaggtccccgggaagtagatgcggagtagcttgcgtcgcgtttccaatgacgcggagaagaggaatgaggtgatcacattaagaaatatctacatgatagttttcttcgccgtttgcattttaaaggaaaaaagtccactctaactcccttaaagtaggccaatctaatttgtaccccttaacaagaaaataagatagaacgactccccgaactattaaaaccagtacaacttgactcctctagcaattttgaagggtggttttgctgacgtagcggtgttaacccagttttcatcccacgtagcatgtgggggcccacatgtcattctttctccttcccttctctcttccttctctctcttttctctcctccttttctcttcctcttcggacgcacgcggggagcgagagcctcatcggcggcggcggcgggcggcggcggagtggcgacagcagcgtgcgggtgagggctggagtgggggtgggcgggcggggccagagtgatagcggcggcaggcgctggagcggcgacgacggcatgtgggcgagggctggaacggcggtggcgggtgggaggtgagcactggagcgtccaccatcccctccagctttgcctcgccatctcgatgtcttcgtcgccgtccgcgtctccttccccacctttcgctgcgctgcctctcccctctcccttctcggacggcggcgacgcttcggcaggcggtggcggagatagaggagtagctcgacggtgtggaggacgcatccgagctcggcgatagagggcgggcgagatctcggcggtgccgcctctcccctttcccttctccacccccggcgatagcctcgaaaggcggcggcgctttggcaggcggcgacggaggtagaggagtagtaggacggcgcggagggcgcacacgagctcggcggcgttgcgaccggccctcgcccgtccgccgccaccgctctcggtcgcagccgccgccaaaaaccacgggacgcaccgctacagctctggtccgcgcccactgttgccgtcgctccagctctccccgcctcggcagacgccgcgtgctccgtcgattcaattgtggtgaacaccatctgggatgaggcgatggtggcgaccggcggtgcggaccagccgtcgtgtacctcgaccttgccgtccccggccatcctccccgcagtcccctcctcttgcagccgcacccgtcatcccgcccgccaccgccacggccgaaggggaaataaaagagagagataagggagggagagggaggggggaggaggaagaaggaatagagagggaaaggatgacatgtgggccccacatgtcagtgggtcccacattatttttctgagaatgacaaataggtcccacattttttttttagttctgatgccacataagcaccacgtgggacgaaaaccgggtcaacaccaccacgtcagcaaaaccaccctccaaaaccgctggaggagtaaaattgcactggttttaatagttcggggagtcgtcctatccgattttctgattgaagggtaggaattagatttggcctactttttaaagaactcaaagtggactttttccgattttaattggactcatctactactaaatttgggcccaataatttgggctttaaatagactcaaagaagcccattgttatgttgaaggcattgtatcccattaagatatcaaaagccactttacatccctcaagtagaggttgaattttattcgtgtccctcaaccataaactcagatacagagtatccccacctctaaaaccattgtagaccaagtccctcgatagtattgagagcagttttgactcatgtggcacttacatggcttgtttaacttggtgcagcgttgacgcaatgcgtacttgggaggataaaaatttaaaaaaatacacataagtatccattaaaaaaattaaaaatgtggtacgacccatatgtcatcacccctttctctccctccctcctctccctccccttctcgccaggacacattagtggtgagctgatgtcgggttggtgggagttcactagcagaaacctccaacaagacgagcaaggcctcccggacactttattcctccaaatcctacgatagcatgtcaatgtcgcgttcactccattcctgtgtcctctacctccagcatctatgatgagcacctccaacaacaacaatcgtaggtcttcctcagcgtcctcaccgccacgggtggacatcaccagcaagaacgagcagctcacgaaggattactacacgctaacgcacgatacgaatagaggttactggaatgcgtggtgtgcctcttggagtttagggagcgggagacaggagttcaaactgatcaagaattaagtattggtgagtcgttggggttagcgtgccgttctcgaggccgatgcggtgaggcggcgacacctgaagtctaaactaagagcaagtatagtaatgtacagtcagctggcgaaatcaaccgctgcgtcatccaaatccaacgtggaggagcgagaaaccaagaaagagaaggaaatgggcgagtcgcgagtcgccggctcgaagcgtcgtacccgaggcaaaacgcccgctcccaactcggtgctggcgattgagccggtgcctgctccacaacagatgctttgcacatgcatatattaattgcttagatgttttaattaggtaacgtatcagtcagcttatagtcaacccattatacaggtgagcttttaaagcatggctaagtgacatggcagtggctttcagccggctgctggctacgttactatccttgctctaagagcaagtacaatagcaagctattagccagctgtaaacatattttaatgagataaatgataaaagagaagagcagtgggctacagatttgtagctagctgtagcgcatactccaagacacaatgtgtgtatgacaggtgggaccatatattaatagtatagtaagcaactattgtatgaattggctatatataaattggagctagtagtgggctatactattaaacttgctctaatgcaccgagggagaagagaaagggttgataacatgtggccatgtgggtcccactacatttttaaatttttaaacaaacacccagtgactatgggtcccacaatatatttaaatttttcttatagtgccacgcaagcgccatgtcaatcgtcacatgggataaagaccaaatcaaataagcaatgcaagcatcacatcagtaaaaaccattcttaatattgccgagattcaattcgcactggttttatggttgagagatgagagtagaactcggcggtgaattaagggatgtatagtagactttttttatcatgttccaatccagcaacactgtcgagtgtcgacctcaggttgcctgcttgggccctaggcctagcatatttcggaaataagaattcctcgatgtaatcacgagcttaccagtcacagtcaggcagtcaccagcaatctaagcgcgtcatacatgcgtaacgcgttcacgaagtccatggtgccagccatggaaagctaactctgttggaactgttctaacttctgatatgccagctcaagtacacattatatctcgcttagtccagcgtgacagcgtcaaccatctgatctgaccagctggatcctggatcaatcatcgaagatgaagctttggaagtatcgggcccggggacgacagcgatctacgtacgaaaggctgggacaaactgaggtacgaaacgacgccgtattactgtgttgctgtttgattgccaatggccagtggagattggctcggaagcctaagtcggcagtcaaggggccgaggcgagcaaccagaatcctgtcaactcaatcgatcgggccgaaggtcactgttggtggacgggcgaggctgtccaaaacgatcgattcgacctgttaggcgttaggccattcacaatgcatctacatggcatttggtctcaactgtccagctaaacagattgtatacgtggagaagaaaagaaggtggggcccatgtattcaccagcttcgcgcgtcctcatttggctccgagagcctcatcagaaaaacagcttttttaatcgcatttacacatgagaaagcaggacagagagagagaagggggagaagctgacccaaaaaagtaaatttttgtggtggggcccgcatgagaaacagtttggtggggtccacctaaagacacgcgcccacgccgcattgtggagagaggagcttcacgctgtttcttcgtacgtggcttcgtacgtggctgtttaggctccttagaaaaatactacacagtgctaatgcccttgctaggcatctgtccgcgcgctcaccggcggcggcggaccgggtcacgcgaccctgaccgagcctcaccgttaaggatcacatcatgaagcagcaccaggccaccagcacgtactacctccgtctcagcagccgtggaaatccgtgtccaacgtttgaccatccgttttatttgaaaattttatgaaaattttttaaaaaattagtcacacataaaatactattcatattttatcatctaataataataaaaataataatcataaaaaaaatttaaataagatgaacgttcaaaacgttggagatgaatagtgtaaaactacatttattttaggacagatggagtactgtctgtctgctggatgtcactgctaatcgtttcagactgcatgcgcctttgcctgaaaggcctctgtttgggattgtttttttttttaaacgaacctctgtttgggattgtcgcggatgtgttctggacttctggtgttctaggcgcttggaggcatggatcagcaaactcaaccaacctgatcgactagcccttgatgtcattataaagcatggagcagcaaaccaacctgatcgatcgattagtagtccagtagtccttgatgtcattatacatgttccccatttttcctggaacatgtgccattcaactagtaggacttttatattagagagaaaccacaaacaaaaattgaacacatttttaggcccggtcgctccgccccaggggtgacgcgggcggcaacacctcaccgtcgccccctcctctcccacgcctcgccgccgcccgagcagccgccggtaaagccgggcggctgcaaagacggcggcggcggggctcccctttctcctcactcctggtcaagtggttggggcgccgatgagaccggagcacgaggggcgcagctcggcgaggactgccagatccggcgccgttgaattcggatccggccctcccttggccggatctgggctggacgcgcaagtcggcggcgaaggcggcagccgcggcggcgaccgcggcgcgagggccgcgcggaggaggcgacggcggcggcgaccgcagcgcgaggggcgcacggaggaggaggcggtggcggccgtggctcgaggaccgcacggcggcgactgcggcgcgaggacctcgcggcaacggtggctgcggctcgcggacgtgcgtcaactgctgcttctctggcttgtgtgcacgaggaagtggttggcggcggcgacgtctcttctcccaggcggcttaaaaaacccatctcgtggagctcctcccctcctatggccagatcctgttctggccgtggggagcttcaggagagggtggacgcggcggcttgtgcagaggacgacggtgccatggcgacgtgcgggaacaagccgcgagcctacctgagccgtggggtggtgaactgggctaactggtggctgatgaaatgatgtggtggttcggcgacggttgttgtgtggttcagtggtggcgctggacgaaaatcattggcgaaagccttgcttagcctttggctggcacgacggcggcggcgcctttggcatcgttcccttcttggaggcgtcgttatagcgttttctccacgctaccagtctctaggtgaaaactgtgatccggtttccggacgggcgatggcggcgtttcacgtcgtatcctccttgggggcatcgtcttggagaaccttacccatgcaccatttgccgcttgtggactcctgtgtcagctcgatgtgctagatgcctaggtgcttggcgaggccttgtccttcttggttcctttcttgtattggtggcatccagcttattcgtctgtctctgtcgggtggagtcgaaactgctacgtcgttggggtgcgacgaagcttggcaacgataacatttgcagtttctctctagggatgtgggtgttgctagtacaggctttggcgcttcaggggcttgaatgatgtccaaagtgtgagcttggtgttgctttgctcggtttggcggtgcctacaatgatgccatgatcgccgtggagttggagctgctgggtcgctgggcggctagctcggtaacgatgacatgtgccttgtgatgtcaacgcggtgtgccgcctcttcagcatctcgacatcggtgttcgtcgttggattccgccatcgtttcgttgatagtttggctagagtgatatagagctccgtgtgctgtgtggttgtaccggccacggtggaaagacttggcgagtctctactcgccgagagtttgttttttctttttctgtaacccgtctgggtttttactcctgtttaatgaaatataattgacagttctcctgccggtttagtttaaaaaaaacccaagctcatttttgagagtcaacgttgtactccatcatgcatactcatgtatgagcatcgcgctgctatttctctatgtatctggatgcatgcatcatgcgtacgtctctctcgcgttttcctactcttccgtacgcagttcgtcgattgcgctcttgttcctactcttttggttttcactttcaagtaaacgccgggtaacccccgcaaagaaaacggacgcccagagacatacggtagcaggcccggtttgaacgcccgccggcgccggatcaatccgtgatacccaagggtgccgcgccacgtatgacgtaccaatcccaaatcgagtcgagtcgagtcgccgggagcgcgcaaaggctttagctagccaacgcagagcatgtcttggaacgcgtctcaagtctctccagtctccacacgtcgttagttccatcgatgatgatctgtggcaagcagagccgcctcaagtagaataactcgcccaatgcacgcgtacattcctttcacctaatgcgtagtattggcgtattgctgacacacacaccctccgtcgtttgactgataatttttttctccccgtcgtttgattgataattcgacatgattgacagcgtattttagctaatccctccatactaataaaggaagtcgtttagaatattgatacggtctctaaaacacaactttgacttcttttttctataaaaaatattcattgaaaagtgatatatgtatacttttataaaagtatttttcaagacaaatctattcatataacttttacattttcaatcctcatgatttatattcccaaggtttaacttaaatattatcctaaacgactttctttacgagtatcgaggaagtacttttctctctctttccggtcaatgtttgatacctatatcaccttgattagaataaacactgcgtaaatatgttcaaagttgttattatgcttatcattagttcacaaccaagccaacaactccctctcggaggtctcggaaatacggcttttgttaattaaacgaaagaatcggctgctactgagtctgctaccctcgcgtcgcgtgcaccaggtgcatatgctgctcttttgtcctgccgcggcagcgcgcgcacggcgactcttatgccaaacccacgcacgcaacgcaagcacatatgcttcgttttgactgctccctgctcaacaccacacacgctctcgctcgcatataggcaggcaatacgtagctacaccgtgcgcgcgcgcgcacacgtacacgcacaccaccaccggccggcgtcgagcgctgtttgcgctgctcgcgcgtccgtacatggcggggctgcagcgatcgagcgagacgttccggcggtcggggtcgtcggggatggtgtgggaggacaagctgcagcagtcaggggagctcgggggcaaggccgaggcgccggctccggccgcgcgggcggcggcgcagcggagcggctcgagcggccacggcgggtacaaggcggggcacgtgcagccggcgctggacccgccctccccgcgcgtcgccgcctgcggcttctgcaacctcttcggcaaggacaagcatcatcaggcgcgcccgcgcggcggcgccagcgccaagagccggcgccgctgagccaggccgtccctgccatgtttgtttgttgagatgctttgttagctccgggctagttgcttcgtgcaaagaaaggttagaaatatatcgccatgccgccatgcgcatgatcaaaaagtacagatacttaagcgtgtttctccgtttcttgtacacacggtcacaatgtgcagtcctctttgatctcttgctctctctcatgaatcatgatctgtgacacttcaatactttcatcaacgttcttcatgtctcagccttttctttcggttattatttcgatttctaccttgtagggcttcaaattcgcagttttcttaaggaatatcgtatctatggacctgtttggcatagctccagctccagctccacctctcctggagctggagctcagctaaacagttttcagctccaccaaaactgggagtggagttgggtggagctctctcacaaaatgtactaaagttgtgaagctgggtttaggcagctccataactccactctagactcaactcctggagttatatttaggagttggagctgtaccaaacatgccctatgtttgcaatttcgattcttttccggttgcatttgagtcaaggggctttttactatttgccacttttagatttggcaaataattatttgccacccctatctcaatgacatatgggtccacatgtgtctatgacatgtgggtccagtggtaaaaagttaattgccacatctaaatgtggcaaatggttaaatatctcttgagttaaacggggctaatcataaatcgtattactagcagtccgtataattaactccgttctgggactaaattggaagcgtgaacccggcacgcatcctgtctctttcgtcctctgctcgttttttctcgcttcgtacgtatgcgacgaatcagcgcccaccttcccctgatcgtgcgtactgtagtagtagtaataccggagaactcactccgttccacaatgtaaatcattctagtatttctcacttccgttccacaatgtaaatcattctaatatttctcacattcatattgatattaataaatctagacatatatatttatttagattcattaatatctatatgaatgtagaaaatgctagaatgatttatatcatggaacggaggaagtagtaattagtagtagtaacaatcagtagttgcttcttctccggccttattttacggggtctgacctcattcgtcccgttcagacttcgcaattgccacttgaccctactaaacaaaaactgtcacgcgttcaaactgcagcacgtatggaacttgcctaggaaaaatacgtagatgcatacgaaatgtcgtttgggaatacttgcagggataaatataatcactggtcatacgtcgggctagtaatttcttccacacgaaagactgcatttattaaccgtagcacttacgtatatttcatttgaccaattgacctcgtgctccagattacattgatctaccttgaggtctcgcttcctagatgaatatacttcattttgttgctcttgcaataaatcgtacagtggaaaacgcaagtttgacaaaatgatgtcatctaaaaatacttgtagcacgctggtgcaataaaaccgcatatatccacttgtgcaaaactaaaggcccttcaacagtacgtttctgagttacattctgaagttaacaaaacaacctggtaaaaatgttaaaagagtccgaagcgttggccacttgtacacagatgctgggcaattctgaacagctcccagttctgggatgaaatatcagaactgtgtaatatcagctctacttttaagtcatctatccccctttatctcagatgtaaaactcaaaagatcttttgttgctacagctctggaaaaacataacaaggagggcaaaggtgctggttataagttggaaaataaccgatttctgtagtgttagaaagtgattacttttaccttcgagcaatggcaatgccttctttatctacaaaaccaaccaagagtcctctatcttgacgatcaacatgttctgaaactactggaagttgatccactccataagaatccatgatcttttcaacagtagttagagatgtctgaggtgtcacaggccacattttacacttaacggctccacaaacataagtttgtacaggttcctgtagcatgaccagaaatgagtaacatacagatagaactacaagacgacaaaaatatatgccagttaaatacagttagcatgttctgaattatgattgcacctcagaaaacaaataagaaaccaactgtatttttctttgaaaatctttaaagcaagcatgaaccacagaaacttcagagatcgagactggccaagggatatagatcccaaggggctagcaaactaaagaatatgttattttgatatgttccaatcaacaacagagaaaacaaatgaagctgggggcagctgatgatctcttattcaggaaagaagaatagaaaagagtgcataatggctgtgtatatccacttgaggatatagaggccagattcttatccatcatctaaaaaaaggaaaagagtgcataaataagacaagggtgcatgtccagttgaagtttggtatacataagtcataacttatgaattaagatcaagcagaatcgcagaaggaaaaatgagggaaaacgacagcaaatcacctcagtctgtaccctggtagttttcgcagttctgcagaaatcctggatatctttgagagttaccaagcctattagagatctgttgctctcaattatcataacaaacggttgcttttccacaagcataagatttagtgcctcaactactggagttgtctttgaaacagaaatatatttagtcttcatagcctctgcaacagtaagattttcctgaaaattctcatgcttggcatcatagacacacagtgaactttcaagcttacataggtcggtaataggcttatctgtatccacagaagctccttgtgtctgggagggcacacttttttcctgtttaaaattacttgatttcacctctgaggaatccggcttactcctattgctcctagagaacctctggggagaagcaatccaagatgatactccaacagcaccaagcaaaggtaaaactatacgatagtcctgagtaagctcaaacagtaggaggacagatgtaagaggcaccttgcatacaccagcaagcgtggctgccatacctacctgcaaagatagaacaaaaggaagcaaacatgcaaatcagttttctttgcttgatattttcgatcaatctaaaagaaaatacgcaaaagagaaaactattgcttatagacatattaccaggccatatgcttgaggtgacgccacatctaggaacgggatttggaacagtgaatccgggccagtaaatgtaaacctcatgacctttccatacgccatgcctgtagctgcaccaataaaaagggatggtgcataatagcctccaaccaatccaaaagccctgcacaaagatgtcgccaatacttttactccaatgagctgaaccaatacagctgctgagagtccacttgtgaatggtcgtgattccagcaaaatatcaacattttcaaagccccaataaagaacttcagggtatacaagggctagaagaccaacaataaggccacccaaggcaggagatgcagcctttggtaatccggttgccgtttgtaaactttgaactatctccatagaaagtgctgtacacctagatagtgtagtagacaccaacccacagaagatgcccagcaaaagatatagaggaagttctgacatttattaagtcatgtaaatatcctcatactttcaatctctggatcacgagaaaaaatatgtaaaaacaagatgttattaacagacagtaagactaatctacgtccaggagggtttaagaggtgttttcatacttgacaaatcaaccttactaatggcaaaactgaattctttaggaggatgaggtcaacaagagcacaaatgtgtggtttcaaaacaaaagccaaacatcaagattttcatgttcccttcatttggtagtaaattttcccttcttcaactatttcagttgggcacaatatgttttattttagaatcgtaaattaggaagtgctacacaagttacaacgagaacatgtcaaaataccggacaggcagttaaccagtagaaattatgtatagcctaaatgaaagtattgca

SEQ ID NO: 11116 - DNA, 1338 bp, Oryza sativa
  unsure (1)..(1338): unsure at all n locations
aaggcgctgtgcggcacgctgacgacgctgccgggggtgatgacgccgcagcagtgctgnacgcggcgttgcgggtggcggagtccaaggccatgatggcggagaagcggctggccgacgtgatgaagtcgcgcgcggtgaaggccgaaggcacgagcatgtcgtcgacgctcgacacgtgcaagggcgcctactcgtcgctggccgacgcgctgcagaaggcgcgcgacacgatcaagagcggcggcagccacgacgacctgatgaccgagctgtcgtccgcctccaccttctccaccgactgcggggaagccttcgacgagttcccggacctcacgtcgcccatacccggggcgcagcgccacgtcaaccgcctcgtcagcaactgcctcgacctggctgccaccatcaaagaaaactgatcgatggcgtggacgcacacgtgccgcgccggccggccgcgctaggtttgtaggctgcttctggctgcaggcgagcgtgcaaggctacaacgacacgtactgcatgtactgcgcacactctgccttttcatgtacgtatacgtgtgtactagcgtacatggtgtctgtatgtacactggtcatggggagaatggggagagcatgcagtgcgtatgtttttatcaatatttctcgcagcggcatatataggcgtcttggtcttggagattagcaaaaagaaagaaaaagtgttgtagttgagtccgggatatatttgtgcatcagtgcatgggaggttgatcgcccagaaaggtatatataatgtacttccttattaaatacaagttactacatacaaatgtttttttttcttcatcgacatttgtacttgcaatgagctctgagcttctctctctgatggagttaattattgaacctgatgatataccataatgggccgcacttctgtcaccatcatgttccggcccaataaaaacaggctgtacagtcatcgatacggaccacaccgacggcctagcataaaagaataagttcagtccaggtctcgtctttacgcggagtttgaatcacgaccataaaccacaatactaaatataacatgtctcccaactatcaaaaccagtataaaaataattctcataggatttgaatggcaatttttgctgacgtgacgcctacatgactagtttgaattagttgttgtctaatatgccttgacgagtcactagaaggaagactaaaaaaaaaaagttgaaccaaaatatttaagctcacgtgtccggaataaataaaaataaaaaagtagtaggacccacatgtcagtgggttctactctcctttctatctgggctgcagg

SEQ ID NO: 11117 - DNA, 529 bp, Oryza sativa
ttgaaaactgcaaataccggtttgtaattaagctattagcgagaagcaattaaacggaaaccccagccagagaaaacccggctgtttttcctgttcaggaaacgaatcaaccaaccaaccaatcacgccgaggcaaaagctttggagcggaaacacgcacacaccaaaaaaaaaaaaacacgaaacgaaacgcacgcacgatgagcgttttgctttggccggcgagcggcggcggcggcggcggtgcttacttgggtcgcgggcggtggcgctgacgaggcggaaggcgacgccctccttgtggccgaggatgttgtggacgccgtcgaggagggaggcgtggaagtcgccgaggccgagcacgtccttcttcaccagcaccgccgtcccacggatcctcccttccttccacgcctccttgttcctccccgtcaacctgtcaaagaacccctgcacctgcatcctcgcagatcacaagtcacaatcccctcctcctcctcctcctcctcctctctctctctctctctct

SEQ ID NO: 11118 - DNA, 3201 bp, Oryza sativa
aaaaaattcacacgattttgcactaaatttgtacattcttcccactgatgccttacaaaaatcaatggagatgtgtaatactactaccttttgatgagatcggcggggaggccctgctcggtgaagttccagttcttgtacaccatggacgacatccagagcgcgtacttgccgggaagacggtcatctcgaagatgccgccggcgttgatgagcgtctgccgcgccagggcgttgatggtcatcgtgtcgcggtagtgcgggctcagcagcttgtgcaccgggtgcgtcacgctgagctgccggttcgtcgcgatcacgaacggctccatcacagcgtgcgtgttcagcctgatcaaccaacaacaacaaccgatgagtacaaatctccgtcgatgaagcgatcgattgctctggttttgaacgtaccagtggctgatcagttggtgccagccggagtcgttgacggcgacgtaggccttggcgagctgccacacccaggcctcgacgccggtggacgccggcgtgtacacggtgctcttggcggcggtgacgtcgccctggatcataggctcgctcagctcgatggcgagcggcgccagcgtgccgtcccctcgcaggaagaagagcgtcctggtcgcgtagatgaagttgccctccaggccgttgacgtcgatcaggaacggcatgaaccggtcgtggtggtccagaatgtacagccggttgctgtccagcgcctgcaaatcgcgacacagtaaatttccacacactattgccatttgccagcaacaattcaggtttgcaagtcacgattgatagcaaaatctgcacgtacgaaaccaacctgctgcacggtgaggccctcgaggttgctcccgatgtgcgccgccgtgatcatgctggtgtggtcgccgaacttgctaggatcgagactacttttcgagggaattcctgcgggatcaacatcgagttaaatttgccacatttcacgttgcagcagccgtgttcactatcaatttggcatgaacgcatcactgatcactcaccgtgagacgcgtgatcatcatcgggttcacgccggcgagcacctcccgcgcgaactcctcgtctgtcctccacgcctccttgtcctctgcatacatagccaaacattacatcgatcgtcagttttcacctaaagattctgatgaaaagtctctacgatgacaggttgcgctcacgtttgataatctgaggcatggggagcttgaggatatagtcgccggcggcagggaggaggtccttgacgagctggagcgggaatcgcttgcggagctcctccagcgcggggacatcggggagcttgaggccaccctcgtacaggtcgaggatgtcctggaacgagtcgaactcgccgggggtggtgtccacgtacgtgcggatcgccggcacgatcccctccgcgatcgccttgatcgagtagcccaggaagtccgccatcttcaggtgcccgaaccgctcgtcccggggcacgtagatctgctccaccagcgacagcctactctccgagtccggatctgcacgcacgcatacgtgtacaaaaaacatcagtcaaagtcaaagtcaacggtcaaccacacaaaccgggcccaccgtcagtgagacattgcagctgaacatggaccagttctggtgtttcactatgacaggtgggcctaactgggaggtatgtgagtgaaggtgccacattctagtgtaaaaatgtataaaaaactttttagaccttaaaatgtttttttaagaatcgtaaaatttttggttgggggatgcgtaccgggtggtggtgggtttgcggccggtgcggccgcggcgagggtagggggtgtcgggggagccgccgaggatggggcgagggttgccggagtcgggggagccgaggtcgttgtagacatcgtagcggtagacgcggtcgtgctcctcgtaggggccctgctggtcgtcgccgcgcaggttgcggagctcgtcgtcgcggtacggcttcagcgccgccggcatctggctcggcaggtaggcctgcgcgtcgccgcagaaaatatatcacaaagttaattatagcacgtactcgtattaatacgcatcgctaattactcctacttaattggttagttgattgcccaaatcagtcccttgatacggcaccggccttggacacctggctgcacgctgaacaagaggcaggcaactatctgttcactttaaaacttttaccgtgtcatgtgttcgcaaagtaaaatcgagtgctgtgtcgttgatcttgttgaaaaagcttctcggggccatgaaacaatgccgtctaaatgggtgtgaactgtgaactgtggcaactatgatgagttgatgactcacgtgaactcacatgccttcctgagtccaaggactattccaatttctagtactatagccacttttatgttgttatcatcaggaagcatatccattgtagagctgcttcttttttttgaacagtgctactaaatccacttcacctaccacataaacaacttacataaagtccattcacttctcacctaaccaaatatcttccctatggacgcctaccaaacgacgtgaatcaagcaacttactacataaagcatctacgaactggccaaacaaagaagaacggcaaatggttactgtaatagtgtaatttacatgcagggtagcataatacagtatgcagcagagaagaactcacatcgttggcgaagaagacgcggtcgtaacggtacttgtcggcggggtagacccaggagttggcgaggaagaccacggcgccggcgcggccggggacgtcgtcgagggtgatggtcttgaggaagaactcgttgctgtggtggttcttgacgatgatggcccccggcacgccgagcttgtcgacgtcccagtcgaacgtcacgccgaaccgcgactcccccgtcgtcagcgacggcaggctgctcgtcagccactgctccaggctcgcctccgcccccaccttcccccggttgccgttgtctgcacgccgatgagaggatcatgcccaatccgtcccgttaattagtccaaaccaacgactaatcatgccccagctgttaattatactacgtgtcaccacctcgcgacaccagctatagtttcaggcatctagttcaaatgaggtactacttcttctttttttttt

SEQ ID NO: 11119 - DNA, 5082 bp, Oryza sativa
ttttagtcccggtttttaatggaaccgggactattgtggatttgggtcgaccgaccaaagatggtttctctaccagtgggacgcaggcgatgatggcggccatggcagctgtggcagacgaggcggacgcacgcgacggcgagtcggcaactgctgtggtggatgacggcgaacgcatgcgacagcgacgaatgcagtggaccatagtggcggccatggcggatgatgatggataggcgacagccacgacgatggctgcggaggacggggcgatggtcacagcggacgccgccgccgccgacggtcgcagcgaatgaggcggacgccggtgatgacgccaaccttggcggaggaggcggacgcacacaacggttacaacggcagtggacgacgacgatgggcacggtggcgattgcgacgaacttagacacggatgatcggtacaaggggccccagaaccttgggcggagcgtgcagctgggcgacaaattagtcgcccgctcgcgctcgcgcttgacccctctctcctccacgtaatcgcaaaatccgagctggcgttcttatcgtcgattattgtacccgctctaacaggtgggaccatatattaatattatagtaagcaactattgtataaattgactattagattagctataaataaattggagctagtagtggactatattattaaacttcagttctgatctcttgctgcatacttgatcatgtggttaattagcgttgccgagatgcgtagcccggttggcctaataaacgtaaaagcctatatttaaattttcaaaattttcaaaattgaaattgcagatggttttaagatattttcaatatacttttttttagtattgacttctaagtcgatacgaacaaatatataaaagttgtacctataaattaactctttattttatgtttaagcttattaggaaatatggacaaccaatgaggctccaaatgatgttcggaagggtaactttaccatccttaaaaaagtatatcgggagataccatactttctagtgtaaaaatttagtatctccggatacttagtacttcgatgtaccaaaaactaaaaactttagtgtaaaatttatatacctcgaggtactttttaaagtaacataaaatttctcttttcggaagctttcccggccgttacccgacggggttagtatgatttcaaaattcaaatcaaaccatggctaatgacggtatataacatttaagttcttgtagagtataatgacggtcaataacatttaaccatagcgaaagtttttctatgttactagttataggtccacgcgatcatcattttctttattcactttagtggaggatttggatctgatggattgatggtttttaaaatgataggttttcttgacaagtgaaagtcagttctatttttttttaggagtggacgggttttatggaagaataatctggtgcgcatagtacatacttcctccggtcccataaaaaatcagcatagtaatgtaccacatcctagcactgcaaatttagatatacgtatgttcaaattcgatgtattagaacgtatcacatcgattttttttacgaagcgagtactccatatatcaacatatgctaaatatgcgcatggaggagtcggattatagcaggtacaatagcaggctataaaccaactgcaaacatattttaaggagataaataagaagagagaagagcagtggactataaatttgtagtcagctgtagcacgaactttaagacgtagtgtgtgtaacaggtaggagcaggtattaatagtgtagtatgtaactattgtatggatgagctattagaatggctataaatgaattggagctagtagttagctatactgttaaacttgctcttagctccgatttttgcgacccttgtcacaatcacagttgatcgagtaccaaactttccattcgtggattccgttggtggcgttttttccgagggtagttggattcatccacaggatgatgcagacgtgtcagctgctactatcgtattggcaggcagtacaatcaacacttatccagacattgtagcacacaagtactcctgctcttaccacaacaaaaaaaaaattaaacaaatatttatccagattcatcctcagaagttaattttttatgggacggtatgtatattttacaccttcaataaaaatcattttttatttataaacctttatcttataaacatgaaaaataccatatcaaaatcatagctagaattgattttataagatcataactatcacaggttggaatgacaagcacatcaatgtagaatcaaatgctggctctagacacgtactcccactgtcaaaaaaaaaaaccaaatcccaagtgttgtggaagacggaatacggatgtcggacggggagagtccccccaaacgattaatcggaatacggatgattagtcggaatatgacggaaatttaacgttttgcaaatataagtacatagttaataatagtttgtccttttagaggtaattaaatccatatgaacacattctagtttcctagtatatatatttaaatagaacaaccataacatgacattaacttaacatacacgtactaaagttaataatgcaaaaaatatcataatgcatatttatgcattaactagtggtaggttcagtttataatgcctgccattgctgctataacaaattatatataataataccatgataatttgcattacacgttattgaaatcttatactagtattagtgcatttgaaaaatatttggtcttcaaagagattaatatagtagtacatgcatgctgtacaggagtacgagagaagacaactaacaggataggctattgtgcgtgggctgggcccagtgaatttgatcatgcccgattatatactgccaatacggccgattagtcggaaaaacgctggattaatcggtaataacaggaattacgcgtttttggacgactaatgaggaccgttttgccaaaatgtgacggactgcttaccgtcaccgttttaacgggcgtcatagcggccgtatcaaccgtcttccacgacactgcccaatcctgagtttaaaactggacaccgttttttttcgagacggaggaagtatgccttaggctgtattcttaattcaaagttcccacccttagtttctcatttctcacatgcaaatttcccgaattattaaccgatatattcttttaaaaaaatgtataaaaagttgctataaaaagccatattaaattatttttaaaatttctttagctaatacttcatttatcatattttaactatcgttccattaggttaggcgctcctaaccccttcggaatttctttagctaatacttcttccgtttcacaatgtaagactttctagtattgctcatattcatatatatgctaatgaatttagttacatatgaaacggatgaagtacttcatttatcatattttaattatcgttccattaggttaggcgctcctaagggcaagtactataagcctctacatgttgcccctaaatttgccacataaaattaggtgatgagttggaggagagaagttaggagagagagaatgagccacctctcatgaaaggggcaacctccacataatctctaagaaaaatataagatgatgtgagagtaaactaatattggggtttgtgtactagaggtggcatgttgtacttgttacctcttaattaatgagaatatgacatgatttaaattagatctggtactcacctccattataaaacttaccctaaccccttcggaagaacgcgacctttaataagctcaaggaaacaaacccaggcaattcggccgttcagttcttaaaggcccatccactatacgtgccaggctatgtaggccgtaatccgggctttcgacgcgttgaagtcactagttagcccataagtatacgggccttgggtcaccctaaccttggcaacccagccggacgaggatacagacccagcgtacgtaagacgtacctaaacaattcttacaaacttgtatgaaccgtttgatttagttaactaaattttttaaaaaaaacaagatttaatcacatcatgatacgtcaggatttgtaaaatgtttgtacaagaaagtttgcatatatcttttccctgccgtggaaattactactccatgaaaagagctaggctaggaccaaactatttttttttctgctttctacttaaaagctcagctggtttctatagactagctatactgtgggtgacatgtcttcactgtcatgcatatctatatccaaaagtcagaatgaaacttatatatagacgtaatttaagacggtaaaatcccgcttatatatagaccagcttaaagaaataatagcggatgctctgaccgtctatatgtgataaaataagcagacaaacaaaggccatctagaagagagacatactttttcgaactgaaaaacccttttcaaaagatcatggaagtaaaccggcaatgcagacaaaataaggcgtgtttacgagcgtagaggaattaggcctcgttctttttctaattaagatgagattctatctcaatttgtgttagcacgcctttaaaatggttgaacggtacaacgttactttaaaatatcaaataaatctatttattaataagttgtaataattaaaatttagttaatcacgcgcgctgatgacttttttgcatgtcccttatttaatcttaattttaatcttactctaaacacaagtgatacttgttctttgcgtctcagcttattacaagagttacatatgaaaagataaaactgctttcgtaacatgaaaataatctaggactattatagcatattctcgtaccctgcggctccgactagctggccagcggcctagcgttgtactctatccatcagctgtactaaaaaaaaactatttttacgtgcgattaaaattaatttttcacatatagctgccagtaacgtaaacaatcatcgttccaccgtcatcgaatataactcagataacacaaaatcaacaaa

SEQ ID NO: 11120 - DNA, 1581 bp, Oryza sativa
ggcgagctcccaggattgcttcagatggagaatttcatcatctttcactgtggcgtggttcatcatggtgttgtctagtagcgccttgactcgagatttgttgggcgtgatgagcattttcaggtcaccggcgagacgagcttccaccctaacacgagcagtcgagggtcggggttgttagagataatgcaatctcctgtaatctctgtatgcgcaagatgaggaggccggtagtttgttaacctgataaggttgttagagcatgtataggagatccggttcctcccatctatggcgcatatatatctgtaaatgatcgcacgattcagtgctgaattaacacgaaccgtcgcatcgacgacattacctctagattgagttttctttcaggggtggcgggcggcgacggcggcgcaccggagggctatctcggcggtgatcacggtggcgccggagtcgaccacgaacgactgctccattccgcgccggttgacgatgagtcgggcggcgacgagggcgtccgccccggcggcgtcgaggtagcgaagtgcctccacctcggggaggtaggggaagaggcaggtcatgaaggcgacgagcccatccagcgaccgctggaacatgtccggggcatgctcttctccgccgccgccgccgacttccggacgccgggaagaggacctgatgacgctgttgacgacgatgttggaggtgggagaggaggccgaagcagaagccgccgctggagatgaactcctcctcgagacacttcaaccgacagtggtcgtagcacctcgcgatcttggcaagaaccggcacactctcggctttcgtgtcgcctctggagtattcgtccttgaagtttcttggcccgtagatgcggggaaggtggcggcggccgcctgggacgctccggtgtgacatctatagtcgatggtttggaggatcgggtggtggaggcggcgatgtcgtcgaggatttggagatcgggagggggtggcggcgctgcacctctcctcctctctttagtcgatcaggaggcgaaacgccggcgccggccaaaacgcgcggtgctgcttgcctgcttcctttcggtttttttttttttgtgtgtgtgtgtgtgtgtgtttcactgtttggactgtgccgtggattgattcgtttccttactataaacatcgccgtattttctccggctgggtttccggctaattgcgcgcgcgttctctctctctcacatcttaatatttcgcaaaaaaaaaggatcttaaggaaaatcagttggctgaaaagacttttgaaattgagagaaatttatcgacagatgtttagcgatatcgttcgttttttagatgggccgtgacggaccggcacggcctgctcgccgtgccttgccggcacgcgtgggtcaggtgcgtggcccaagcatggcccaatgaaaaaagggcctctccgtgatgaaccagcactgcacaggcacggcccaggtcaaaccatcggaagaaaggtgacttgaactaaccgagttcttcctcgatagttatttttccatccaagcaggtgtacagaaattggggtgca

SEQ ID NO: 11121 - DNA, 531 bp, Oryza sativa
tctccccgaggggtcgggccgctcccgtttcggccccgagggctggggcgccccggccccctgtgggtttggcgccacgtgtgtgggttaggtgagcacagcggcgctcacctaaccgcgtttattgcgggttggacgagcgccccatgtcgcatttaatgcagcgcagcacactcgttcggtccgtgacaggtcacagtgtgtgaccggtcacagaccggtcagatcgtgggttaggtggcaacaggcggcctgacacacgcctcgccccgtcccgtcggaatgatgagagcctccaggcactcgtccctagccggagccggcgtgggaactcctggagttggcacgtcagccccggccagatacattccaggcttcatggcaaccattgcaaggaagtcattgtatgaagaagggcagacgtgtagcatgctgaactgacacgtggtggacaagaatgaccggtctgtgactggtctgacgccggtcgcgtcatcggcagacaaccgtgctcccgcgatgcatctgcct

SEQ ID NO: 11122 - DNA, 12129 bp, Oryza sativa
tgtttcagtttgttggatatatcagtgtggaattccaattactcagtgacgtcatgctatttttgttcactaaacttgaccaacaatctttgttttcacagacaaaactaagagtaaattatattattgttattgaagtgatgcttgttgttgatatcataatggatgttattttcatatggtcagtgtgtaacctaaactaaaatagttttaaatgataaatagaggttccctattttccagatctgtctacttggtgttttttgcttttctttttttatttttcatgctgtgcttctaactctaagtttcattgctatatcaactcagaaatgaatttaaacacgagcttactttactggagaaggcccgccatccaaatttggtccaatttgtgggagctgttacacaaaatgtaccaatgatgattgtttcagagtatcatcaaaaggtaagctgttatgattgattcaactggaggaggcaacgattgtctttttacacataattatttcctaatcatattccttcaaattgataatttccttggtgcaatggttggcagtctatggacaattttcacataatcttgataagagtactatgaacttacctgaacagtatgcctcttttgtcatcaatgactaaatctgttttttttttcggattagggtgatttagccagttatcttgaaacaaaaggtcgcttgcagccttacaaagctatcagattttcccttgacattgcgaggtatgtcagaagacatattcaatagagtaaaatgaagctcatgtctgctagctttggaaacctgattttatatttttctacaaattgagagagcattcgttttttctcatttaggggattaaattatctccacgagtgcaagccagagccaatcatccatggcaatctgtcaacaaagtaagctgaattaaattaattttatcattgggttggttcaatgttttgaaccatactgtctttcaacttgtgcactgtatgttatgatattttggtaaggttgcagaagcattgtgcgggatgatgaagggaaacttaaagtggcaggctttggctcacgtagtctgattaaagtctcagaagataatccacaaatggatcagacgacatcaaaatttaacagtatgttgaactcttgttttgatgctacaccctgaaattgctcattggcagtttatatcgacttcagttcatacatattgggcatattctagtgtcagaaactatggcaaattggcaatatattgtactacttaaaattcctaggcgatgtacaaaagtgcacatttgattggggagtgactaatcgtgttacttattggtctatacttctttaaaataacatgtggtttctagagcctcatcagttgcccatattcactaataagccaaacggcttattagggaatatcgttgaaatggatatatgcatttatgcattttggaaaaaaaaagggggcactttatacgtgcatgaagcttataaccgattaaatgtactttaaaacctggttaaatggttataagttatttatgatgttaatcctttagacggaacatattcttttttttagataatggaatgagtaacatcccggcctttgctccaaagagctacagtcctttagtcaattttattggccccgttgcagctgcatctgttctttacgtgaagttaagacttatgaatgtttttctccctgtattgttttgtatcattttaactaactttccatggcctgtaatagaatcggtttactatgggctgtgtgcatgttttgtattttatcttctattatgtgcaaaagagtcacttgaacacttggtgttctatcttgtactcaacaatcttcataccgtattttgcctaggtgtatacaccgctcctgagatgtacagaaatggaacgtttgacagaagtgtagatgtatttgcatttggtctcattctttatgaggtatgtaaaagcattcatcttacacgcaacagaatcaatttgtactcctatatgctaaagagttgtcacagttgaatgtattgaaagagaagaaaaaaaaatccacagtggtggtttgatttgactccgatatttacttgaactggcatctttttaaaatggcattttctgcatggacttttatgattcagatgattgaaggaactcatgctttccacccaaaaccaccggaggaggcggcgaaaatgatttgtttggagggtatgagaccaccgttcaagaacaaacccaaatactatcctgatgatttgagagagtgagtgaatctttactataagcttttcaactagtaactagaagtagtttctatgcactgtattattaccttggtggtctcgcaatgagctttgtttctgctcaatcaaaattcgcaaccgagtttaatcgtttggtttatactccgctgataagtcgttttacggcttattatcaatccaaaaattaatttatgggtaaagcttttatatatgttctcttagcgatttaaaagccaatataaatatgataaaaaatcttaaaatcaacttaaaattaggttataaaaatcaaaattctggttccgttcgataagccaaaaggcaaacgatgtcgctttgcaaaagctgcttccttcacctttttttcttagcagctcggctgtactgtggaggtttagactttagcacctaaaacatcatcaagcacggtgttcttttcaatgcaaaaccgcctatgtttcattttgtcttcatgccatttgcctctcacggtggttcgttgcatgcaggcttatacaggagtgctgggatccaacaccttcggtcaggccgacgttcgaagagataatcgtacgcctgaacaagatatccacgagttttactaagcagactcggtggagagacacttttaagttaccatggtatacagctctccgagctctcaaactttagttcatctccaaactattttgaactttttttatttcccctgattgttctaccatcagaatctgcctggttctcacgttttcacctgatacaggaaacaagcttcagagagatagcctggttgccgtcaagatttccgccctttttgcatatgtgagtaaacacggtgaaaattgtatcgagttgtcgaggagatagtggtcatttttcacgtttttgtatttccaaaaaatatttgtaactataatcagcccgcttttactttcttatgaattatatcatttttaactggaataatgtgttaattttctgaacgttcaacgctgctcgcaagcatttccccaaagccccccttgccgatcaattacattttatatttgttgaaacttccacacaaatttcgtgagctataacatcgtaaaaagtttgaaaaggaagtctaatcaacctctttgttaagaggacattaccatgtaactctgcagcggaaaaaaaaaactagatatatccatgagctccattgcaggagggcaagcagataatgaagtacatgaggaatataccttaggagttatcatcaactcctcatataatggatccatgagctccattgcaggagggcaagcagataatgaagtacatgaggaatataccttaggagttatcatctgctcctcatataatggattttgacattttacttaggagtcgtattgtttgaccacttctcttatttaaaaaaatatggaaaaaaaataaaaagttgtgcttaaagtactctggataataaagtaagttataaataaaataaataataattttaaaaaattttaaataagacgagtgcttaaacagtgcaagtaatcttttatattagagacggagggagtactatcaataacgtgtgctaaaaaagaaaaggtagcggaagcatatactccaccaaataggctgctcgtattggcacctcatcaaatacaaaatacagagcataaaaccgggggaaaaatagtaagaccgtaacaaattccaagttctacagttattttaattttcaaaacttatactgtaattccaagttgcaggtcacaagctgagcaaaatattgtgaccgagttgctggaaggagtacgcgcctaccctagcagattctgatacctttgataggatataaaacggcttattagaaaaataaattacgggcaaaacttttatacatgtgtacttagcgatttaaaaaccaataataaaaaataaactgcaataacaaactctaatataccaactctaaaattaaatatttaaattcaaaatttgatagctgcttataagctgaaagacaaacgatagaaacatgccgattcttttctccgcattagaattggcttctccttcgacagagataactaaatatggatatgtaaaatgagaaaaaaataccacataattaataaagttttaattattccaaacataaaaatttgatttatccaatattttaagacaagctatatatatatatatataaataatttattcttttttaatagatgatgccattaacttttaaacacatatttgaccatttattttattcataaattttatgtaaatgtataatatataaatcgtacttaaactaatttaagtgataaattaacttataacaaaataaattataattaaatttttttaataagataaatggttaaacatgtgacaaagaaagttttttctgaaacatgtgaacaaagaaagttaacggatgtaataaacttcaacaattttagaaaaaaatgttaaatctgcatcttagacagtccccacatgtcattcgctgccgcgccgcgaaaactttatttccccctctccctattttctcgcaattttttctcttctctcggccgctgcacttttttctttctttcttctcacggcttgtctccccttctcccctccaaatacccagcggctgctcttctctctcgtccctcctcttctctctctcctcctcctctctccaaaaccctaacccctcctcgatccaagcagctcgacgggctcggcggcgcgcctctcgcccggcggtgagccgattcactctccacccccgctttacctcgagacgatccctgggcgtgtttttctttgatttctttcccctgggtttctctgctgggggattcgcgtttgagccgcgagtaggtcgttgggtggagtggatcgggagccgggtgggtgagctcgctctttgctcatcggtgtcgcgttctttttgtttttcttttgggtgatttggctgtggtcatcttaggattgatttgtcagtgttgatcaatgcaaacgaattagtgtttttcctaaaagttctttttatttttttccatgatgttgtagcgctacactggtagatcctaagtgccgtgtgtttggattgtctctgggttgttggttctctgtagctaccagaactgtatctttccctcgattatttgccttcacaggaattgtaaatgagtggactttaatttactgtgttacttgggttccctgtatctgtactctagcaacatgggagtagctggttccctagttccagctcgcgatagtaattttcttatctgttaggttcaatgaattgattcctattccattctttacatttgttagattctagcaaacttctaccgatgttagtgttgtgctgagatgcccttggatgcttgaagtgaatttctggtgatagctatcttgttgatttaaactcccacttcaacacaccacgtgcagtattgtgggaactctggataatccttatttcatcgttgaaaccagcaaatgtagggcctttgggggaaagtagcaaaatttgtttaaacattaagctagaattcttggaatgaatattgttcactcatatgtgctgcttctttcttttttccctttgtggataatccacacgtttatgcttgaattggattatttcagggtctttgtccgaaaaaggcatgaccttggccttctaattggaaaggtgtgaagcaattaagtatggcttcaagggcggtcatcagaagaaggaagtatcttttggatcatgttaacgcacctaccctctcattgtcccccttctctaccttccaacatggaagatctggttctgaggatgaatcaagaatcggacagcgatttcttgagcaaagctctggggattccaaatgggagcaagggcagtatggtgtgaaattgataaagggagatctactagcccttggtaatgggcttctgcggcgcccagcccatgggatttctctacctgcttatggaattggaaggaaggaatttgggttgcctatgggtgctagacatttgctgcagtcagtccgcacagcctcaactgcaacagctgggcaacctaagttggatattgaagatgaacagagtgaggatcagaaacagaacaaaaggaaaaaggaggcatccccagaagaatgtgatcaggctgtggaaggcctaagcagtgcaaaagctaaagccaaagctaagcaggtacaagaatctgtaaaggctggccaatcaattgtacgaaaattctgggcgaggcttctgggtattggtcctgctctccgagctgttgcttcgatgagcaggtctcacttccttctctttgccctccagcccataattttaagacaagaatattaatttcccctttccctttcttttattaacatttgtttctttttatgtgttcagagctgattgggctgcaaagctgaagcactggaaggatgaatttgtgtcaacgctgcagcattactggttagggacaaagctactctgggcagatgtgaggatttcgtcaagattactggtgaaacttgctggtggaaagaacctttcaagaagagagagacaacaactgacccgtacaacagcagatatcttcaggctggtaccttttgctgtgttcatcattgttccattcatggagttcttacttccagtgttcctcaagttatttccaaatatgcttccctcaactttccaagacaagatgaaagaagaggtatgtcagtgtaacaacttgagttacataatatgctaatgtgatcaatattgtttaggcgtttgattttctctacttggtgttgtcttactgatactttactaatgcatgtgtactatcattatggtaacaagtcaataggaggttgtatgcatcttccatgtttgctaatgagagatttttgcatctcgagtttaatttggtgtccccttgtaccacctatactggaaccacaaaaactattgcagtgcaaatcgattggtttaagaatgtagttcactcatctgtgcaggaagcgttgaaaaggaaactgaaagcaagaatggagtatgccaagtttttgcaagatactgcaaaagaaatggcaaaggaagttcaaacatcacgtagtggagaaataaaacaaacagccgaagatcttgatgaatttttgaacaaggtataagttctatacatgcgttgtttgtcactagaaggttagacgattttctgaatttgtttgtcgaataactcactttaaatggtaattaggttaggagaggtgaacatgtctcaaatgatgaaatcttgaacttcgcgaagctgtttaatgatgagctgactttggataacatgagcaggttaccattcttaatatacttgtaagttcatcatcacattacactagagctgattgctgattgatatttcttttttcaatttttctgcagaccacgcttggtaaacatgtgcaaatatatgggtattcgacctttcggtactgaccactacttgaggttcatgcttcgcaaaaaactgcaagagtaagtacttgcgtcgagaagattatatgacatgtatgaaaatatttaacttaacaactggagtgccaattagatttgcatatttggtgtcttaaatctgtttgacataaatatgactggaagtttggaatggtcaattttgaaatacagcgagtgatggatacctggggatagcttattgcttagtactttctctcataaagcttagaagacaaccatcaaatggcatactgagtgatttttgcaatcttgtagtctcttatcataattgcataatataagaacagaggtgggtggcctgcaaattgtaaaacaaaggagtgatttcaagcaaaagtctacggcacctaattcatatgcaaagaaaataaacagtaatttttttgctggatatgcaactgaaacttagtaaacaccagaatttgtatttgtttgtatttttcaagatctatgtaccctaagtggctgtggcatacatttgactcgaacagtttctcaggtttaacaactatgattatttgctgtacagataagatattttaacagtatcttattattcaatgcactagttgttttgctatttactttgctgccgtttgcattttccataatagtagggcgaaatatctggttattgtttgtagtgagggcccaccttcctgatccatagggggcgtctccccgagttttttttttttttggttgggggttggggggggggactggctttcgtggccttccccagcccccggtttcaggtgtattgaaatgccctgggggaggtctttccccttgggaccgagtttatttatttttggtttgtaattatattcttctatatgtagcattaagaatgacgataagatgattcaagctgagggtgttgagtctctctctgaagaggaacttcggcaagcctgtcgtgaacgtggtcacctaggtttgctgtcaacagaagaaatgcgccaacaggttggttttgcattgtttccgctatatgcatatccacacaatttattcactcttttacttgctggaattatttgttactctcgctgcctatacgtcactcttggcattcattcctttctcacattatatgccattcttcctttttgggacgaattagttcacacctttttccatccactgtccatttagtccaaacaacatatccgtgataatgatatctcatgcacatgtctaggcttaacttcggtcattttaacacacctttgattcttgtgtcaagaatgactagtgatgcggcatactcatttttgtgtttccatagattagagccatccatcaatttccatgccgggcttatagttttgttctacaaaagaatatatgtttgttctgtgcaaaattatttgtcctagttgttactttctcattctttagtttattacttattagtttgagacatatgatctcattagattatttcttcttgggtaatgttctgttaggtctgataggcagatgaaggaaagttgtaactagcacttagcttctgcatttccaccttgaattgagcacataaaaaacttgatcacatagcttttaaccatactgttgtgtgttacaaaaaactaactgctatcttgtaactgaatatttttctaagctagtaattttgcttcctgtccagctccgagattggttggatctctcacttaatcatgctgtgccatcctctcttctcatactttcaaggtaacattgattgatatcacatatttctcgtttgctatgatactgctgtttgatttgttcgtgcttgattctaactcatatctggtgatgttagagcttttaccgtatctgggaaaatgaagcctgaggaggctgttgtagcaaccttatcttctctaccagatgaagttgtggatacagttgggaccgtattgccatctgaagattcggtttctgagaggaggagaaaactggaattccttgagatgcaggaagaacttatcaaggtgatgtatacataatatggtcctttctttatgtacataagatatttcacttctgcttgtgcaaattaaacagttattcttggggcatttatgaaatcagtaaatcactttgattgtacaaatatcagccgatgcagaactgccctctgttaaaaatgcttcctgtgtttaatctttatgtaccatatcttaatttatattaaattgtatttgacctagttcagaaacacatccatttataggacaactgatggatcatctgcactctgcattctcagattctgatttgtgtgaatgttaggcgtattagtatttagtattgcatgttctgttgtgcccttgctaggtttcatgcttgaacctcataggatcttccatatcctcttggtaatgcatatatcagaaacagtacatggtttatactattcaaacttttccttgtgaagaacaaaaaaaagaatgactgaaaaaagagtaattggagaaaacaacacatatacgatagtgcatctaaattgtgatgcattaactgattcttgtgtgacgtgtgttttcacacgtgccaaagttagactgttaagtttctgtttatgtgcccatattaagaagtttggaggagtcattacaaattttactcaaatttagactgttaagtttctgtttatcagctaatccattggatgtaagaactataatatgctgtatttacacttagcttgagaagaacataagtctgttgatgaaatctgatgtgtcaactttagtttaatattgtggaaggaacatgctttttcctttttctgaaacaaattactttcatttcaacaaaatactgctagaagtaggacttaacagtatcccaattattttatgttctgcgtgatacttctaaaattcctatgttgaactgtagcccaattgttctatcttcaagatatattggctacattggattgtaatgcttttgatatgaaaataattccgtgggagagaagacgaacgagaaagaagaaaagccgaaccggagaaagaagaaaaggccaactcaaagaacaaaagcttgtgaggagaatttgctttgaaggaaatgactgtcctactgctagggaagaagaagaactgagagaagcaaaacagcacgataaggaaaagctctgtattttagtcgagcactggctgtactggcatccgcatcgagatgatcctagttaagccatactttcttttggtaactatacactgactatagtatccttataattctattgaaccactactgtttttatatgatagaaaataattatgcatttcttttactgtaattatgagcatacaacaggccatgtttctgacttccttatattgcagtctgttagcaaggagcgtcaagagttcctcagccttgtcaacaaagaggtatcatatgaacttgtaaagtgatattagagtgacaattgttcatgcagttatcttccatttttgttgcaaatacttgggagggttcaataactcttggtctttgttgaatgcagattgaactgtataactctatgcttgaaaaggagggtacagaaggtgaagaggaagctaagaaagcttacatggctgctagagaagaagtcggacaaggctgctgaggttgatgaagaagaaaaggtctcatcggcgctgattgagaaggtactgatacttttcatcctgcatgcaaattcatagtttaccacggtgactgaaatgccccccccccctcccccctccaggtaacatgcatattaggttcatctctgttttaaaatataagtagttcgtgtaaatctctctgcttgaaaatataaggagttcgtgtaaatcctaaaaagaggatcacttgaaactttgatttattgttttttgataagttttcctctatagatggaatctgcataattttattcccccttcatatgccagcttgagaacaaaacactatagctaacatcaactgtgttatacttcagatatacagattcaagaatgatatgccagcactcattctgaaatttctagtcttggttttttttattgccatgattgacttgttacatgttatgtactttcgtctttcttgattgacttatgtatgaacttcaccttagatgctggagatgtttctccaatactactattgctgatcaatacggtcctataatatttatgatttgcggtttagtcgttgacaatcgttctgtattttaggttgatgctatgctccagaaattagaaaaggagattgatgacgtggatgcacaaatttgaaac

SEQ ID NO: 11123 - DNA, 6321 bp, Oryza sativa
cgtcgtcgtcgcgagcctccgccgcccccgctgccagcctatgcacagtcaacctccatgcccgcatcgggataggattggtatgggagaagaaaggagaggaaggaggaggaacgagagactgacatgtgggacccgatgttaaattggagaatgtgaatagagagactgttggagtaaaatgcaaacttggctctccaattctttagatggctggccaaatgctcatttggagagcttaaaaatagccaatctgttggagatgttctaactgacaactgacagcaagtcaacaactcctccaaccaaagattctgggatattctctatggcccctattcttttctccaacaaaagttggaaaaaattttggatactcgtggcacgcttttcaaattgttaacgatgcgtttcatgcgaaaactttatatatgaaagttactttaaaatatcatattattttattttttaagtttgtaataattaaaacttaatttatcatatgttaatatcacctcattttgcgtaaaaaatttaatgaggattgaggagaaaagaaccatatgtaccaaaaccaagatgaatttgggcacatcgatgtgatgggcctgtttacctttggattgggaatgagatgagcaaatccggcctggcccatattcccttgtgggctcgtgcaatgttgggcccttacggcctgcctatgcgggcaaaaaaacctatccttcctctaccacatctagtaatttccactgacatgtggggtccacacgacggcctgttcccacgagcccacctgtcaggggcggtagtttccacaccaagagacattaccgcgttcagtgcgcaaagcactgccactttgcacactgacaggatgggcccactagcagccacacccaccaatttcctcctcccttcttcctccttcctccttccgctcttcttctctctcttctctgcatctctctctcgtcgggaggagaaaggaaggaagagggtggcaggaggaggaggaggccccccccatccttcctccctcccctgcgctgagctgcgatggcggacggcaacccggacggcatcaagagatacacccctcccgtgcacaggtccgcctcgttttgttccttcttcaatccttagcgtttacgtgagctggggggactcgtaggcgatgagaggtgtggcgtttcttggttggaatctggggggtggccgtagtgaagaatcgcattgggagagcgagttaggaggaggggcgggttgctttgcttgaatcttttgtgggtgagctgatttggttggggggcgtttctttctgatttgggaggcttttgtcgaggagcttgttcgattggatatttcgatttgggtcttttctgagcgtatttttttactgggtatcatgcttcgaggcttgggggcatttctgtgctgatgtggtcgggatcattggaagcttggtgtgttgccgttttgcttagatttgggcggtatattagattttttgagctgctttgatgggcttgatctgtggtgccacgtacaaatctgtgtccagtgtaaatcgaatatcgttttcttttatttggtgttctattggacgttggctttttgtgtttgctcataaagaacgtgtgggttttagtacatatatctttttgtcgcttgcaagctgccgtttttaagttttgtggtggtttattggctcgctggtctctctttttagcttttttgagaatgaacaaccttagcaactaacttttatccttaaaagaatttttttagaaaaatctttgttcaagctacatggctaatctaatggcttatttcagggcatgtttaatgctgacctaactacctgttttagcaagtgaaggatgacccatgattggaatttgggttagcgaattaagctaacatggcttagcaaaactctgccaaacagtcggtcagcttgtataagttaacgcatgactttaacacaacgcatataatgactagcataaagactatcatactttagttacatgtactgccagatattgaaaattgtcctttgataggtgatcgcgtaatcacaatttcacaattataagtggagttcacaatgaagaagtagatttgctaaagacatattgttcaatcagtctatcaccttgttgatttgattagttgataacttgatatggcttctttgttccatctttgtatttatgagctaaatatttattttgtttgaaaccatcagttatttcttgaaatattctgttgtctgcagtctaatgttagttattatttagttttaataatcttgctacatatcatgcatagatatgctttctgatggctatctttactgaatatgcttcaggaaccgtgctaacaatcgacgcaagtctggaggtaaatcacatttaccaattgaatcagttggatttcatgatgttttggggatttattatattttcctttattatttgtttggcttgactgctatataaggtctccaaattagttgataaggtcttatctagttgttggttgttatggtatcaaacttaattcattattcctctagtagatttctatgcagtgaaactgccatgtttcttttccacaaatgggctgaaaaatatgtgccttacaccgaccatgttgataaccactctatatctataaggaaatccttgcaagcaaatatccttgtatgagcccccctactccattgtattaatgatgccaatactctgtacaacatgcaacttcatgcatctaatgcaagctacctgcaatcataatccctacaatcagtcatttacaagtcaaatgtgttttttactcagagtttacttattatgtccaatagctgtccagaatcttctaaccttgacatgtctttatttgattatgcatatttccaataatttttttatgggctatcttttccttatccatgtgttttttttaatgatttatctgtatgtttaagcataacaatttaatttatgaggtgatttttttttggctgacattgtaacacttttgttataccaaacagatagggctgagaaggctagttatttgtacaataatgatggagagaagagccatgctccttcattaaagaaccttccaccaattatccctcatgagacttttttcagcaatcctcagaatgattacagtcaaacaagattaatacccttggagggatgttgtgccagtgaggctgcccagcttctcaatgaccgtatgtttctcagagagaccaagcttcccttttaactgcttgtagaatttctatgatataagttctatctttttgactttctgggaattgttgcatgttattgtggtagtgatacattatgtctacagtaataacatactactccctttgtcccaaaatataagcattttttagcatagtgctaagtcaaccatttttaactttaactattaatagcaaaaaaataaaaaaaaatcaataatgtgaaattgatgttactagatttatcattaatcaaactattattatatgcaactctttttatttaaaacattttatttctatagatattgttggtcaaagtagcatctcgaagactatgtcgtgatccaaaaatgcttatattttgggacggagggagtaagtagtaaaagcacatgcagtatattacagaaccgcccattgctttaataagtttacactggctgataatccaatattcagatactgtaagttgtaaagaaaaatacgtggagcacctgttgtgatttattttggggttctctgcatgttagtagcatggaagaatattcaaactgtgtacctactgcttatcctatcttttttgttcattaatcataccatcaactgttctctttatgtgcaattgtgcatatgccaccagtaatttaccggaagttaggcaacttttaatcaaggatggtctaagcatatataacaaatatgtattcctacagttgctgtactaattttgaaccaactttatttacaaccattcttcttatgtgataataaacctttgctgcttttcccctgtaggttgggctgcagcaatgaacttgtacaatgatcagtcatatgattcccctggtgagtccttaatcaaattcaggccgcatgatgggagatttactatgtcatgaatcatggtagaggaatctttagatattttaggatcaatttctacaagacctggcatactatcctagacctatgtttaatttagataaccgtttcataagttatgatagaaattggaggtgaatataaagtgttggcaacagtagtgacgccgcacaattatggtgatagcaattatagtactgtatagcaattcgtgatgttaatatgttattatgaacaccatcaagtacccaattgtgcactcaagtgaattttcatgtcagttgtaccaacgggaagcactaaaccaaagcccattaaatgctgttgatgttttgccagataagccggtgatgtactctggatctagtggatcatcatggggtcatggtcacatgaaacttcctcatcaggtatattgaacctgcgattttgtcatactgttctcctacgtcttagtttctgtactctgattccttttctgtggtcattggtagtacagatgaacttctctgaggagttgcgccgtgccctagatgagcaaccagtcacaggaccgtctgtcaacacctggaactaatcaagctcaagctgcattggagtgctaagatttacaaaaaagcaatctattgccagttcgctgtgtgttgtatcttgtactgaaactgtatgcatgatgcgactataaatgctttactctaacttgcaactcctttggtttataacagaaacggcaatcctgcccatttgtaaccttatggatggaaagccagcctgctgtatcatgtggagtactttagcatgcagaagtgcagactatataaaccaatgctatatatatatccctcttcttaagggtgaacttttgcagttttgtcagatttgttgcttcgaaagcatttttttgagtaaccttatttatttaagtgaagaatgcaatttgatgtaacatgacaaaaggctcgaatattggcttaagtgaacagatgtatgataaatacacaagacacatctattcatcactgaattttgtggagcagcatctccaaacagtcattgcagagaacagtaaataagtagcacagcaaaatggatcagctattagtgaggatgaaaaatgtcggttttaggcaaattaacatccacctgttgtccgcttgaatgatgtttaaagtaaacagagaggccatgcatctgaatctacaagaaacgagattttcgtcgataatacaggtttgtgactttgtataactacacaaaagagaatggtggacttaagagcctgcataaatttgacaacgtttgacaacgggtgccggtgggcccggtcgggcgcgagacggagacgagtagcacgattagcttcgccgcggctgaggggaattagttcacttggtctggtctgaaattcatctataaaccgaaatatcagatacaaagaaaaaatggttctatagcattgaaaattcatgatttgagttttatattaaaagttttgggttcactttaatagcattgaaatttacattcgttttaatttttagcactctgtcaggaattcagtcaagtttcatacttattttattttttttgtcaaagaaaacatgcaaaataccgataatgtccttctattctttagcctttccgttctcccatcttgcgctcatcctagacttcggccgccgtcctagagcccatccgccccagcagccctcaatcttgcccatgccaacaccctcgaggccgacactcgcctgcggccgccgccctcgagaatgcccaggccggcgctttcgagcagcggagctcgatcgccataggctgccatggcgatgctcgtgtctgggctcgccatgctcatgataacacgtcaccatggccaccggtaattaagttcttgttcctgcacacacagtgatgttgaggcggcgcagattgatcgaccacgatgggctgatggcagtgacaccaataggggcaccaagaagaacctggtgagcagttgagacgatgcaggttgcattcgcatcgtccctggcgttcgtggtcagccgcttgcctctactagtgagcactgaacagcatcggcctggccgatttcagcgtgggcggacgcctacattgttagaaacacagatatgttagttaaagataagagtcaa

SEQ ID NO: 11124 - DNA, 560 bp, Oryza sativa
cgattaatataaccccaattctcatacattgtgtacaatccatcgtaatactactaaactcagaaaaaaaatacttccaactcaaagaaatgttcattcttcggtactacattggcctctactgatgcgggaacttgacgggtgcaggggacgcgaagcccttgtggtacagaagctcggccatgacgctgtacgcgcgctgcgtcaggtggacgccatcccagctgatccgctcctcgggcctcgcgcacaccgccgtcccgcccgcgccgcacatccgctccatctcgaagttgtacttgccgccgcccgcgccgcagcacgcgttggtcagcgccgtgccgtcgaaccccatctcgcgcgcgcgctccagcatccgcacgtacgcgccgaagtagtcggcgtacgcgaccgtggcctccgggtacgaccgcctcagctcccggatcccctgctgcagcagcacgttgtgcatctgcgcgaacaggttgagacccacgaggcacccgttcccgtcgtacgccgcgcgctccgtctcgttcaccgccgccaggtagctc

SEQ ID NO: 11125 - DNA, 1353 bp, Oryza sativa
atgctggccgtgccggagaacctggacgcgacgatgcggctgctgttcgcggcgtgccagggggacgtggccggggtggaggagctgctcagggacggggtggacgtcgacagcattgacctcgacgggcgcacggcgatgcacatcgccgcctgcgaggggcagggggaggtggtgcgcctgctgctcagctggaaggccaacatgaacgcccgcgaccgctggggcagcacggtactgcgccatccttttctcttctctcctctcctcgcattgctatccatggtgctctgttctaagttctggaatctggatgaagactgttcatgtactactgaacattttctagtgttcgttctgtgtgatcaaagtatcaaacattactagtaatcgagtattcattttgtttctgcaagactgcaactagcgaagtgtaaggcacgtacgcactatccatgaataagtcgattgactgatcgaacataaatgatgcgtgcaatgttcttatgttcagccagcggcagacgcgaagcattacgggcactttgaagtttacaaccttctgagagcaagaggagcaaaaactccggtactataatcacctacttaaactcctgaagcaattgattgttgcttacttgctttgatacatatatacagaacatatatagtgtcatgttttttttttctttttttgcttcttagaaacaaaagaagaccccgatgacagtttcaaatcccaaagaagttccggagtatgagctgaacccacttgaactcgagttcagaagaggagaggaagttacaaaggcacgctcaacttcccctgttttttttccagtaatttgtttattcatatgtttggtatttatcaacttccacttaagtgctaaggcttatgatacttaaaaggcatgtgtttgtgtatgacacctgatttatatctggacttacaatgattaataaattgtgctccactccccatggaaactcaatctagtgatggttcttagtattttcatcagttgattgttttgtgagttctatcttctaaattatggtccatgtcttttcttcttcacattcatgcaaatgcacatgccctttttttctcttatgactttcacagaatcttgacaaatcctacttgccataaaactttttacagggtcactatgttgccaggtggtatggatccaaagtgtttgttaagatacttgacaaagacagcttctcagacgccaatagcatgtattagctgcctccgtaattctccttactattgtaccttatttatgcctcatgcagtcgactattccctaccatgagtccatgatatacatcttctcttca

SEQ ID NO: 11126 - DNA, 4188 bp, Oryza sativa
cgaccgcgcaccgcttggctttgggggattacggcgtgtccggcgtgtgcgagtgcgagtacgagcgtgacaccaccctccgcgcgcggccgcggcgcgatccgctcgcgatgggtcacgggtggccctgcgttcgcgttggggcactacttggccgggcagcggcagcggctggccggcgtgggggaccgaccgatattcggtatcttggtctgacgtcgacggccccggcggctgcggctcccacagctgcctgcttttgctttggaggctttcggcaattcggctccgtgtctacgctctctatgggtcaacatggttatcttcgaaaaataaaaagacccaacccatccaactcatgatgatgcgtcgaaatggctgaatttgcgaggttttcttttcttaagggtttggagggtgtaccgtgtacgtgtcaccgagccgctcgggtttgtaggtgaaagtgtagtatcacgcatgtgcgaagggtcgatatatacatgtgatgatgccaggtgccagcggtacggccaaaagatgatgccacgtgtttcggagttgctttttgtagttttgtttttcttgggcgcgcacgtcaatcgattcgttacgtggtgcaatgaggcggcgtttgctttactccatccaagtggttgggacgattttgtttttgtttacgtgcgtgggagctgtcacgtttctcgtgtgtttagcgactattttgtgaggaaaaaaattaagcatgagatcgtggagcatgtgagtactgttgtcatcgattcctctcgtaaatcgtagcacgccattttttagatgaaaccgagagatggcccgagaccatatgccaagagctccctccacgcgactctaaaaaaacagaaaatagagatatcaccggatctttttttaagttgcaaattaggacgtatacgtacacacaccacgctcacatcacacacaacacacgcacccacacgcgtgtttctaacacacgttagaatttagattggagacctatatcttaatgcacgggaaacatgtagtagtattaaacacgcacacatgtatacccttatatctgatcggaaccaatcgagtcgttccggaggaaagaggggaaaagaccccgggtgagcacgagcgattgcaacggacattcagcccattgtatttggaacgaaacgttatcgcgacatacttgaggcccattgtagccccttgcatttgggtcgaaacaatatcgcgacgtacgaggcccattatatctgcctaactgggccggaaaggtattgattgcctgcaacggtaacgtggcgcacgtgtagtccatcatatttgcccgttcgggccagagcggtatagtggcgaacgttgggtgggcgggccatttgtcgtgcaaggccgcgcatgcatgtgtacgcgcatcatcatccaccgctcgcgaagtcgccatctcgatcgtacgaagcgcacttgatcaatgcactggccaccggtgcacttgtcaaaatgagggaaacaccagggcggttctcccattcatgctgcatgctgatcttccaccacgcgagggcaaaacgaaacgatataatactagtactagtacatttactatcgtgtcgcgtcgacagcgacagcgacagcgagaagagaggatcgtgcgatctgatcgagtagctagcgctttccagtcgcgcgcgaaacccgcccgtcgcgccgggcaagcaagcgcactgcgactcaccatcgccatcgacgacagcgacgctctcgctcgcacgctgccaacatagggcctgtttggtatggagagctccacccaactctactcctagttttgttggagctaaaactgtttggctgagctccagctccaaaagagatagagttcgagctagagctgtgccaaacaggcccatagccccgcgtcccttgctccggaggtggaagtcgtgcttattacactccccctatcttataatatagcaaccttaaaccaaatatgacatattttttctatttcatattataagttgtccgattcttttattaatcaaaattctttagatttgatcaaatttatagtaaaaaaagcaatgtctacagcatcaaattagtttcattaaattaaaagttaaatatattttgataatatatttgtttttattgaaaaagtttgtattaaaaagtaaaatggcttataatataaaacggatgaaataaaatagtgcaacaaatataaacagacgggagtaccaccagttgttattggattacaccctcaaaactatattcattatactatgttacatccgatttaagattgttatattatgagacggagagagtatctttgttttttaatatatgcgctgttgattttttaatagacgtttggttattcatcttatttatttttttgcaaatgtaaagaatttttttcatgtttaaagaacaattgacgacaaaacaagttacaataaagtaaataataattacataattcttttatgaaacgaacgaacaaacataacttaaaagattaacgacactatatattaaaaaatgtgagagtatttcctaaccacatgtgctggagtggcatgtcattggcggctaataatttctctccattatcctgagctagaggaaagcaagaagaagctaactaccaaagggaacaaactgtgtcacccaccacggggcccacctgtcgggctgcaagtaggggcagcgtatcgatcaaacagtaaaagaaaattctgaacgaaattatgctatttattcctccatcaagctttgtcgtttggtggagctttcatggatgcgatatgataatccgaatccagcaggggacgggatattttcgatagctcatacgctatccggtattggtgagatgccacaaaaaaagaatgtgtcatctcaaaatctcaaccgaccggattaagcacgaacgtactcgatgcaatcgccattccaaacacggggcaggacactgttgccattgaggcgccggaaactaaaagatcccctaaataaagcaaaccaggattggacaccagaagccattatacgtgctgcgcaactgttctccttttaggagattccgcgaaagaaaatgaggccatcaatgtcatctctaacctttttttccctacacagaatgttctcctgaatcgtgaagggatagctaagtactacatcaatttaatacggtgtgtgcacgttgtaagtgtctacgtttgtaccgtgtcttttttctaaaaaatagaaaagtgcggataacggattgataatttcagaacagtctcttttgttcactagagcaagtaattaaaaaaaggtcaaattgtcaagctatatattataaaccggtacagttttattatttttttataggaatcagtctagtcttgcacgacaaagtgttgaaaatttcaacagacaagtcatcacacagcccagtagcccaccatccttccggttctccagctacgcaacaataattcaactccaaaccaaaacacaaaaacaaaaaaactgaatagtcgtcggcaagtgttctcacgaaccgacagaaaccaaataaacaccaccaaatccacccactccccactgacaggacacccacaagagagacggccccacccgtcagtgacacctatcgccccaacccccaaacccaaccagtaataattttaattttaaaaaacaccaaccacgcgcgcgccttttcccccacaccggaataaacaatatcccggcggttatttcccaccctctacctctcacctgcacggaagattttattaattaatgggatgtattctccccttctctcatcatatgcttcccactgttctagttccattccactgacaaggacgcttgatgattagtagtagtacgatttacgagtgctaatggaattccgcgtatactaatcgtcctccggtagtagtagcagtagtacgctcggttcgtggaaccccactctccaatccccaaaagcatccaccccacggcgcgagatcccaactgcggccgcgggattcttcggaggagtggtgatcgccatcggggtatggaggcggcggcgaagctgaagaggagcatatcgcggcagctgtcgtcgggggcggcgagggtgtggcggcagctgtcgctggagccggtgtacactcc

SEQ ID NO: 11127 - DNA, 6478 bp, Oryza sativa
aacaagaggaaatgcatacattgtagagtaaaacttcagttgaggtccaagtatggggcagatcgaacaatctcgcggacagagcaagcagaacttatgtttctgcatcagggccaacacaaattattctgatgggctagggggtttttccttgggatgctttgatccatagtgatcaatcaattgtttctcattggccagttgaacctacacaaagaaaagcgatgtttcattaagttgataccacatccacatgtgcgtgcgcatgcaaaaatgagtcaacatggtgtaggtcagatcaagcagtgaccagtaatagattctaattcagttacggaaaaatgtatttataccacacgttttcgcttggtaccaaataatactacaatttttttcaccttaaagaaataatatgactgctaaaatcttccatctataccgtttatcaaattgggaacagcattgtccaatgataaaaaaagatgtaggatgatgccttcactgttactccaaccagtggtggaggacagaagggggctgcttcatcagttggaatcagaactcactggagagaaggctttataatggtatttatactattcacaacaacaacattaacaattagcagaacttaacataaatagttcagatggaagatatgagcagtgtgatattttcccaaaggggaaaaaatgtggtactaataggcaccaaccaaaaacttgcagtacagacactgagatgcaattttctcctttaaagatgctcatctttggacctacctctcgactacacactcatcagtataatataaccaaaactgagaataaatgattgatccaactacaaattttgcctagaactatattccccaacccttcctgattgttcaaccataacacagtattcatcagaggcaggggcggatccaacgtgggtgcaggggaatatagttgataagataggaggtgctaaaggtctcataatagcattttagcatagtttaatactgagattatgtgtttatatcggtgtactcagtatttgagtccccccaactttttgtttctggatccgcccttgatcggtgattatcatagaaatggtaatggacaaacaatataacagcagcaatatctcccaaaagaacatcactagggtaatgtaatcatactagttccacccttggcaggcaggctagatgcagtgcttagagagacgaagttagaacaattacaataatagaaaattatcccctatgaaatttccacatcaactccctgtctctccttaccccgtaattggggtgcatccggggactatagacgaagacggacaaaatcgatcactcggctcgagattttcagatcgcatgggataggagcatagggctgggtggatcgtggatgagacgataacaagaagctaaagatccagccatcccctcgaatcctccatgaatccatccaatctagcggtctagccttagggctggggagggaataccgaatacggcaggctacaagctactggttggattagcaagcaggaagggaagaggagacggattcattcgtcaccttgcagatggggcagatgaccttgaggccgacggcgcgggcctcgagctgggaccccttcgacttctggttcttctccgcgttccgccgctgcgcatcgatcttctgcttcccccgcgtcatcggtgctcctcctcctcctccccctccggagttcttccccttcctctccgatcaatcgatcgatcccgacccgagagctccaaacttccaacaaccaccgcaacagaatccggattcttcttcccttctccctattccccgcttcccatctcatcgccgtgggccactgggccgacagccttgttggacctgcaggcccagtagtacacaaggctatcggcccattagagcatgattaattaggtggagtattagtttaaaaaaacctgtaaaataaattaatatgatttttaaaacatttttctatggtatattacgaacattttacacggtgcaaagcgctggattcaatttttattccagaacatggtaagtggctgagtgcacgtttggtttgcctgtcagtagaaaacataggctcaactcttgcatcatgatctttactggacaagaagccagcggattggcacattacagagaggaaggtaaacaacaacaaaagaacagcatcataacaaacaacataactgaacgaacggaatctgactacaacactctactacaacactctgctgtaacaggtagcaaccaaccgaccaagcattttattactgtcctttcttctcacaagacctgggattacaacggaaaggagtagccacgaaggtacttggaatcgacaccggattcgcggaccagcgccactcgccctgttctggcgacctgtggtcatggacggaatatgcattagcgaggaaagctgggtatattacatgtggatatagagatcggatttctatccattatctaaaaaatagtgaggaaagtaaacgccgcgagcatgggtgcgaaagcatacggatccattgtcccagatagaaaggagacggctagcaacctagcatatcatatttaaagacataaagcagatgttggcaaatgatttaaaattattttggtagtcaaaagcatgtgttcacttcggcaaaagtatccattacgtgtggagaatgagtttttgagacaatgtgtgttaatacggtaacagtatttgcgcagataatctgttgacatcatttcacatcacataaccacatgagcaacaaacggatgaggtgaaagaaaagtacaaaaagaattcaatatacctcacagatgccataaggctccaacagcctttgtaatgcaaccatcttgtcgagatccccagtaagctgcacaatcgcggcaagttatcaagtatgcagaagtcccacaataatttgaatgggcattaaatgagtaaatgacagttgtggttcagctaaacattcagtgtttctgcaggctctgtgctgctaaacagtaaagcacaacacaacttattaggacaaaacactagaattcctataacaatgctgcgggtaaaattatatgctggcactttgttatttgtacatagatcggtgttcttcgtaaatgaagctgattaagctaataaagaaaagtttaacaatcacaagccacattagccataaaattaaaattacctgtaacgtaacagtgtgatcagaaacatcaacagattttgcccggaagatttcagcaatatctagtatgtctctccgagcagcagtgttcacagaaaccttgataagcataagttctctttcagcaaaaggcaagtgagttatatcttgaacctgcacaaatcatattttttgaattaatgcgactttactaccacaattgactgctcttgaaaactgcatatgatttacctcatgcacatcaacaagtttgttaagctgctgaactaacttctcaatggattcatctgttccaggagcaactgttgtaatacgcgaaaggcctgacttttcagctgggcctacagcaagactctgaccagtagtatggtcttgttaacaactaatcaggcatgacggcgaggtaataactattcgaaaaaaagaaaacctgtatattgtagcctctgcgagcaaagacccctgtaacaatgttgagaacaccagggcaatcattgacaaggatggatagagtatgtgatcgaagtccacttgactgcaccaaataaaatcatatttagcttagaacctgcatccttaattttgtatacattaacatgtatatttaacactgaccagcttagagctacagagacatttatatatatatatatatatatatatatatatatatatatatatatatatatatatgactggttgctgattgtgaagatggaaaatgtgaactcagtgtagtcacattggaactagattcggttttgaatacatacaacataagttagacatagttttttttgtctcaaataaagtttggatatagttgccaaggttcatatgggacctaacactgactgaataatgcttttatctaaactgataatattgaaacttacatcttcatcatcaaggacgccccagtgagcatcaagtacttggttcatggatgaaccctcataaggttccacaggatagacatcgccctgaacaattaaatagtaaaagtgactaaatgttacaggaatcagtaacatattgcaatagacaggcatatacgacttgttatgttactcatttctggccatcaaatatattagcatataacttatgctatgactaatgcacagatgctataccaaaagttgaacaacgttagtgtgggggtgcctgcttatgtatcatcaggtctcatccaatgacataaggtactagtgaatatgcatttcagtaaccccaacatgaacgccacctgtaattctactccacagtgtgcttttcaccaccaaagaatatgttgtcttcagtgaactcacctcacaggactgaaggtaaatatttaaatagaaatatggaataagttcagagatatggcacctttatagcatactaattgtgtttatgcactaagttattatcgcttatagcattacattgttctggaaccaatactggctaacatctaggttcaactgcatttgttttcgtaccgagtaaaatgcactctcaacataaccagctaattattcaaattatgtaaaaataaaatagaactagatgaaggactcatgagattttttttctatttaaagtacaagaaacataccccagcattggatggttgatcaaaacttccattgactgtcttatttacagaagtaagaagagaatttttgggcaatgcctctatgagatctgggtaagaagcagcagaaaatccccagaagcgggcagttgctccaattttttcacgtctcaaagcaatctgagggggaaaaaagagtcagcactgtgaataacacatgtatgcatgcatgataaatgcaaatagaaaatggtcaagaaaatacttttcccgttctacaaatttcttttatcccaaatttgctgaggttcctttgcacagcaacaattttgccaggatctccagttacctacaacttgatcaaatacacatcaaaggaattcctacaatcatatgtatgtaaacctgttggaatcaggagtctttacctcgatggtaagggtgttctccgaaatatcaacaactttcgctcggaaaatatcaactaaaaccatgacctgacaatcataacaagattttgtgcagtacgagtgagttccaacatgcctgttgcttaattcactacacaaagtttttacactatgcaaatagcaagtcaacagcacatgttacctcaggacgctgatctggttcaacattaatttttataagcatcagctctctttcaacctgtggctccttagatagatcttccacctgcaatttttagccggcacaagaattaaggagagtataaaatcaagagaaagagaggttaaaatgaccatgctatccagcgttccagacttaactaccttgtacataggtgaggaatggttagtgcgatgtttcgtgtgaacacgggagagagagactatgtgatagataagggaaagcaatgaacattttcaataattgaaatgcaatgcaactattttaaacaaggtcacatggcagtatccacatatttatacttatcagatgctacagtagcatttactgtgctataactcaagtactcaacgaaaagcccaagatactcaggaatacttaggttataatagaaaacctggttatttggttacaaatgaaaacattgaattttaatttttctgctcccggactttattgcataaattgtgcagacaagagaaatagagcacattacattgaccagaatatgtctgtacgtgataaaatgcaagtttgacattcaatatagttagcgagatactcacggaaaagagttatttattcttactcttagaagattttcaataaagagggctaatgttttgaccagattaagataaaaggtttctgcccttggtatttctagctacaaaagatgctcaagagcaaggcacgttataaaatataaacagagttgatactgtagaaattccgctctttatagaacaatattcaacattggtatcttcactctgctgacaccaatcgctgtcaaagaatcttactgagggccggaagcttatcagatctataaatggcaaactaaattggtttaagcatcaaattcacatgaccccaacaaattttggagcaagggggctcacattcaagacgttgacaagcttgttgagctgctcgatgacttggttgagcaccctggtcgtgccggagacgacaatggtgaacatggccttgtccttgatgagccccac

SEQ ID NO: 11128 - DNA, 3584 bp, Oryza sativa
tataggacactcatatggggcaccatggtatcaaatacacaaaatcactcaaatttttcaaaattttcaaattgtgagtatatacctagttataataactcgattcatacctatacctatcaacaaaacaactcaaatttaactttatttcacaatccatgattacatacctaactaattatatgtatggatgctatatacctagaatcaaaatctaacaaaaacaagttcaaattcagttcaaacttgctttgaactagttagtaaagtagctaatgttaatatctaagtaattgaaaaagtttcatactcatttgaattaggtatatactcaatttcaacaatggtgcccgggcaccatggagcaccaaacaaatttactatatatatatatatatatatatatatatatatatatatatatatatatataattttttatatcgggatgataatgcactttagccattggttctgaatgggcttacagatcacttttatccctcaggcagaactctatgctataaaaaatgctgactagtcgccccgcttttcaaaagtcatttcatgtttcatattgtaggtattgatgtttaggctcttctatgtatatttctcctgcatccaatggatcatatatcctgaaggttcaattttgagggtttgtagaagaatatgatctttggcaactagaattcatgctaatttagttttttttttttactagcataaggcatataaaccctgttacatgtagaataaaatcctgattgttgtacgcagccgagagcaaccctccactttcctattggtcaagtgtcagttgaagagaggagaaacgaagcggatgagaaaatgttatccctttatggaattgcaaaatctaatttcttggatggcattcttactgcccagtacagtgaaaacgatattaatctgagatattgttataaggtgatttttacaatctttcactttggtttgttttccagactatttgtttaatttgacttcaatcatacgctctctatggcaggacaatgaactaactttaattcccagcgtgtccctgccttccaatgctgtatccttaggcttcaaaaggcggtttggtccttctgataagttgaggtcagcatttggaattgttgccatgcctattgatctattagtcatttgtctctaattgtctctggtttgatatttttagccaccacatattcatgctttgtaggctgcaaatttccacaaatttttcttgacaattatacactcattagtgagaacatcaagaaagtttcagaactgaaaataacagacattggaggtgttttgacctcaatgactacatctgtacggatattttatctcattaaagttgaaaatacttgcactatttagaaatctgacttgttacaattgtgtaccgcatgttgtagcatgatttcgttatgtgatgtcctgcttgagcatggctttcggataaattttatggataaccttgtcatgtcaagattttgcaaccaccaagcatgtttatgagcatatctacaagttcctgtgtgttagcaagatattctgcatgaatgataatggtgttcatgagttttacatacttcaactgcaaagttatctgtctggcatttttttttcttcacaaagcgttgaaggatatggtgattgcttagcatcattggtaaatcaataattgtaaattttcattggctgatcaattgctcaatttcctttatattcgtgttaacattacagtttaatatggttgttgggatgtatcgactgcataaggccaatttaaaatttggaccaggatattttcagttatgcccaaggaggcaaaagggttttgcatcttcatgcataatctttgacatctggtagttagcttctttcccaatgtgtctttttaatgttgggttccccttttcagctatcgttatgactttaccactgatgactggaatgctgtttataagcgcacagttggtaaagatttcaaagtgaaagctggttatgattctgaggtgcgagttggatgggcttcagtttgggtatgtatttacagcctccttgttttgctatatctgcatatcttacattactattggagcaagagaattagagaatacaaaatagggttcttttagtgatctcatcaaaatctcgaagttttttcttgtccagacgaaaggtttaaacacacaaaactttccatttattaaatctgaaaccccgaaaatgcacatataccaaagttctttttttatggccatttgtaccattgttagccatctatgcttgctgtgcgcgcgctagtgttgcagatatatgtttttttaatgatcaataattaatataagcaatgttgtgtaaactgtagactgtatctttatgcctttcatggggggatcctttgacagctgttttgacaatttcttaaactacgacagttttgttgaagtgctggtttttatggctaaaacatgcaaaacctgactttgcatcattagacgatttgtccattgaagctaatattgccttctgatggctcaagtgtactgtacttttatgagcaattcgtgagtttcgttttcttggatgctaggtgggtcaagaagacggcaaggcaaagaccgcaccaatgaagacgaaacttcagctcatgcttcaagttcctcaggacaatttccgcaatcccaccttcctgttccgtgtgaagaaaagatgggatctgtagcatatgctacattatatactccatttgtatggggataccagtattgggtactcgggatttggccaacattttgttgtaagctgcgtaggatggcttgaaaaaaaaaatccatgaagcctttccaattctcatcatgtaattctgcctgctgtacataacggccatcgttcgttccgcacataagcaatttgatttccatgtaagattgttcacccctttactcgaagttctgggctaacttttccggagtgctatcggatcttcactccgattccgaatccgttttcgaatactctgttgatgtcctgctccgatgctccgagtcgacatcgaaatcggacagcctacggcataaatagagccatagagggacgcgcgcgatgccacggactatccacaaacaccaacagctgcgtcgcatcgctagccaacacgtacgtacagcgcgcacttgcacctagagcgccatggcgagtagggttcatccactcctcgtcgcgttcttggtggtgctcctcgtcggcacatgccaggcaaggccggctccgggaaaggcagcgtcgtcgtcgtcatcgggagtggtggacggcatcacggccatctacaacttcggggactccatctcggacaccggcaactacctccgagaaggagcggccgccggcgccatgatggagcacaccgtggcgcctccttacggcgcggccatcggcggcgccacggggcggtgctccgacgggtacctcatgatcgactacctcgccaaggacctcgggctgccgctgctcaacccgtacctcgacaagggcgccgacttcacccacggtgt

SEQ ID NO: 11129 - DNA, 544 bp, Oryza sativa
tgacatatatgcatattttttttcgcgaacgcacaaaagattgcacgtcaatatattagaggaatagagtttttgttacacaccgcaattggccagacccgcctatgccagggaaggggaaaaacaaagtcaaaaaaccaaggaagagaaaaaagaaaaagaaaaactcgaacgctactccaaacaacgagaggggccagagccacgctacactcccaacaagtccccaaaggaagtgatgaaccttgagttcctctcgacactcaaggctattgttggcccgatctttcggtgagttgtgataactacgatttgggagaaacgttgacgatccgactacaaccgtacgagacgttgtgttgcgccttagcgatcgatacacctctccgtgggttgttgatcttgccggtgcagatcaaccctattcctgcaagcaaatcgaagaaacaagcaagaacaagataaaagcaatctgatattgcaaatagaaatttaatacaaatgataagttggggtttcgaatacaagcagacggacggtctag

SEQ ID NO: 11130 - DNA, 9343 bp, Oryza sativa
ggggtgcgggaggctctggaatccctggctcggggttttttccgtttacaaccctggactactgggttattctgttatgtatttctgtgtctgtatgacagtgttctactactgcagtggtattattactcgactgaacagtaaatgtgactgtcagtctgttaagttcagtggggacccactcattactacatgcaggaaaggctgatggcttttttagccaatattttgaacttgaaagtagaatttgggtggttccaacttctaacagtgtgaagtttaaacagtgatcccttgtttggtcgtatgatttgtcaactctttggttgtgcaaagaccaaccacgtggactcttgtgtctaggcaaaatcacttgaggatgtgttcggctgtcctatttcaactacgatacagccatgttgtacagtaatttgtgtcattgcaagcagctgtgtgggtgcattgcagcagtcgaacacaccctgagattgtactcccatagtcccgtataaaacaaacttaggatacatcataatataatgaatctgaatagaatggatcacatcccgttctagatttgtatttttactagttagcaacattgaccttttctcgaaactttttaaatttttcttatggatagaaatcaaacttctactttttggatattttctttaaaaaaagcattttaatttgccataaagcatggaagttcaaacaactaaaaacacgtgttactttttttaaagctcatctttcaataattctagctttgcttgaaacttttttcaaccagaactacaatatcggttatttttcacccttgatttttaaaaccaaggagaagcattgacggtgattttggttaaggtgtagtatgcatgactccacctattagagtttaaatcataggaaacataaatgttactccctccgtccgattcgtagcgctagaaaatattccatccgattctaagttcttatattttagaacagatgaagtgtgcatatagggttgcgcttttgatactcctttgtttcaggttataagatgttttgactttggtcaaagtcaaactacttcaaatttaactaaatttatagacaaatataataatatttatattatcaaattagttttattaaattaataattaaatatatttttataataaatttatttttggtcaaaaatattactatttttctataaatttggtcaaatttaaaacagtttgacatcttataacgtgaaacggagagagtaggttttcagtgaggctatttttttagaaaataggacaaacgtggcctctacgtccgatcggatgtacacagccaattttaggctatggatgtgttgttgatctttgtctgtgttaaggtggtgcattcaaggatatctaagtaaggtagtggtgtgcgcgcgcgtatatgcgtcttctaagtagttgtaaaaacaaaaactaaacaaaaaggatacctttggacatatattttttactccgttttgttcgtaagtaatcttggacaaaagaacaccttgaattggccgatgtacgagcctgctcttggccaaagcgtgtaaattatgagaggtttatggtattgaccacacatgtatcaatttacattggaagctccgttcacataatccttttcagggtgaaaatgtattgtcgatgaaacaaaaaatgaacacaatgtgccgctgtgctccttgctttgtctcgatcagtctccggggttgtgaacttgtgataccacagcgttattattggccgagggaaagatttaccatgtactaaaacatatccagggcatcgaacgtactcttgctctacaaaaatcttgtgtggaagatcgccatttctactgatgacctggaactgatcgtcataccaggtactactagtactcatttttcctgcaatcagacacgcataaacacggaattgctgacgatcagcaacatcaacagccgctgttccttgcaaacctgtcgtaattaagcacacggagacggcgatttgcagcgtcgtcttcagagacacacactgcaagtctgcaatgcaaattcagaactactcctaaccagcaagacgtagctagttaacgacagagccacgcaaagagaacgcgaccgcctttgcttcttcttaaggcggagagggaaaaagaaaaacacgaatctgataacgagatcgaggtcaacgggagcagagatcgaagaagcatacatgacaaaaaggaactcctattgcagccgcacctcaaatgaaccagagaatcgacgaaaccatgcatgcgtctcacgaacttgtttgctgatggtcatctaaccacgcgtgcccaagagccaataagccgactgctgcatcgtcaattattctccaatctccaggcatgcacgggtagctagatgaccagcaacaaaacaggttcatgggtagcaataatctcacctgcacaccacgaccacccctagtattctactagtagcaattagcaagcccagagcataatctggatatattgtcaatgagaagaaactggagctggacgcctggaagactggaagatggggcgaatgagatgaagctgctagtgctgtattgaagcgaaggatatattttggatcgggtaggtgcgtgcacggaagggatgatggtacgttgatgccagcgaattagaggcatattcgcgaggaataaaccgtcccccgcagaagcacgacgacatggaagcatcaagtaattaagcaggagacagtcagcaacatgtatgtacgtgcacactctgtagtgacgctgacgctgtgccactggctgactgtactgcctcttctgctaggtggagatgatgagcgtagatttggatcaacggtcttggtaaattagccgtgacagggaggagttgtaccagcggacgaacgcgtggattttgcggttgtccagtcatgaaaaaaaaaggaatactctctcttactcgtagagaaagtcattttggacagtgacacggtctctaaaatacaacttttacttattgtttctataaaaaaatatttattgaaagtattatatgtatacttttatgaaaatatttttcaagacaaatctatttatataatttttatattttcaaactcaacaatttgagagttatttatgatttatattttcaaggtctgacttaaacattgtcctaaacaattttctttacgagtacgaaggggtattatatatatccagatatactcctttcaaaaaaaaaatccagatatgagcgatgatggggcagcagaggaaggggactgttcggaacggatgaaacgctcgcaaagatgtggataatttgtaggcaaaattgttcccctctcggactgttctaccatgtgtacaaccatcctcggggcagcatcgtggacttgtggtgagagaggcctgcggcgctatctacgagggccacgtacgactccacgtgaccggcccacggggggagtcctaggtctaccgacgcaatgggctgctacccccttgagatacaggcgagaggccgagagccagcccaacctgcatggcccgcgcgagtccctgacgtcccccgcggcgcgcggcgctggtgtgagtgtgtgacgccgtgacggtgtacgccgccgcaacggattccacccggcgcagcgcgctgcgcaaccagaccacgcgcgggcgccgcacgccagaggcccagagtgcagacgcccgcctgtgccgatgggtggagtggaacagaagaaccaaagctccgggaagtattttctacacgtgtcagtacctagatggtcctgtttggcacggctccagctctagctccatctctcctggagctgaagctcaaccaaacagtttcagttctatctaatatgggagcggagctgggtagagctctctcacaaaatgaactagagaggtggagctgggtttaggcagctccataactctactccagactcaactgctggagctaaatttaggaattggagctctaccaaacaggctctacatgcagtttataaataaacagttatataaaaaattataaattttaataagatagcttatgataatataagacactgtacaaacataaaagtctaaattcgatcaacaaaataacagaattttttttgtcgtacaagtattattcattaccgatgttaccaattattttttatatttttataactattcaagtcacgagcaaataacgggtgtcatgatagctgctgcagagaaccctgtcaaccgagctctgctcgtcagcccgtccgtcgtgctgctgcttttgctgctccctccatcctaaaaatacttaatctagaagaggatgtgatttgtccagatcgttattcagagtccatatcgtggttgagtttttttaagatgtagggagtacttggcaaggctagcaaagtgattcgctatatgtagttatgagctgatcattaattgattgcatgctgcttgcattaaaaagggcgatatgtgagcatttcttttccttcaatctacgtcaaggtcactgctcgtgctcggcatacgcctcggagagtggatcgtggttaaagcaggaatttagtatactaccatcacaaagtctaagcacatgattttcgccaagacgatatttgctatggggataagaatacgagaacaatacgcaaaatgacaatatataacgcagtaggagttcgttaacgtcaataggcgatgctgaatattttttaatgtccagtgaccagaatacagcggcgccccctgttttgccctggtttgccatggctgctagctgtcactgctcaaaagcagagcggcggcgacggcgaccaacaatttgtgaagcaatgccaagctaagtttctctatcatttaaccacgtactgtttcattagtctatggcactggccacctgcctcacaagtcacaaatttcaattttcaaacgactatgatacaggcaagttggctttgctagctaggcagtattaagatgccaaaccgccacatagctagcttacatacacgcaattagggtcaaacattttgctctctactgcttccatagttccaaagacatctcaggaaccaacactgtttgctcaaggtgactgttcagtttcctatgtttgccgttccagttcttgtacatacaatgctttagatgtctcctagttcatgcatactcttctttctgcaatatgtaccagagatttatcagtttctttttttttctcgcaaaactgaactggagtagggaaaaaaccgaatctttaacatttgatcacatttttttttttgcagggctagctagctgctggtgatcacacagcatggcgaccaagtacatcatcggatcagtggctgcatccttcgcattcgcctatgtctgcgagatctacatcgcggaaggaaagcttcttggaggtgagctagcttaattatcttctctgaccaccgagatctccttagctaagctgcctagctagcttaagtacgtagcttgcagtttatgtgctctttctcttgtgttagtgtttattagtttgtgtttacttcagtttatttgtgttttatgacttgttgaggtgtgctcgtgattgagtgaattggtgtaataattgactgtaactcgttaagtaaaggccgatattctattccattatctaaacaaagtagcttgcaggtcatcagcatctgaccactgcttgcttgcacatgtgtttcttggcaaaactaggcacgacgactcggaccatggcgactgacgagtgggggaaggagacggacaagaagttccaggcgtggccgcggacggacgggccgcccggtggtgatgaaccccgtcaggcgccagaacttcatcgtcaagtcgtctgaataaatcttcttcatcagccctccctagcattctctcggggaagaaagaaagccaatattgttgcgcgcgtgtgctgattaagcccgtgcacaattcacctcctgtttcagactttcagttaaagcaaactagcatgtatttttgctgtaatttttgtgttaattcccggtgagaaatcagctcgaaccgcacggttaaatgctatagcatcgcgacgatcctcgcagtttgtttctgataatatttagtgttcttcagggacgaaaatgatactccgtagaatagtaacctcgaacaatttgtagtatttatgttcgaaacagatttagaatttgttttgtttgaagttgcaaacataatattcagagagccgcatcaaaattccataaattaaattcagtatacccggcacactttgtcgttccttggtgcaatttgaaaacaaggggtttggagcatcggttgctataggcctatagccttgccggcgaaaataagatgactaattactcaatgatttgtactcaaatgatcgaccaggaattgaaggtagcaatgtagcattcatattgcaaaatctgtagtacattatattgaattgtttcttacaaagaatacatatagccagaagggctgcctatttccagttagtaaagtaggggagtgttaacctatattgaatctggaaataggaagaaaacctcatgtgcttaaaaaaaatataggcctcatttagaatgtaacttgcctacgtttctcttaacaccatgaatgtgtttttattggaaaagttatagtcgaggcaacttagaattaagcatcggagcatgtatttttatggtataagctttcagaaggtgttcttgcatacatgaaaagaagaaaagcaaagaaaaaccattgaactaattgtaagtgtagaagttgtgttgcattacctatttacctttactatgttgaaagtgtaacaaaatatgtgcatctaatatatgaatgtgtgaaccttgacactatcaatgaattctcaagtgttgaaatccaggagatttgtatggtagacctatcggatccaccaatcagatatactccatctaacacccataaatacaatttaaaatacacgtcaacattaatgcatgaaaaatcataaatgcaatgagtgtctaagatcctaccgtgcctctctctatataaactcctctaacatatacaatagagtccatatcgaagtaatattcttctaatatgtccaattgtccaccatgaatagaaggatgggttactcataggctgttgttttcatgtcttccaccttgccatctgctctctaagacgttaactttcactaaactgcaattttaactttttgtttattaacctttgtttgatatgtgttcaataatctatttcagttttggatcatttttcgaatttgacaaaattacatgctacaaagttgagttctactaagggaatatgtataagcttacatgcacatcctgtggtttccctcgctctccgtactactgcaggactaaaccaaatggttcatcacaatgttgttgtgaacgatacttcttcggtgatatcagaatgacattagaagcgatcaattggtggccttcttgcttggtcaatattgaaaaaaaaaatgatgttcaggattgaatgtaatagtctaatactattagattccatgaatgtgtacaacaatataataatcaataaattctcaaatcttgaaatctacaataaatgcaaatagggatatgtccaataaatctaaccatctaggaatcctgcaaaccatatacttgcgctatctaacacaattaatgccactgcaaatatatatcaacatcaatgcagggaaaaacataaatacattgaatgcctaaggtctattgtgcctctatacaaactcctgcaaagctctaacatataaagtggataagattgtgttataaatcatctaatatggccatgagaaggatggggaacccattgactgctgttttcttggctgttatggtcatgtcctccaccctaccatcttgctatgcaggtactagggatatatgctctctaagactttttaactttcacatcactacactttaacttttcatgtattaatctttgtttcgatgtgtgttcaataatcaaatgttggctttgaatcatttcatcgtgaaacgtgaagccgatgaagggacgtgctacgatgtcatgttctgccggggtgatgtgtgcaagcttagatgcagataccttggttaccctgacaatgctccgtgctactgcaagagtaaaccggatggttcggcacaatgctgctgcgaacgatcatcactctgatatcggaatggaaccagtgattaatggtggctttcttgtttggtcaatgctatatatgattcatgattaatgtagaagccattgatccctacttgctcttgcatatgtaaattggcgatcgaacaagtattttcaggtctcatgcatactcaataaacttggatttgctatttgttactacttcactgaaatttctaaacatttgttttcatttggagaatttgtgattgattactactagttcctcgcttcatgctccttcaattgcaccaagaggatccgtagaacatatgaatagaataatctgtagaagcagaacaagagcttatctgtaattgtccatatgtgatacgtatatttcgattttattgttgattcgtcgacattgaatttggtttttcagacttgtgtaaatcgatgaatattctcttaaaaaaacacaagctggatgtatttggtgatgatgatttatcatttgagttgtacattatgttcaagcgtaaattgcgaggtttgtaactctgccatgtttaagaagattaagattaagattctgagaaaccagtttataagaatatagaaaatatttggaatagcttatgactgctgaagattctaaatagttagaactaagagtatctccaagagattatctatttagctctctaagttaaaatttagccaacatagaaaaaaaaggagctccaacaaactttccaaatagacaaattgctcctatgactagccaaatgtagccagccaaatgtagccagcctcttccggctggccaaagatgggtcccaccaccactcccagccccatcctttctctctctcctgtccacccaccactggtccataggagcgccatcggcgagcgaacgaggaaagcacgaggcggcggcggcggcggggacgaaccgagggcgccgtcgacgagcgacgtctggtccacagtccgctgcagcaggcatcatcgtcgccgccagcggggagccgtcgccatatgcatcgctgctgccgcgcgaggagttgtcaccgccgccgcctcgcgcgcgtgaggagcaccct

SEQ ID NO: 11131 - DNA, 687 bp, Oryza sativa
ctacaggtttgaacggcgagaccgtggagcgccgcgtccgtcaagtcgtgatcaagcggccctagcaccgggaacaacttccctggccctctttgcaagaaagggggcagccgaacgcgaagccgtaatcaacgtgagtgtactcagcgacccttttgccttttttcttccggggatcgcactgtgacttcatgtagtgcaggctctccctctgactgatatcatcgggccgctcgtggaccatcaggcggcggcgtcgctgaaggaggacattgccaaggaggcatccgatgttgctgccgctgctgtcacaacgagtggcagcaacgttccgagaagagggaggatgttctcctccgtgctcagaaatcgtcgaaagatgcccaccccctcggtaagctctcatggtccttcatcgcgtagttggaaaaccttgacctcacatcatgctcgttttactctaggcctcggatgcgtctccgccacctccgcgacggcagcggcttgtgacgcttggtgagaagtaagtggatgaattcgaggttttgttatttcgttgaactctcgcatcctgtcttgatggcagcctttcatagggcggcgcgggtgaaagcagcgcaagatggatctggaggaactctagcgcgtctccggccgtggcctcgacagatgtcgtggtcgtgccca

SEQ ID NO: 11132 - DNA, 539 bp, Oryza sativa
cttcaccatgtttgacaaagtattgaccaatattccagattgattgatcaaagcatggtgcacggcatagtcaacctgatcctgaaagttgttaaactgtaactgcgccatattgccatcctgattagagccaacaccttgatttccttgagaaccatctgcagcacccttatcactcggttgagccacatcacttggagcttgtttcacttctctatccttagaagaaccggtcccagggacatcagcaactacctttacttcatatttctgcacaactgtccccttgcgggtttgcatgaatgagttcaagaataggttacgtgcttgttgcatcattgcttcaagatccttctgctgatcaggtgtcaacttgtccggagtgatattcacgatgttgccttcttcgacttcagatagacctagcttctggatcttagctttaacagagcccggttcaccagccgaagacaacgatgctggcggcttctcatccatgaggaaaactctgacttctaatcagtcccaccgggcatgcc

SEQ ID NO: 11133 - DNA, 15962 bp, Oryza sativa
gtgttatatgagacacacaacttgtcgacgtttgaggtcgcgactacggtatttgtatgtatggggatcctcgtaccaggttatatgcgagattgaggtaaaagagatggggacaaggatttttatacagaatcgggctccttacctgtcaaataatagccctaaatcttggtggccaaagccggtgttgctctttattcatctagatcacacaagtacaatatttggaataacctatctagctgtcgtcgacttggcagcatggataaccaactcgtagtcgatgacggggtagtcttcctcctcgaatatgaactcatcgagatcagagatggtgctagatccctcttgctggcctccataggcaccggatgggggatgtctaggctaatctctgatggatctagcggtgtgtgttggcttctggcttatccctctcctcatatgtcacgcccagaaattcacgaaccagaatttctaagctgaatgtgtattaaacccctatccaggaccagccagggtacacaaacgacaattgttgacatacagatccacgtcttacaaaaatataaaagattacaaatgcagcggaaaagataaaacaagctagacttggaaacttgacttctgcagcggggcgactccactccacaggcaatccttgacggcagcgacgaaaccaacttcgacaaaacaactcccactaggaagatcttcagctctggtgtgggggaaagagagcaagactgagtactacccactgtactcagcaagttataccggaagaggaggtatgatgcaggatatatccaaaggaggctaaaggctcatttgcataaagctagcatttaaaagcagtagttgaaagcagtaaaacagctgtagtgatttatcaatattaaccaatcactgtccaacgctacaccacgttgcaacaggcccaaaccaccacctgaactaaccagttccattagctaactagatgtgagactaatcacggtgaatctggtcgaccgcccataactgcgggcacggctattcgaatagttttactctgatcagaggtgtacaactgtacccacaagacacagccccacgacacattcccatgcaccgacatgccaccacgacataccggaaagaggccgtgacaggacccttcgcataaccccctctaaccgatcgcaccacaccttagggttcgcccccgtccccagcaggcaacgggcagcccccctttcatgccgtggtgaatccggaagccgatcaaccggacaccccggctgaaccaactccatcacgcccaccctcgtctgggtacgtcggctagaggaaagctacactacaagcccagccgttgcccacgctggcttgtggtaagtacggtaagttcttccagggtatcccgcgaaccggtccttaatcgctatgggcatgactaacaaaaccatgcacccacagcccaccatgtagtgtattttaattaaccaacaccattacggtggcactaaaccaaagctatgccaataatcaaagtctatgctttaatgtgattccctttttgtgtactagtagaactaagcatggctaagcatttcctaaaccaacatctagtcattttaatacccgagttagcaatggcataaggtaaacaatatatggctgagtagtaggactcatcccacatgatattgtaaaacaatgcaatatttaatagaaatgcgggacatttgtaaattgggtacaatatgatcaattgtaatgcatgacttgccttgctctcgcactgatggaaccacagcaacgtcttcgagaaaccgcggatcgatgaaacggccgaaatctacgcgacaaacaaagcacacaagcaaaacaggctataagactattgaaacaggaaacaaaaccatttttaatggattctatgcatttttatgaatttactgagacttgaatggacttaatcggagctcggatgaattagttatgatttttaaaagattctctgtgtttttactaataaagaaaaggccttaattaattactgcgcaataaatccccagggctgacgtcatcaagggagggggcgccgacatgcgggccccactcggcagcggctcaaggggcctgtccaccgtggaccgggaccacgtgggtgatccaccgccggtccacgggaccgacggcccggggccgatcggacggtgcgggtggcggcctggcacggctcggctcggcacaaagccggccgaccggccatgggggtgcggcggcggcgcacgcgaccaccggcgacggcaagcggcggcgcgagcggcggcggatggcgcacaggccgacggcggcggccgaaggtgatagcgagtgcgcggagagcggcggcgcgcggggaaaagtgggaaggagggaggagaggggctcctcaccggagggcggcgaccggagcgggggtgaaggtggcggcgacgacctggcgacgagaaggggcggacgggcgccggcggcacctaaggagggggaggagaggggttaggggtttagaggaaacccgcggcgacaaaaatggccggccagagttgaagggaatggaggggctcaccgacgtgcgaggaaaccggagctcccgaggggttcgggcgatgtgaggcggtgaccgaggtgctccaagcggcggcgaagctaacggcggcggcggcttggcgcggtggcggctctagcggcggcagcgcgtagctggaggcggcggcgagctgcggcgcgggcggcgagcggcgcgagctcggtaggattcacgggagggagcggcgagagcggaaaggggaagaggagggcacggagaacgttttataggcggagggggaggcagacgtggccgggaggacctccgatttcgccggcgacgtggggaggagagagaggagatggggggattcaaaatgcgaatcccgccccttttcgagcgcacgcatgtgccgggagacgcggggagagggcggcgacgtggggaggacgcgtgggcgatgcggcgtgggtgcgggaggagcggcggaggtgggcacggcggtttcggcggtggttgccgacgtggggcaggcggccagaggaaggggacgaccccgacaggtggggcccacctgtcggcgtcccgaggagagatggaggggcggcttgggccggcccacaaggaggagggtgcgcgtggcggtggggtggactgggccgacggcccaagaagaggaaaaggagggaaaagaaaaagaaaaggaggaaaagattttccctgggatttaaaaattgcatgtgctcaattttaattggttaaaattatttcgagagctctgaaaattgcactaaaagtcttgttaatgtattggagcatggggaactcaagaaaaattccaccacgccgaatttgattattaaatgcatttattaattgaggattagctctaggttaattcaacaatttctttaggcgatttatttaacaaattttaaagctggaaaggggaacttcagtgcgtgacatcataggagagcttgtatttatacccatagattccccctgtctatgtagaactagggagaccgtacttgccgtttccatatagaactatatttgtccttccttatccggaactccttctatacacgaggtatgattccgtataatacatggtatgtggtgggtcctgccgagcttagtcgactactattaggtatgtggtatctataactatgacactactataaaccgataaaacatgtggtagccagaatgagttttatcggatatgaccattttcttgaagcaaagttaaattagtacatgattcttacaaaaataaattacttttaaaaacaaatgggttgctaattttcggtgcacaacaattatgatcacaattgaaacatatacacctaaacaccgaaaagacaaacatagaatttaactatttccatctatacattacacatataagtttaagtttttaatgtcattaagagcatctccagccgagcggccctccatcctacgccgacgtagctctgccaatagcggcagggatgacgtggcttccccggctcaactcgatcaggcttctcgtcgatgagtagatgtagggcgtggcattgcagcctcgtccccaagaccccaagtgtcccgctagtcctctatcccaccgcttcccgagcagccgagcaggacacagcggtagcctttatcgtcacttgtagctggtagcgatgatttgtttctatttgtaatgcactaaaatttgttttcttcctttggaaaatagagattttatctttgcttatttgtagggattgagatttaaggggatatgatgctttttttagcaataacccatataaagacctataagaaaatacaggggatatattttaggaacgtattactagaaatacagctagcaccaactttcaaccttctttcttagatgttgcgacaattgtattgcacttcttcgttgatgtaaccatatacaaatatacgcacgggtcaacccccaacattttttctaacatcatatatgccattcactcaaaactcatagcttagctttgtgcacatcaatagcttacaactaagtagaggtaattattgttgctatctatgtttggttttatcttaaaaataaaatattgtaaatcataaagcgactttgaacaatcgagacaacatcactaatggcttaaggttttaatgtttgagctagcaccaaccttgtgacgacctagcatatgtaacttttttcagcggaaaaaatccttatgtatccaatcaaaacatgtagttttctatatattaattaacttacaacttagtacttatcattgttacattgcatgcttgaattaccttaataagcaaccttaataaacatttaaactatagtctataaaacaacttagagcaaaccagaaactatcatcaatgcttggaaaatatcatacctcaccctgtttccggctttcccataaaaaaaagagaaaagcattcgaaaaaaacttccattttcttagctagcttagccaaacataccaactggtatcaatccaagacaagtaaaactattttcttaacacaataggatcatgtatgtcattcacttaaattttgcagatttacgcaaattaattaaattgcatgcaagcaccatttattattaccatctatgtttagatttaccttaataaaatactatagaccataaagtaactttgaacaagtaagaatacatcactagtggcttaaggatttaatgtttgagatagcaccaatctcgtgataactcatacttttctcccagggcaaaaattacaaatacatccaatcaaaactattatagtttataggtaaaaaaaactattagtttatgtatattaattaatttatatctaagtatctatcactgactgggaatatatcctaataaaccttacaaaccgtataatatgtaaagcaaccttaaacaaaaccatgtattttagcatcactggttggaaagcatcagcagcagcctcatcacctcatcaaagcctctgttcctggcttcctgcctgccgcaggaccaaggaaaacccaaaccatcaccccccagaaaaaaaaaagagagaaaagcatcccaaaaaaacaatcagagagaggagaggagcaaaaaaaaaaatccccaatcctccatgaagcccaccacttccttccctcccgccgccgcggcggcggcggcggcggccgacaacccttccccgtcggcgtcggactccccgtcggccacgttctccgtcgagcggcgcggcgacgcctccgcgtcgtgccggtggacgctcccggactttccccgcacccgcgcccgcaccttttacagccgctacttcgaggtgggcggcttcgactgccgcctactcctatacccgcgcggcgactcgcaggcgctcccgggctacctctccctctacctccaggtgctcgaccccaaaaccccgacgtcgtcgtcgtccgccaccaccacctcctcctcctccaaatgggagtgctttctcagctaccgcctctccgtcgcccacccttcccccgatccctccaagtccctggcgcgcgactcgtggcaccgcttctcctccaagaagcggtcgcacggctggtgcgacttcgcgccgtccgccgccgccgcctacctcttcccgccgcacgactccctcgtcatcgccgccgacatatcggtgctcgccgaggccgcctcgttcgccgaggccgacagccgcttcacctggaaggtgctcaacttcggcaccttccgggagatggtccgcacgcagaagatcatgagccctgccttcttcccggcggccaatgccggtgggagcgactgcgggctccggattagtgtctatcagagtaatgtatctggcgcggaccatttgtcggtgtgtctggagagcaaggagcccctggtgcaggcaacatcagggtcctcggcatcagcattgccgtcgagtgccgggggcagcggcgtgcccgatggtgaccgtgggtgctggtgtctttttcgtgtttcgatcctcaatcagaagccaggtgggagtcacatccacaaagactcgtatggccggtttggggctgacaatgccagccttgggtggggagattacataaaaatggatgattttttggctgcggatgggggttacctgcttgatggtgctgtggtgtttagtgcttcagtgcatgtgatcaaggagtcaaactcgttcactcgcagcttaccgatgatagcaggcatgagtggtgctggcagtggacgagctggggctagaaagtcggatggacactttggaaagtttgtgtggaggattgagaacttcacaagattgaaggagctgctcaagaagcgaaagatcacgggtctgtgcatcaaaagcagaaagtttcaggtcgggaatcgagactgccgccttattgtgtatccacggggtaagcattctagcaaatgttttctccatactcatctggtagtttgcaagatcaacttgtggatttctgctacataagtacatatactgcttatagaggctaaactttggtaacatacccaggcacacacatcacacacctgattgatttaatcagaactataacatagctaaatgtgtggggtgcttttaactgtttgaaaattttggaatcaaggttaagtggcctgtgtaaattggaacctggaaatggaaatgaggtaaatcccaaaagattaaaaaaaaactagtttagctactggctagtatgccactaaataaattaagcagcttgggtttcacatttttcgttttaatatatgatcaaatcctgtttattaattaaatgatacaaatgaattggtttgttgcataaatcgtgccaattctcctctcttagatgcagcatatggtcatttgaactcatcttttaaaaactatagatgcctcaatttttgttaagtacacttgttttattaagcaggctcgacatcttctaaaaactgcagatgccacaattttttgtcctatttattgagttctctgcgaacgtatggcttcattgcaatctaatcgttgtcactttcctatcaagtagctgttgagtatggtttacttatagttatgtaactgtatactttaagaatgcgaatactcattctgtcagttggttctcttaacatttctgtaatcagggcagtctcaaccgccatgcaacctgtcagtgtttttagaagtgacagatccccggaatagcagtgaatggagctgctttgtgagccatagattgtctgtcatcaatcagaaattagaggagaggacaatagtgaaagaatctcagaaccgttactctaagtcagcaaaggattggggatggcgtgaatttgtgacattaactgtcctattcgatcaggatgccggttttcttgtacaggacactgttgtttttgctgcagaggttctcattctgaaggaaactgctactattcaagagcttagtgacgaagattctgaagcatgcagttcaggttctggatgtcagattgattctttgccaaaacgtccatcattcacgtggaaggtggaaaatttcttatccttcaaggatattatggagacaagaaagatttttagtaaatatttccaggctggtggttgtgagttgcgtataggtaaaggaagttacttttcatgtcttgtgccatacatttcttgccttttgtgctcatcttatcacaatttgcaggtgtatatgagtcgtttgatacgatctgcatatacctggaaagtgaccagccatctgggtttgatcctgataagaacttttgggtacactataagatggctataattaaccagaagaattctgcaaaaacggtgtgtaaggaatcatcaatctgcacaaaaacatggaacaattcagttcttcagttcatgaaggtctcagacctgttggacactgatgctggttttcttgtccgggacactgttgtttttgtttgtgaaatcatagactgctgtccatggtttgatttctctgatcttgaggtgagattggatttgctgtttttcatgtggcttgttcctttttgcttcctgtgctgggttggggtaaatattgatgatagtcatgatactattatagttactccaaatacatccaaattgccttcgtgttgtatagcatgcatgcttctaaccaaatgttgttgcagtacagtaaaatccaattgttcatatcgaatgtgattatgcaacttgacatttgatataacatatgacagagatcaaaagaataataagttgaaaaagcttaggatactcatattttttggtgatttgggtcatattggattagttgctttggaatgttggggagtatagtgactcaagtcttagaaatgctaacactctttttttgtatagtatagctgagattagtaaataacagggattgcacaagctgcatatatatatttttaatttagtggatacattatgataagagattaataatggaagttgacaacatgtaacaactatagtgctcaattttttgtgacgggaatcatatatagacataggctataatttaaacttctgtgaagaactagtgctatatcatttgataattaggtgtatctatttagttggaacaacacacaactacaaaggtgcataggtgaaatgttcttttaagcatttttacagaaaaaaataaattgcaacactggtcagatcgaatattgtgtccattttccatttatatgtacattcttcattgaactacccaaaaatcctaggaaatcaaaaaaatgatttcttcaaatccattgtagacaacaggactaaagcacgacagtattccatgccaatggatttcaaagtctggtggcattactgacatgtcaatttcaaagtccttaagaagatgccaggttctgggcactattaggctgtgctcgtttgtttgggttgggaacccatttgctgcgcacggaaaacggagcggaccattagcacgtgattaattaagtattagctaactttttttttcaaaaatggatcaatatgatttttttaagcaactttcgtatagaaactttttgcaaaacacacaccgtttagtagtttgaaaagcgtgcgcgcggaacacaagggagccgagttgggaaagttggggaaagaactcagccttagtcaatattcactagatttaaggacataagcatgagtagcagtccaggtgttcttctattcgttttcctgtattcgggtggtagcataacattatggccttctagtcttttcctatactgtagtattgtacttggataactgttgctgttcatgcctggtagaaaagctctctgcatctcttatagtagtcacacaattgcaggttttggcgtcagatgacgaccaggatgatttgtcaacagatcctgatgactttattgagtctgaagacagcgaggatatgagtggtgatgaggaagatatgttccgaaacctcctctcgagagctgggttttctcttacatatggtgaaaactatactcagccgcaggttactttaagagagaaaattctaacagatgctagtgcaattgctggatttcttactggtctgcgtgtttacctcgataacccagcaaaagtaaagcgcatgctacttcctaccaaagtatccaccagggctggtggaaagaaagatgtttcaaagtgcgactcgagttccacaagcctcatcagtttgctgatgggagttagtgtcttgaagcaggctatcatagacttgcttcttgatataatggttgagtgctgccaaccttcagaagaaagaccagcatatgtctcatcctcagcaagttccaaaacttctcctgactcgaatggggctagctctccaccagagctcaatgttgaaggtgaactgacagaatgtgctttcagtaataagtatgaaaggctgaaacctggcaatgatgatatccatcataggctttctgtacaaaacacagataagtgtacaaatgatattcctgccagagttttagaacagtcctgttctccccctgaagtatctggtgctgatttgctagaagatgaaggctctgaccaggcttccagggtatgacttaaagtttcctattatggtcagcttcttttttatctttcttctttgataacaataataagttgctctgctggattttttttttcagacaaaatggccagagcaatcagaggagctgttaggactaatagttagttcattgagggcactggacagtgctgtcccacatgggtgccctgaaccaagaagacgacctcagtctgtccagaaaattgcacttgtactagagaaatctccaaagaagcttcagccagatttggttgcccttgtcccaaagttggttgatagttcagaacactctcttgccgcttgtgcactgttagatcatcttcaaaagccagatactgagccttcgttgaggttaccggtaagatttcctatttgtcactatgtgaaaaaaaaatgtatttacattgtttttattaactaatggctacacatttctacatttgtgtttctatattgtgactacagtgtatcagtatctaaggttagcttatatagtaggccagtaaatgattaaacatgcacgtgaactctgatacctaatgtagttctttgtctttaacatcacaggtttttaatgctctatctgagctagaatttgattgtgatatctggaaacaagcatcttttcatgcactcgaattgttggctgattcaaatgatgagccacttgtagaggccattacatatgttctcaaggcagcatcacaatgccagcatattgctcaagctgtatgtttaccatccaagattatgttactttcctattttttaaaaattatcttctcgcttttcttattagtgtgcctttcttgttctccataggctagagctgtccgatggagactaaaagatctgggtactgaagttcccctgtgtgtgcttgatttcttgtctaaaacagtgcatagctggtcagatgtagctgatgctttgttgaaggatattgattctgactgtgagcctgatagcagttgcctctctatgtcctgtagtactagtagtacagacgagttttcagctgaagggatgcattctttgcaaggtcaagctgtacatggaaaagatcatctatcagatgtttttatactgatagaaatgctgtcgatacccagattatttgttgaagtttctcaggttttgcagagggctttattgcgaggagcctttgggctgcaattagtagccatggtgttggaaagaaggcattctcacaggttaagtcttaagtctgggactgggactatggtgaatgattcacagaacaagcaagttctgttagacgggcagtttgaacatttgcctgtccaagaagatgatttcacttcagtccttgcacttggtgaggtattatctctatctacagaaaccagggtgcaagattttgtgcggatgctttatgctatcatttttaagatatataccgaggatcattatagatatagaattctgaagggtcttgttgaacgagcaacaaatacttcagatagctgccgagcagttgacatagatatggatgtcttggtatttcttgttaaggaggaatttggaattgctagacctgttttgaacatgttgcgtgaggttgctgaagttgctcaagctgatcgtgcaaatctttggcaccaaatatgtgctactgaagatgagaatatgcgtttgcgagaagacatggatatggaacaaacaaaattcactaaggaaaaagatgtgttaatgcaacaactaactgagtcagaggcagctaatgcgcatctaagggtatttccttgtcattcagctgtttggccggactattgttgtctatttctagcctaacctttttcttctaattttcttgttattgtagtctgagctaaaagctgagaaggatcgttttgtccgggagaagaaggaactttctgagcagatgctggagatggagaatcagttggaatgggtacgatcagaaaaagatgagcaaattgtaaagctaactgctgataagaaaaatcttcatgatcgtctacatgaagcagagacacaactatcccagttcaaagcatggaaacgcgaggaactaaaggttagagtgaactaccataaagacagcatgcaatacttgttcgcgaccaaaatgaactgtccacttctgaagttctagtgttcatttctgttgttagatgctctctctgttccatattgcaagtcatctacacgttttttcctaagtcaaacttctctaattttgaccgagttcataggaaaatgtaccaacatctgcaataacaaataagtgcactatcaagacatatttcatggtggatttaatgaaactaatttgatgttgtaaatgttggtgcatttttttataaactctgacaaagtttgacttaggacaaaactaaaatgatttgcaatatggaacgaatggagtaccttgaaatgatgctaactctttacaaagtctgtcttatccatactgaatcccatcttttgttctgcacttcgatactattatagatatatgttactcgttattctcaacatgcctgtgcacctagaccttggttctctatattatgcgaatacactttctggttaatttggcatgctcttttcagaagttgtggatccacacctttacttctggtacttcctacctgcgatctgtagttgccacgaatcaagatccatacattgatttttaacaattctttcatggccactgcagcaccacacatttcatgtcaaagtttgaaactagcacatagtatcataagaatgtgattccagcatgccttgaggagcaaccgataccactacaccacgtgcaggattattcatgcatgataaattgcaagtgcatgttttttggatatgaaaatcatatggagcaagccattttggctttttttttttgtgttatcattaccttacatgttactactgaaagttttagtgacatcaactacatcaatgttttcccatcaaaacttatgtttttgcatgctacagaaaataaccaaggagaagaatgctttggcagagaggcttaagggtgttgaagcttcaaggaaaagggttgatgatgaattcaaacggtttgttgctgaagcacagactcgtgaagagattcggaaatcacttgaaggtgaagtaagaaggctgactcagacagttggacaaaccgagggagaaaagaaagaaaaagaagaccaaattactcgttgtgaagcttacatagatggaatggagtcaaaactacaagtttgccaggtcttccaccttgctaactttttacgttgccaaaataactagtagtcctaatattaattatagaattatttttcaataccaaagacaccctttatctttctagtagaaaactccttatggcgcagagttgttttccacttattaaaattagtcattaaaataaagtaatttggagaacagcaactaagtaatagccttaatgtctaattatagtttatcttagttttaaccatggatcaaatttgggtgctccacttttttttgggtaccagtttggaatgttttaacaactacatttccactttatattgggaaacgattggcctaaattcaacattctgtaaagagcatgcaaaaatgttgaaagtaggtcattctacagtttatgtagtagattgtacggcgttgaaccaccagtcaactgataaattgtggcgtgcgtaacattaaacgtgcaattgcacgcatttaaggcatgtttgcattcagttttttatatttctgctcttaaatgattaaatgattttggaatgttcagtggtatttgtaaatcgtaatgatgaaaaagctcaccgtatttgtcacaattcacttttttcttctttaataacttccccagaccttttcacactatatttgatttctgacacatatcttcctattgcagcaatatattcacaccctggagacctcaattcaggaagagatggcacggcatgctcccgtgtatggtgtcggcgtggaagctttatcactggatgagcttgagacactcacaaacatccacgagcggggtttaagacagatacatgcaattcggcaaaggaaaggtagcagtcatcgcttgagtgccccttcgctcccgcacgtcccaggtttatactcctcgcctccttcaatggcagttggtctgccgtcctcgctgatccccacatcgtccgtagcacctaatggtgcaggcatccatggaaatggccacatgaatggttccatgggtagctggttcaatccaacctaattcagaagatgcagcaccgcaacaccggtgtccattttgtgcatcaattcgacgtatcacattttgcctggccgtatttaccagctgctgagcaatccaacgtgataccctttttgtcctcgccatttggtttggcttttcttgcttgtattttgaactggtagcgccgtcggcttgatagatcaaagagcgttaagggggtttccgcatggaataagttgtaataatcaagataatccgatggaactaccaggtattcaggtgcaagtgggaaagctatcgaaatggttgatatcaccaattgcttggttatttctaaaagcattgggattttttttttgttcaaacttctggaaaggtgcaacatgagaaaagtattccagtttccataggcgtgtctgcctgttcttttactggcatgtcttctgtaccggtgtctagctttctcagtgctatgatggtgctcacatagtcacattagtgcacactttcctttgtttatgcacatggtctgaaacctgaatcggtcatccaaatttcgaaataaaagtcttaacatgaatatcttgagaagaaaaatcaaggctacacacgttattgtcttcttgataaattgaaagttgacgggcttgttagtaactgtcatccaattccaatatttgcactgtcgtaaaaacgtgaaatttgcacttgctggctaggccaatattcgattaatttgcaagtagttgggcctaattagcaacacgccatcgaaggcaatctttcggcccaatcacggcccaggtttgggcgagagcctcgggtcagtgtcagtgtcctctcgaaaaacgaaaaaagggaaaaaaagaagaaaagaaagaacacaagtggccatgggggatgagatgaaaaatgcgtaacttgtctcttcccgtcgcacgttttcacaagacgtgccaaatcgaaatgcctgacctagacgtgtcaaaaaatttacaaataaataaacagaggtttact

SEQ ID NO: 11134 - DNA, 539 bp, Oryza sativa
cataagccttctcgaaatctagctttaaaatgatcccttctagttttctaacactcaattcatgaatcacttcgtgtagaatgaccacaccatctaaaatgtatcgaccaggaataaatgttgtctggcattctctaatgattttccctgcaactcttgacagtctgaccgctaacaccttagtaatcagcttaaaagcaacatgagcaaacaaattgacctgaattgtttgattgtattggcattcttaatcttcggaatcaaacttatgaccccaatagttgagcctccaaagatctaagttcccttcaaaaagagcatcaagcatttctttaaattgcatcttaagttgtccccaaaactctttcatgaaactaactggcagtccatccggtcctggggcagtgtttgataccattaattcatcatgccttggtgttagaggcggcaacagaatgggtcgaggccgaattggaccggaatgaccccatcccataacccacaactggaggaaatgatccccacccccgccagggtcc

SEQ ID NO: 11135 - DNA, 592 bp, Oryza sativa
ccaaaagagttcattactgacaacggcaagcagtttgactctgataagttcagagaaatgtgcgaagggcttaacctaaaaatcaaggttcgcgtcggtcgcgcacccgcagtcaaatggggcggccgaacgtgcaaatggcaagatcctagaagcactaaagaaaagactcgaggaggcagcgaaaggcaaaatggccagaagaattgctatcggttctctgggccctccgacgaccccacaagaccaaccaagtttagcccgtttatgcttctttatggcgatgaggcaatgaccccagcagagctaggggctaacttaccaagggttatgttctctgggggcgaagaggggcgcgaagtatcgctcgaactcttggaaggggtaagggtcgaagcgctcgagcacatgcacaagtacgtcacaagcacttcggcaacttacaacaaaaaaagtttgacccacggagctgatgcctggtcatcttgtcctaagaaagaagacgaacccagtagcggttggtaagcttgaatcaaaatgggaacgaccgtaccttatcaaacacaagtccaggacgggatcttttcgccta

SEQ ID NO: 11136 - DNA, 1409 bp, Oryza sativa
cattttggatccagcaaaacagaagtagaagcaattccaaccatatctgttgtttcagtttcagcaaccgcaccctttgtgatctcagcatcaataccaacaccactaggacccatcggtataccagtttgagcaccaacagaagctacaccataagttgtcgccgctgcatcctgaacatgaacagtagcatcattaggagccgtgtcactcattgccttcaacccatcttcaatcttgtcactttcattcatcacatatacaaaattttcttttgtttttgatgcatctaaagccaacttaatcattttctgtgacaagatgttgaacctgagtaaagggttgctttcaagaacagcagcaggcatcaatgtgtttggcacaaataattcatggttcttgtctttcagcctccatctttcaataaaatatttctcaggtagttttgttatgttcaagtgaatgagtactttgagcacatgaacacacaaaataccatccttcttaaatcttgaacaaatacattcatattcttcagctatagcatcaacaaccacaatatacttcctttttctgaaatcctgcagtgcatgaatctctgatttgtacacctcaaaaatagaatcgtgcactttcacagtcacatcatacttggtatagctttgcaagatacgctgaaatgcccaaaatatcttcctagtatacagttttgcagcttgcttctcaaattgatattctgaccaagtatctggaacaatattcctagtcagcgattcctattctttgaagcactcataaattgtttttgcaatcctttcatactgtgctaggaatgcagaaacactatgagatgaacaaatgtcagctttgtaccttgaatttgtcccctcactccttgctgttgtctgaatcaaagggcaccaattgcttttgaagtaaactggtgcccatctctttctagtgacccacataagctgaaaatacctaacattatacagattctttcttcttatgaaatctttccacaaatattcaaattcagcctctgtctgggattttgtaacaatatcatggaaatccttgtaaacttcttcatcctctgaattgaatgtccttcctgttttgtcccttgcatttgataacatatggaacaggcattcctatgaacagtgtctggaaaaactatggcaatagcagctttcattgccaagtcttgatcagttataatagtagcaggagcctttgcacccatacaatcaaagaacgtatttgacaaccaactgaaagtctcactttgttcatcttggaggaatgcataacccaataagcaattgcaccatgactaggtattcctacaaatggagcaaagggcaaatcatacctatgtcttgtacgtcgtgtaaaactat

SEQ ID NO: 11137 - DNA, 6670 bp, Oryza sativa
attacgtagatcctcacaccagcgtaccccaataccctctatatccggtctacgggtatcccccgtcgacataatgaaagtgatgtcttatctggcgaaggcatgacagtagtaacaacaacgatgatagctaggttagtgtttagagtttcggggtaaggattgggggtagggctaaggttagaggttagtgtaaggggaagaaaagggtttcctgtgttagatggtggaccgacagggacagtagacatgtgttagtagtgagacaacagagccatcaacaaagcatgagtttgaaggaggacaatgagcgaggtcgatgatagagaagttaggaggtaatggtatctctggcagccttaaccaccaaagatgggggaagaatatggcagggcagagaggggaggcacctcaccgttgtttgacttagtaaggagagggtaagaggaggggggaggtcgaccttgtaggactcgtgggtacctcaccgttgtgcacgaagcatgttaggcgttggtggggagaaacacctgaggggagaagataaggttggaatcattgtagcaacatggatcttgttgcaatctagaccctctaaatatgagtgaaatttatagtaactggaaattagatagtcaacttagacaattacgatggtgaaagaaacaaagtggttaataagtggtgaccatgaatatgaatccatggtagtgggtgatccctggttaacttatcattgtgaaaattggtggaatatcatagtgtgacttggcccaagttagccttgattttggcatgttgcttcttcactataagaaattcaaacaaccaaacgtcatgtaccagttgttcagctcccagcttataaaatggcaaaggctaatacaccaaaatgttttcaattgatttccatgcacaagtagaacccatgttaaaaaaacacaactttcctatctcctcttatactgaggcaagaggtgtaccttgcgcaaaatttggtttatcgtctcgctttgccatactcttttaggtatgtgcttgtttcattgcaaagttggtgcatgtcatagatatttaatttttagaccccacgtgctatacatttactatgttttagtcaaatcttatcttagatgcgaccataagtttgttagttgtcttcaatatttgtctcacctaaattatctttagggtgtaattcactagaccttttaacaatagtacattatcattttcttctcgttttaaccatcaaaccaacaatattcccttattcccttatcatcctcgtttgttttctccccccccccctcgttttttctatgagagcctcattggtcgcccatatttcctaataagaaaaacggtttattagaggaaaaaaataatttataagtaaaacttttatgtatttgttcgtagtaacttaaatgccaacattaaaaggaaattacgttgagaatatcttataatcaacttcaaaattaagttcaaaaattcaaattttggttttttttctttggttcattaggtcaaccgatgggactatgaaatgataatcctctactaattctctttaacttagcttaaaataatatatacttttaatagatgaagagagtaactttcgccaagtttaagagtgaaccaaacatgacctataaaccctggagtgagccctaaacatggtaaaggctgtgtttagttccaccggtaaaaagaatttattgggtcatatcagatatatggataccacatttgaagtatgaaacgtagactaataacaaaacaaattacataatacgcatgtaaactacgagacgaatttattaagcctaattaatctatcattagcaaatatttattgtagcaccacatcatcagattatggcgcaattaggctgtcgacgggggatacccgtagactagatatagagggtattagggtacgctggtacgaggatctacgtaatacgacatcaagcaacaaaaaacagggattatactggttcaggccccttaataggtaatagccctaatccagttgatatgggattatatgacggaaatcacaaattacaaagggaatagtggaactcgatgataccgacgagatcgtagttgagttggttcgactagatcacccggcgacttggctcctgtaggttctggctttgtaggctgtagtggatgtgttggcgataagattcgatgccttaggtcctcccggggggtctctttataccgcaggtcagttggtctccaagtaggactcggagacatcggaccctacacgatacagtgacgacccagttctatccgagtaggaatctttccatctgtggactccgtgatgaatttccttaacgtgtacagagaacgtccgtatacgcgcagatataccatatcgatgtatgacgtatatccaagggtagagggtataccttatccgtaaccctgacataggcttaaaagattcgtctcgcaatttatatacaaactgtgtaattagtttttttaatatttaatactctatggtcatgttcttttctctaacaaaagttggattaagattaagatttttgtggcacgcttttcaaactgctaaacgatgtgtttcgtgcgaaaactttctatatgaaagttgctctaaaatatcatattaatctattttttaagtttgtgtaaaactcaatcaattataagttaataccatcttattttacgtaaaaaacttaatcttcatctttatttttaagagattcaaacaccacctatccaacgtttgatgtgatgaagaaaaaaaatttgccggtggatctagacacccccgaagaatcaatgtgccatgagtcatcagtcatgactcatgacacgatgggcacacggtcacgcaccacatggcgccggcgccgtgccacgctgacccttcttctcttcccccgttgcggctgacaaactattaatgcccccctcacgccccgtgttcaattcgccccccaaaaaccaaacctcccttctctctctctcctccttatctccagttctccacccacccaccctcagtgccactaaaataaaggccaccggtgtcagcgcgtggggcccacctaccggcccccaccaccctgtcagacacgatcagagacaccccaacccaacccaacccaacccaagccccgcggcgacacccgagagagctcagctcagctcagctcggcgacgacgacgagcgcgcgcgcgtctgccgctgctgcggctgccgagcaagaggacatgcatgtgaagtccccccgctactactcaataattcctccgcttccttcctctcggctctcaccccacccaggccgcagcgaccaccaccaccgcgccgcggggcccacccacccctcgcgtcctccagccgccagccaagccagctcctgcgcctttgttcccatgcgcccgcaagaaaccccacccccaccaccacccaagaatctctctcacacacttcactcggtcttcctcttcttcttctttccatctctctctctctctctctggtctcagtgaggtgaggtgaggtgaaggtcagtgatggcgtggggggcttgcgctctgctcctcctcctcctggtacttggtgcgggaggaggaggaggggtgcattgcctggaggtgacgaggagcaggagagccttgcagaggaggcaccacctgaggtcaagtgagttctctttgcattgatcccttctttgctcatcgccttcttcttcttcttctctccttctttcttgatgctcttcgatggcatgggattgggtagctagctagctagaacggattccatgcttttcattgcttggtgttcaggcttcagacaccatagttttctctgaacatgcataggtgttgacgtgttgttgtaacacgataatctgcaatgtgttggtttgatggtgcttgcgttcttgattagttaatgattactgctcccagttttacatcgtagtgttgccaatggggggaaaaatgacccgttttggcaagaaaagtggaggcgcgtgaattgccaagatgtgagtgtgactgcgccatgaatgtgatgagctccttctatatctatggtgttcgttggtcagcggctcacccggggcgtttgccaaaagtagcacgcctccaatgtagccttcgaccatgggaagaattgcataaacaatgatgggaatagtagctagtgagctggtagattgatttccatgtggttggtgaatggtggtgactcggactgatcgatgatgctttgaggtttttcaggagcagagagtggcgccaccatactggagctcaggcaccatggcggcggcggcggcggcggctcggggaagagcggcgggaggagcagggaggaggagctcggcggcctcttctcctccgacgccgcgcgcgtctcgtcgctgcagcgtcgcgcaggcggcgggtcttgggcggaggacgaggcggcggcggcggcggcgaccgggcgggtgcccgtcacgtccggggcgaggctacggacgctgaactacgtggccaccgtggggcttggcggcggcgaggcgacggtgatcgtggacacggcgagcgagctcacctgggtgcagtgcgcgccgtgcgcgtcgtgccacgaccagcagggcccgctgttcgacccggcgtcgtcgccgtcctacgccgtgctgccgtgcaactcctcctcctgcgacgcgctgcaggtggccaccggctcggcggccggggcgtgcggcggcggcgagcagccttcctgcagctacaccctcagctaccgtgacggctcctactcccagggcgtcctggcgcacgacaagctgagcctcgccggcgaggtcatcgacggcttcgtgttcggctgcggcaccagcaaccaggggccattcggcggcacctccggtctgatgggtctaggccggagccagctctcgctgatatcacaaaccatggatcaattcggtggtgtcttctcatactgcctacctctcaaggagtcagaatcatcagggtctctcgtcctcggcgacgacacctcggtgtaccggaattcaaccccaattgtgtacacaaccatggtttccgacccggtgcaagggcccttctactttgttaacctgaccgggatcaccattggcggccaggaggtagaatcttcagctggcaaggttatcgtcgactcgggaacgatcatcacgagcctcgtgccttcggtgtacaatgcggtcaaggcagagttcttgagccagttcgcggagtatccgcaagcgccggggttctcgattcttgacacttgcttcaacttgacagggttcagagagtgcagattcctagcctgaagtttgtgtttgaaggcaatgtggaggtggaggttgattccagtggagtgctctactttgtcagcagtgattcttctcaggtttgcttggctctggcctccctgaaatctgagtatgaaacttcaatcattggtaattaccagcagaagaatctgagggtcatatttgacactctaggatctcaaattggatttgcacaagagacttgtgattatatttaacatgatttgatttggagggggaagggggccatgagctatgtgaatatccctatacctggagatctgttttgagattacttctggtaattggcaaatggtagtacagtattagttattgtcaaatgtacaagcatctataattgcttcattctgttttttttttttactgccgtttctttgtgcttcagttcatcctagattaatatcgtttcaagaaacaagtggattttttttgtttgtcttcttgtttcattagatcctacaacttccttgtaatttcagatcctactgtagatcatccagtgcatattgacaacaagaagcacaataccaacttgtaaatttagaggggaaggcagtagtggttatgttttttttttaatgaaagaaattaggcataagtgagcatgtacagcaactgcgcaatcacttgagagaatgccgaataagaaaatttatgtaaaaagaaagcagatcaggacatgccgatcctatagcgatcagatctgacacatgaggtcggcactacctttccaaatgaagacatctgcaagaaacagcagacagagaatatacactatgcagaaatgtgcttttacaggatacagatcaaatcatacgccagagttactgatagtataaattaaaaatgaaagaagaataaaaggctagaatcgcattctcagttctcacatcacccaattgggaatgcgagctccagtggtttcaggtattctatctcatgaaaactgaaaaaataactggcaaatgatagttgtaacttatgaacaaaatatatttgcctataacccagtacatgtctcctgaagtttcacatttttcatgcattttttttcaaccattcactttgttctggctagaatggaagaaaaaactaccaaacaaacaagcagtcttagccactgagctaccaatactgcaatacatactgctgcaccattatgtacttacatgaatactcggagggaattttttttaatagaatacaaaaactgaagtagtagtacaatcacggattcagaatctaaagcaaggtacagtctcgcgctaagcact

SEQ ID NO: 11138 - DNA, 3725 bp, Oryza sativa
gatgtgattagaagcaagggttcagtgacatgtagtgattgtgggtcccatgaccataacattcggacttgtcccaaaaaaaagagaagtcaaatgcaacagaactgatgaaggagaggaaatatagagaactttagggacataaaactctttgggtagcaaaaaaatgactagcctatgtcttatgagtagaaacatcaagaaaaatggcattccacagtatgtctttaccccctttttgtttgcgtgttttttggatggtgcaaatacagttacatggttggctttgcaggcataactgattgttaaaaaagaaagaattgcttgtgtgaaaaatggcataccgtagtttgtcttcactcccttctattgtatttaatgtatatctgtcctcccctcactccctacccccccacccccaaaaaaacaattgaacctgcacacagttaaaaagagaaaaagtatctctcatcagatatctctcatcagtgagacgatcagtatcatgtaaaacacataaagaaatcctaaaaaaatacatgtccttttttaatatttgggtgttatgatattggatttaccatatctagtacaggaattaagctccacatagaaaacacatagcacaaaattttgctaacacatgtcctagagtttacaactcagctgtagcacataaaacacaagcaaagcacaaagtgtttgtatatataagtgtatcttgcatttgtgcaccaaaacaaaactgaaactgtatgttactagataatattttttttcaacaagttgaggactgacataaacccaaactgcatgggcttgaaaaaacaagaaaatatgacatctctctctctatctctctctctcttactaccaggtagtgtgtggccccatctcatgagcttgacagaaaaaacaggattgtgtaatctgttggtacacaaacaaaaacaggagtttatttcactgttgccttgcgtattttccatgctttgttggattgaagcttctagctagcatttttgcttcttcttgtgaactgtgttctgagaacaataggtcatttgcaatttgcttcctcatgtttgggatatattctggtttgatcatatatttcaagtgcatccttgggttccaccattccatacacttcatagcgtagattccgcaatcatggcttgatgagacaaaaacaaaaaaaatcatttaagaaaaacaaaaatcatggaaaaaagggaggagttttggacaaaaaaagaaaatgatatgtaatttggggatgtttgttggggttgataggcagttacccattgttttggcgagtaattggtgggtattggatatcaaatttactaaaatttttctccacatatgagaattcttcccacattgcaatgaatcctggtatctgtgtataacaagaggagcatgaaaaaaaaataccagaaaaaaaaaatcagtggatgcatctataaaaaaattgtatggaaaaaaaaagaacaaaatttgtatagctcaccagtagcccttgaattttcttatgatatttgttgttttcatcataaatggagtccaggaagacaaagtgatgccccttgatgtccacagtaaacacaaaccaatgattgtcatacaggcatgggaaaataagctacataacataaaaaccaaaggggcatcactttatgttaatcacacacacaaaaaagccgatcaattttatgtttgaaaaagaaaaatgtacaaaccaagtcatagtagtgcagaggtttcttgttcctagcaaatgtaaaggcttgtcttgcacaattttcagtcttcctcttttccagtaccttcccaattcttcaagaaataaacctgtggaaaaaaaaggtagagaattttgaagtgctacaactggagatgagaaaaaatgtatgtggtagaaagtatgaaaaaatcacatacactagttctgtggaagaagtaaaaattcctgtattcattttctttgttattctggtcgttggcaatcttcttggcatatgcattgaggacatatgtatccaccactccccttggtgatagagatttagacaatgatgaccatgtgacttttacattgtccattagaactgcaaatttgatgtaccagaaataaagaagataaatgcttttagtaatgcttagtactcttaaggcagaaagagtacaaaacaaaaaagtttagattacttaaattcagaaaattgaaatagtcagcacatgctctttgttatgcatattatgaaaaaatgcaaaaataatttgtaatgtcatagatttttcaccttctttgcatgccttgttgtgttaaacaaatagtgataaactttcatttggttgttaatacaaaattcagctgcgcctaccacttcaggattatcatacaaaatataaaatctaaatcaaaagtggaaaattagtgcgacatgtatcacttcagcggtgcatgttctactctatgttatgaacaacatttgtaaaaaactacagaaaacaccccacctcccatttctttttaaataaaaaaagcttgaaatgatcacaaaatctaaaaaaaggaaatgtaaaaaagcaaccattataatgctgttttgtgacacttactatttatattgttgcgtctcaccaatgctgagtatgttgttgtagtgattgagttcagctgccgagatggtttggtgccgtgtgtagttgtcatatggtgagctcttgtacttacttggatggacaattcttttagggcgataaagattgtgtctggtaccagagcagttggcagaagcatttagtgagtcgatgattcttatcattgaatattgtctttcttctgcttgagcatgttgatttggttccctcatttgtgctattcttggagaattcatacctatatcaggtgatgattgtgaactctgcattaaaaaataaaacaagtgaaaaatggggaaaaaaagaatttattgtaataatgtataaagagtataagacatagttttatgtcgtgctgattgaaaaaaattaagcaaaaaattgataggaaagtacttacaatttgtattacttgttttgtagcaggtgtccttgcagaagcaatgtttatgtgcagtggtgtttgagggctactttgctcattgtttatttgttgttgttgcaacgatgaaaaataaaagtaaaagaaaaaggatatgaacttcaaaggatgtgtttgttgttgtgaactcgaaaggaagtggtgaactcaaagaggtagtggctctgaactgagaagatgatgctctgatcaaaattgcaattgtggactgaccttccaaaaaccaacaaaccttttaggttgtgctgttatattaaaagtttaggatcccaagatagtattatatttttcaagtgccagcttttgctactagtttattcctccaatatatacttctatactactacctccatctcataaatataaaaggaattattccttttttgcataagaattattctcaaaaatactataataccagtgttaaaatatcagaagtttagaaattgtccagtaaggagcataccccaaaaagggttgatgtttgaaaaaaaaaagacaagtaaaaaaaatcagaggttattatcgcatgttgttcaaccatatcggtactcgttttcatcacagtgctgtccctaaagcctcctattccccatgtttgcaatgaagt

SEQ ID NO: 11139 - DNA, 512 bp, Oryza sativa
cgctgcagatgttgacgcgctgcacgaggctcagctcgccggccggcggccccgcgtagaggcaccgctcgaggctgccgttcgccatgaacggcagcaccagcgccttgaagtccggcaggctgcacgccgtgacgatccgcatgaggttccggtggcggatgcgcttcagcacctggcactcgcggttgaagctcttggtggagttcccggactgcagctggagcaccttcacggcgaccatggtgccgtcgcgcagcgtgccgcggtacacgcggccgtagctgcccgtgccgatgagccggtctgggctgaactcctccgtcgcctcgaccagctcccggtacgtgatccgcgggaacttgtacttcatcaccggcgacgagccgccgccgccgcggcgtcggcccctcctgaactcctcccgcaccgccgccagccgctcccggatcttccgaatgctgaccgcgcagaggatcgtcagcacgaacgccagcacggcggcgcagatg

SEQ ID NO: 11140 - DNA, 595 bp, Oryza sativa
cgacggcaacagcaccccgctcccgccgatcatcaccggcgctcgctccgtcccggtacacacaacacacctcaccccactcacaccaaattctctccctcttctcacctcaacatgttcacgaaatgttctttgtaaaaaaaaattcaggtgagcggggagttcccgatatcgaacagccatggccatggcgagttctcctcttccctgcacaagcgcatccacccctacccggtgtctgagccaggtagtataacgaattcactacactaattaatcaatgttcttgatgaacacacattgatcatctcaatcatctaccgatgaattctgaccagggagtgcaaagtgggacgagaagaaagaggtgagctggaaggagaggatggacgactggaaatccaagcagggcatcgtcgccggcggcgcccccgatcccgacgactacgacgccgacgtcccactgtacgcaatcctcagctgagcagcttacactgatcatgcatgacaactagtatattgatcatgcctgaactctctgtggcttgcaggaacgacgaggcgaggcagccgctgtcgaggaaggtgtcgatcg

SEQ ID NO: 11141 - DNA, 880 bp, Oryza sativa
ccctccctttttttgttccctccttatccttcctagccccggtttagcccgcccgccgttagtcgtcgcttaagcatcaccgcctttgggcccctgcgcagcggtctccaccggcggttgccgtggtcgcaacggcgcgtgcgcgtgcgcgcaccgtccccatgaccgctcggccggctttgtgccgagccgagcctagcctggccgccgccgcacagtccgatcggccccgggccgatccgggccgtcgatcccgtggaccggcggtggatcacccgcgtggtcccggtccacggtagaccggccacccgtgcgccgctgacatgcgggcctcgcttgtcggcgccgcaccccccccctccgtgctgacgtcagccctggaatatattgcgcaataaatgatttaaggtttttcttttatagtaataaacacagtgaatcttctaaaattcataactaattcatccgagctccgtttaagcccattcaagtctcagtaaatcaagaaaaatgtgtagaatacattaaaaatggttttgttccctgtttcagtagtcttatagcctgtttgcaatgtttgctttgtatgtcgctagattccgattcctccgacgctccggtgtactttgagatagtcaccgaggttcctccagcagcagagcaaggcaagtcatgcttgtcacttgaacatgttgatcctatagtgcaaatgctctattgttttctttcaaatattgcattgttttataatattactatgggatggttacctattgttacagccatgtttttggatatcttgctcctttgttagcttggggttatagcatgattagagtttggactaggaattgcttagccatgcttagttcaactagtt

SEQ ID NO: 11142 - DNA, 6327 bp, Oryza sativa
gaccttttcaagaaaaccggtcttcgggtatctaggcatggtttatgccatgataagtataggtgttcttggatttctagtttgggctcatcatatgtttactgtgggcttagacgttgatacgcgtgcctacttcaccgcagctaccatgatcatagctgtgcccactggaataaaaatctttagttggattgctaccatgtggggaggttcgatacaatacaaaacacccatgttatttgttgtagggttcatctttttgttcaccataggagggctcactggaattgttctagcaaactctgggctagacattactctacatgatacttattatgtggttgcacatttccattatgtactttctatgggagccgtttttgctttatttgctggattttactattgggtgggtaaaatctttggtcggacatatcctgaaactttaggccaaatccatttttggattacttttttcggggttaatctgaccttctttcccatgcatttcttagggctttcgggcatgccacgtcgcattccagattatccagatgcttacgccggatggaatgctctgagcagtttcggttcttatatatccgtagttgggattcgtcgtttcttcgtagttgtcgcaatcacttcaagcagtggaaagaacaaaagatgtgcggaaagtccttgggctgttgaacagaatccaaccacactagaatggttggtacaaaaccctccagcctttcatacttttggagaacttccagctatcaaaaagacaaaaagctaggcgcacctctcctaactattgcccataaaaaataatatatttaatattattatatattatatatatttgcccttataaaataatatatttaatatatattaattcaattttctattgtgtgaagtaaaagaagaaaaggtctaggctccgtcatgacggaatctaagataagaacctaacagaacgtaaaaaatgaaaaaagattctagactgttaatgtcttggctctggaaggagatcgcgtgcaagtaaactaacgtcgttcgttcggcgaccccgcctcacttcacttaacagaaagggggccctattgagaattacgagcatcgcataacagaaaatctatttacaagctattgattctccgactaccaattctcaggtctgtgcttcggttggagtcttggtccgcgggtggaggttcgcgagggggatattctgaaccagccgctatggcatattgccagccgatacaacttaaaagcgagaccaaatactctatactattactctaaacatcgaatgcaatgagaaattcttcgacagacggacttagctgattgatgtcataagcaatcttccacgtatagcgaaatcgagagttcacgctcagcgtgaaggaaagcacttctactttctcagagctccccatacagtggcacatcaccagccttgccttagttctcttctcgttcaatgctgtcttttcagcgctgatggaagcatgccaaggtgaagttgacgatctctttagcctttctccttctcttcatcttgccctatgagctcatgcagtgagtgccgcaggatgatttagttctgagcgagggcttgacccattgaggagggcatattcttctgcatctctcttgtcggatcgcctccccgtgtccacgtcgtcgaagagatagtctttggaccccaatttcccgtcgtagggagcactcttctgagcccctagattcgccgaaggatgagatcttgcctatgcagtaggatgaacaggaaagttctcctccattgagacccgtggaagactactactttttcttattgaaaaaaagagctttgttatcttacttgctggctagtaaacgctacccctacccttgaaaacttgtttacttttaagggccggagtttacttaaattcaagagggacttaaaggatttctaacttaactgtcctgcttactcattggatgaattgacagagtctcttgccctttaccttggatatacacaagattgctcattcgctgtaaccactagttctagaactgaataggaaaagctatatggcactcaaacagaatggatagcaactgaaactccaagaggtagtatactaatatacttttttccctaaaaaccggctttcctaagatgccttttggtctaagctttatatctatcctatcgctctcttgcttaaattaacttccttccttaactcagatctaaatggcttcctttggatcgacattaacttaggcgtaggtcaaagcacgggcatggaaaagggattatatggcgtgctgggctggatgaaagaagcaactacgcctacaatgagaatagcgggactcccactagctgacagagaactcccagccaaaatgaaactggacttccagcaatagcagcaatgtcactagaacctttcctactggagaataactagaagtttctggggcccttaaggtggaaaaaaatgattaaaaatcaaccatgcttactaaacaactcaatcatgcactcgttatgctccattcgaggtgtaatacctgaatcttcactcatcgagaacaagtatctttgacccagattaacatatccttcacaaatacaagctagcaagggataactgacaagataagtttatgcgtgccacctatcatttgatactgcctgatcaagtctttggatcaagtatgtttaaaaaaaggagtatgcacaggaaatcaagcaagaaaataaatagttgattgaagccatatcttctgtgcgcgttgtagtatgggtgactcttaggaaatcaaacaagtgagcgaagccctcatacccactcttctctcccctccccatacccatcaactactaggttgtggagagggcctcggtgtctctatttgctatgagaaacctacaaaaccatcttaagaaatttagtattcccctaccccttccttcctcaattcaaagtaaatgagcttggcttgattatcttcatccaatttagccattagaagactatcaagttctaagcgagccaaatctgaattaggtatggtattcactctctcatttaagaatttagaaaaatatggacttcgattcctgtcccgttagcatctccgatccgagagttgggatgactctgttagtttcggtcggaagccggacggtaatggacctacaacccttgcttgtggactagctgcagagctaacctttgttctattggtttggtggtgctaccaaaacaatttctttatgcccatcaaagaacctcgagatgctaatccacgaaaaacgatacgagaaatgcgaaagaactcaactacagaacgagggcgacccgtgaaaatacctcgatttctgactcgtggcattgaactctttcttggcaacttggacaacttacaacgatcccgcggaagatcgggttaaaaaattctaaagctttcgtctcaattcatatttagccgcgagcaatctacgtttgtgatctcgtatatgtcgcttctccgacatcttacttagtttccccctcatcttttagcaaaaagccgctccacagtagtaaagtctcatcttttgtattggccgaagtgacaatagtcacattgaaccctcgaatatgctcgaagatctcgaaatgatcttccagttccggggagaattcgcaaaactccgtttccataaagaatttgatggagttttcccatatttcgaccggagaatctaacatagacattactgtcaagattctgaccaaaaaatggtacattccatgccctcggagaacgctttgtcgtgcaaagtcactgacatatccagtgtctttttcggaccccaagaatggattggatcgaaacgactttcctgctttaaaataagggcccctttgtgtctgtatgaatctctgaccgcacaaaatctccataaccaattttccaaattggatttttaaatcagaggcagcttttggtactaatctgatttcaaacaatccaggaacttccataacattggcgtgattcagtttgagcaacagatcctgacgtaatacatcttcgtaatgaaaatggagtggaaacatcatggcttttccgctttttttttgagaatgagcactgtgaactatccgcttcaaaaaggatagttgatcgaaccgaaaccaacgtcaactacgagttattaagcgccgaatccaaataagtgtacttcctttacgcttgatgcaggatttacctattaatatgaagttcactcttctgctgacttgagcccagaagggaagcgactgatttccaattcttctttgctagtgcttgactcctgtggaattccattaacaagctttaaaagtaaagccttttatttggatttttgagatactagttatttataggttaagttcgatatttcactccgtgggccggctaattaatgaaagtaattcctggaggggaatcaatcgaagagattgcctgcccatgctacaattacttactctttaggactagagtgctaagctgcctccccggcaccaccactataatgaatggctcaaacaaataggagatgagaaagtcgagtagcagcactgatgggaacattttttgaaactagaatggttgatagtcaaataggagactcgcgttgtaggtaaggcttttcaaaaccctcgacttggctaacgccctttggttttgaggatcaatttgcccgtgcttgctggtgtcagggttgcagataagttgtttcggtgccatttcctttgttatgaatgaaaggcattttggagatttgctcagttgataccgaatttgaagataagcccttccctctcgtgaacaccttcgtttagtagatcggtacggttccattcagaagaaactattatacggtgtcccgtggagtacgaataaggcttgaaagttttccttcatattgtttgctagcttccttctccttgtttcctgcctttcattctttatgaaattcttattgattttctttgctgactgatgttacaccaagaatttatttaatagcgtatatatagcctgggcatcgataccagccttccgttcgcatgatattaagaaagtgcctactactcaatttcgcattggcaaatccttccacttgctatctaatgtagtatataaagcctttcttttctatttcttctattggctggtctgggggaagcggatcacgcgaagatctatagtgtttaagtccatctttctcttcctgcaagctactgagatatgcctcagctgcaggtgctttgtatctatctctggtcaagagttggcaagggataccaatgttgtcgaccacctacctttgagcatagcttttaccatattcctccctcgattcgccattcattccttcacagctgagtcaatagctgtgtcaactgaatgtagttctttttttaaagaacgaggccgctaaggtcaagggacctgatccagaacattgaatccaaccatcagcattcgcaagaaagagaaagaactcggttcaaagaatcgcttcggtctaaaaacgagtcttccaagatcatgtctatgtgaagagcttgaaccaagcgttcacacgcatacgccctctgaagattggaaagaatccatcagcgagaaaatcaaatcgtattctatagaatatggtagtggtaattatataactgctttgaggaggaagagggaaattgtcaataactgtttgcaagatccacgtatattaaaagaatatataaataaatatgtgcaaacgcactatgaaatccgttatagatattatagtcctaattggaataatatgtgcttattccacaataatatcgaattcaatcaaccaattgtgaggtttcattataattatataagggatatgctttctttaaggagtctctctcctatgaaatttggtgaactctctatgcaaagcagattatggacatctttacaaagattaacagaatcttcaaattatacattgaccgctaaatacacacacaatgtttagtgaatcttatgacaatccaatccaaggatggaacatcgtttgtatgtgggaatttctatgctcttgtcaaatttgggttttataccgttgtatggttcaggtatataccagttagcggtatagaagcgttacccgttgatctgtttccaaaaaattatcatgtctttctcaatgagagggcaaatgtgactgattatagtaaggtagttttcgtggaaacaaaggatcttactccagtagtgctgtctgcctttcaaaatgattat

SEQ ID NO: 11143 - DNA, 1584 bp, Oryza sativa
aaaggcgtgaatgcaaataaaaaacatcccctgggtaagcttcgcagccggggggtcttcttaatagaagggacatttggcgataagcttgtgcttgtttggagagatcatcataaattattaaagtatgccggtacataaaatactcagccagggccgtataaggagcgaggtattgtaatgtagcaggggaatccgccatttcagctactacaatagtgtattccatggccccctctttttcttcttgttcccaactcactactaagcaagttcgaacgaattgcatatatattatctctcatatcagatgtgagtcaccgcctaaactacactgacttatcgaggttcaaactgtctcgcgggtaaagcaataaactctctcttcgagctcagtcacaattcattcaatctgtggcagtagtcgtagatagcgtagcccgggatgttagccatctacctatagtgtgagagtacttttcttcgaaactctataagtgtaagaaaagagtgcatgtacttttagtggacttgactttttctatagtgtgagagtactttctgttcaatctagtcgctccagatctgcccgagacatgcgcctaaggagaaattgtggtacgtaggttatgtgtctgtcttatgtcgtcctagtgatttatcatcggaatagctcagttcgagagagggggtggaatttgaaattcgaattggaaggtttgacagccaaggagcggcaaataagtaaatatcttcgacatagctgaagagaaaaggaataataatatctttcttatttctttcccatgacgactaggaacgggcaaatcaagaatttcacttcgaattccggacctcaacatcctgctgctcatggtgtttcacgatcagtattgaaaatgaaagctgaagaagttatcgaaactcggaaccacatgttcaatctttttttagcggtttccccagagatctttatcattaacgcaaccttcattttgctcattcatggagttgtatttagtacctctaagaaagatgattatccaccattagttagtaatgtgggttggcttggattacttagtgttgcgcgcctaggagggcagcgcgcttggggtgcggaggagctattatcgcctagctccctaacctaatgcggccagaccgcagggaaccttagcatggggggacgtcctaatccttttgccgccgcaaggcaggctaatcgtacgcagcaggagcaagggaactcccctggttcaggaaggcacatgagtccgaacgctattatgaatgtgcgaccgacactacactacgtaggtacctgtgcttgcaggtgaggcatcggtcggtcctaaaaacagcggcagctagctaggagttaacgaccggacgtgctgcaacctagggatcaccaggcagctctttcgctctatagggatatcgggggggcatagcacaattcttcttggacgagggttggtttgcccaggtgactgatcctgccataatatactcccgccaattctattgcaccggcaaccgaagtcaaacatacatacgacgatcttcatgcgtgaaggg

SEQ ID NO: 11144 - DNA, 15349 bp, Oryza sativa
  unsure (1)..(15349): unsure at all n locations
actacgcgttatatattttattnttcaaaactgcgccttaattaaagggnggcaccaatacccgccttttttcctccttggttaattggttaaggaaatttaaaaaaaaaaaaaaaattaacccaattttaaccccccaaaatttaaattttaaattttttttttttttttttcccccccccccccttttttttttgggctttgctatttgaatgcttacctcagtgcaagagcagggaagaggtttgattgctaataaaatgagtggaagaaggccgtcatggaagagtttggggtccaaagccacaccttctttctccataggaacagaggtcaggagctgccggcagggcgctgcttttaatctgactgatggctcaagataagttggagacgtacttgagatggataatttatgtatttcgctatttcgaatacctaaactcaagcggtgctaatttgctaatccaagccttatcaataataccaacacgccatctgatccaagattagcaacctctctttctctaatagagggaacctcactgacgcattcagggctctgcagttgaagcgttcctaccatccatatatagggaatccataccgtcggcttgtcgatccgggatcacccaggatcgggtggaaggtcggagaagccagtcttcagtggtgcttccatggcagttggatagtagatcagagaggcaggccagtagaatatggagttgtttttgttctcttgttattcttttatggctataagtctttctgtcttggattcgtaatgtttggccattaggtttgaattgccttctctttctgtcttccatttgaattctgggacttatcctgcaatttggagagtagttgatatggtctttcttggctttggctttcaaagtgcagttcgaaaagagtgagttgctgtcaatggcgggaatgaaatatataaggatagggtggaaaagagtgctccatatccatatatgtgcttggagggaaggccacatctttaattgtattctttttcgaggtcatcctcttcagcctgtgttagtagtgctagttttgagtttctttttagtaccttccctatttaggggttctatagaaaggcttagaggatcctaaagtgtcagtttatgttggaattgctttgctcttttctttctttgatgcttggaaggaaggcctataaccaatcaatagtaaacatccctcacccaactaccagtctgtttagagaaatgaagaagcgacttgggttgatttagacaatgttatgtatcgagaaactcaaggccactcttcctccgggctcgaccaatcaataatagaacaactcaccaacacaagcaagttgaacgagtagatcaatccatctgcctacccgcttaatcagcgtagcaggcatgcccacgggaggcaccctccaaatcactaaaagcagcactataccaccacaagtagagaatcccaatgcgcttttcactaggaagacgaggatgctattctttaaagaaccgagcttgacaagcatttcccatccatctttccccttcttgatgagcgcaccacgactcattcaaaagagagagtaaaaggaaggatttcccatgccaaaggatcggaacagatcgggtctcaatccatccgtacttgcaatttcatcatgatccttatcaacagagctaatcgatacatttataaacaatgataccttgctttgtgtttcccatctgttcaagtggataatcccgattcggttttcgagggttcgctcgtcatttattcgtagtaacgtcgtattgcctatgtagctaaatcgataggaataggatttctcaaaggaaagggcgggtggacatacgttgcgggtgtccagttggcatgggtttgggttccgctcatcaactcgaacggtcaatgctggccagatacctgcatcgttatacgtcacaagttggggtggttgaacaggaaaaacaacaacgctttccttttatggcactgctcaatccgaataccagctactatacccttttcaaaatactagctttttcccttttgcctccccctcacaggtaagatattttttattccctggactagtacgcgtacgctatttatattccttgcgcaagagctattcctatcctttcagccaaagcttcctgtcggaaaacaggtacgattcactagaataccctactcaattaaccaacaaagagagaaaagaaggtatttgtgaaaagagaaaagaagtagttgtgttggcagtagatgggttaatggaacaattcaaacttgaaagagaattctctctagagagggattctgaggtaaagtagctaaaataaggaaagcaaggtgtaaagcggtaaggcattacgctgtggtcaatcttcagatatagagtaggtaccgaaccggagtcagagtgaactgcggtatttcattcagtcagcttggcttttctatagttggcctttttgtctaccttcttgagtcaatgtcacattggtccattccggtcttcagtaagtcagtgttcaccaagcaagctggagcacctttcactctcgggcataaaggcttttatccaattcattcacaggaagggtagaaggagcttcaaagcttttagccgccgttggagctctttcttttggccctacgaatgaaataagcgtgaaatagcagtaagcggtggtggtgaggaagtcagtcaggttagaatagaactagccgacgctttgctttttcaaagataggatccctatgcttttgggaaggtatgccacaccccgtctccacaggcaaaagtaaagccggcaatgggtatttttaggtctctgccgtaaggaattggatgtcaagacgacgatagagatttgagctgtaaacacaagaagtaaatgacaaattgggagttggggttccttaacttaagttgacggtggaacccctttgaacaccccgcctaaatgggaaggaagctctagaaaaggagctcgcagttcctcaataatagactcgcacctgggagaaggggatcaaatatataaggttgaatgaatggaaaaaaaagaagaataagtttgacccgagtgagtatggaccatacgctcatctttcttctcaatctacacctcgttctgtgagagccctgtcgaaacaagatttcggcaatactaaaagggggtggctatcaagctggaaaagtgtctgggtttggagacaaaggatttatacaggttcaggccttcttattcaagaagtaataccctactcctgtccggggatgaatccgccgagtgtattattggatgtataatctccaagaaagttgatgtcccaggaaggactcggacccctccttatataggggaaggagtccgtattacaaggtataactcatatccttatcagaatatgagagtacagataaaatacaatcgtaaccgactaagtctcagggtatttccttgacgtacaagttaagaaacaaacccgagatacaaataaagatattctatctatattcggtatcctatatccagtctaaatataatcgccgtgtagatatggggtatccataatctccacagtagcccccgagacctttgcagtcaacaatcatagctttctcaaaaataataatctgagtgctttaatttcttcctgctaaggcctgccgagtagcgaagacaaagactgtaaagggcgaaaagataaaaaacattgtgcatcgaatagatgcacctaattaggtgtagcccccgactatatgattagttaacaaactaaacatgtagtcgagaacaaaataatagcataatcatgtatcatatgacaaaagcatatgcggcgcccaacaaggcatttagccgactactttccagccatagtaaaaagaatccgagtgaataacactctaaaaagttcacaaatgaacacatttgacaggcatccgagtagaaaactctaaagataatccatcaaatattataaaaattatggtaattaataagtctaatagcctaggctatgactcttcaccataattaaaataggcatataacacgccaagagaatgaccattgtaaaaacaagtcatcccaaattaacccagacagcttttgcagcctaaaaaagctttcaaaaatagtataacacttttctgtcgggtaccttttaatttgcattgcgataattccgaagaattatataaccgcattaaaaaggattttatcagcattgggccacaccattgtgagcataaattgccaaagcaaaaatgcctaagtccctaaggagcacaacgggccacgctgttaataatattgggctgaagtactgttcaggcctaggcccattagcacccccgaaacccttaacagaaaatcccgaagtctaagcggcgcttcgtcttccccgccggaactctcgccattttccccattccttgctatagtacagaactgcgccggcgaaactagggttcaccattccgctccaatccaccttcaaaaagttcaccaaaatcctccccgcgactcaccgcttcaattccacatctctccccagccatccctcgaatcagatcagctcattcggatcaaatcgatggcggaagaaaaagaaagctttgaaggccaatgggcgtcgtccgacgtgacggaggaaaacttgaaggagatggtggcgcacggcgttctcccagccaaggagatcatcggatggtggccagcatgtggtgaagctttcccaacccccgatacacatgaggtcgtgcttttttctcactttttctatggcggatttgctcttccaaccacaaagttcttccgtgggatattgaacttctatggaatcagtttacatcatttgaatccaaactccatagtccatattgcaaatttcgtccatgtctgcgaagcttttttgggcattaggcctcattttgctctgttccgccgaatcttcttccttaagccccaaccaaacaaaaacaaaccatgcgtagttggaggggctggatttcaactgagagggaccttgagccaaaagtatttttctatgcccttcaagacttcaaacaaaggatggcacgccaactggttttatgttcaaaatcccgagcctgctcttcccgagtactcctgtcttcccccagtataccaagatacctggaactctcttcccatgggagatgaagctgcccaagccttagaactgatggaacgcatgttgaagctcaaagagcaaggcttacagggagagcaaatcactcggcatttcattaagtgccgattagctccaatcaaagagagatctcgcacagcattcgagtttgacggcaagcatgatccaaaccgtgaacacccagattctctggattttaagatcatgaaggagaggatgtacaagatattctcaaacgccattgtcgtcagttattcgcatctgctgccagtcgtgccatacaatgcattcaatccacctccgctggtatgtatcagaactcttcaaactgtgatcaaaacataattttgtcttcttgttgaattaactgaccgtggaggcatttcattcaggaatttgctttggtaaagtctgaccccccaatcgctcaacgccgatctcctcgtcatcagaccgttcaggggagtggaggaccaaaaatcaggtcagactcccaatcccaaactcccaatctgactgggcagacaaattctcgcaagagaaagcttatgctgaacgacgacgaaggcgacgacaataataaatttggggataagggatcacccaaaaaattaccaaagcacactgctccgaagaagaaactgtctagccgccccatgccaaagtttacaaaatcctccaggtataaaccatccggtaccgtttcacttcgacatgcttctctcatgaagataatattgaaaactagaaggaaactttgcaggaaaccgtccgacatagatccatccgggaaggattctgatccggctaacacagagacaggttcatctaaagaagctgggccgactactgaggaccagccgactggcgcccagacttcagctgataaggtcaatccatgtgaccagcccccaactggaaaccagtcggcagaagcagaaaccgcaaaaaaccaagagcccccgactggcaatcagtcggaagtaggtccagatcaagaaattcctgaagttgaagttcaggctacaacttcccaaggaccggacgctggtaacgacccaacgcttgggtctccagataaagggcaaggatcacctcacgctcaaccggaaatcacctcaggtaacccatcttctcaagtaatgccaatctgaataactccgattcgcttgtctaatgtctgggaatacatcaggaccactaggcggtgacggagaggaaatccctcgcataaaggcagctgctgactctcgtccccctatcttaatcaaatggtgggacgagaacttgcaacctgcaggcattgtcataaatcgacagaaagaagacgaggaggtgcgccagctgaagaaagcactcggagaagctaccgtattgtaaatgtaagtcttccaggtggctgcccttggtgaccttgttttttctcagcaagactaaaccgtgaatcatcgcgcagagaatccatctccgttatgaggccaaaaccacaactttagaaaagctggttcctcatttagggacccttgaagcagttagggatcagctacacgaagccaaagagcttgccaaaaagacagagcatgatctaagagaccggattacccaactccaggattcgaactttgaactgagtggctcatcaaaaggtaacctcaagatctgccccattaatttgtgctgttataattgtatcctcaaccgtctggaatccaaacagtgcaagctgccaagatagctcaactggagaaacgaattgaggccttagaaaataacaaggcagaattggctgcacaaagggactcggctttgaaggaggttgaaggtattgtcagccaacaacctaagtttctctctttgatgcagcagatcattgacataaatttgtttttgtagaccgcaagatcaagtcccaagcccagttcgacgtcctggttggcaagatcaaaagacttgaaggagccagggatgaggtcgccaatgccgctaccccgcttgtccaggcgatgttctataataacaatggcccgagtagatttcatgcttccgaagtgtttgacaagctgagaatcgctccggacacctatttcaagaacattagagaagccggaagcatgggagcaggtttagcgttagcaatgaccaaatccctgtaccctaagatcgatattgatactgttgatggttttgcggactggacaagcgaagaggctgcccttgatcttatcaacgacgctcaaaaagcagccgacaagattgctggtgacgtcgtagatcggtttcaggataccgaccttcggccgactggtaacaataactctgatgatgagaagactgatactgattaaatgtaaatgtatcgaatgccgaatgatggaggcacaatttgtacaataccggtatatttatgctgtgcttggtgtttctagcttagctgttgatttcttaaaagcctttatcaagctttgttgagcctaaaacccgcaaaagctattaaaaactttcagtcctcgtaaactaagtagaaaaatcaaacaaggcaatgatagaccaagtaagcaaactgaattgataaaaaatcacactccattattattatggtagcccccgactgacaacctcaagaagaaagcttgatgttgacagtcaagatagggagatacatggataaacttaagcgtagaagcgacgaagatgtttgatattccaggaattgtcaacaagtgtaccatcttcacgcttgagtcgataggaacctggccgggtgacttcagagatgataaatggcccttcccatagaggagataacttgtgccgatctcgtgtagtttgaattttcctcaaaaccaggtcgccgactaggaaagcacgggatcgaacattgcgattatgataacgtcgcaacccttgtaaatatcgggccgactgaattaaagctgcgtcgcggacttcttccaatcggtgcagatcatccactcggtcctcttcgtagcgttcttcgcgaaaattgcgaaagcgcaaagattcgaattcaacttcactaggcaacattgcttctgccccgtagacaaggaaaaaaggtgactggcctgtggcccgactgggtgtagtacgcaaagaccaaagtactgatggcagctgttccacccattttcctgcatagggttttagccggtcaaaaactcgcgcttttatcccttgaagtatcatgccgttggctcgttcgacctgtccattgctcatgggatgcgctactgaggcatagcaaattttaattccgaagtcttcgcaaaagtctttaaaaactccgctagtgaattgtgtgccattatcggtgataatccgattaggcactccaaacctatgcacaatgttgatgaagaaatctcgagctttatctgctgtgattgtgacaaccggtttagcttcaatccacttggagaatttgtcaatggccacaaagagatgcgtgtaaccgccgactgcctttttgaacgggccaaccatgtcgagcccccaaaccgcaaacggccaagacagtgggattgtttgcaactcttgagctggtagatggatttgtctggcgaaaaattggcaaccttcgcacgtgcgcacaattttgtcggcgtcggacactgcagtaggccagaaaaaaccctgccggtaagctttgccgacaatggtgcgtgcggcggcatggtttccgcatattccagaatgtatgtctttcaacaattgtctcccttcctctagagatacgcagcgttgcagaattcctgaagggcttttcttgtatagctcggcttcatgaataacataaagtctgcttcgccttgaaatccgctcggcttcatctttatctttggggagttcttgagaagtcaaaaatcatatgaggggctctctccagtcggcttcaatcatagctatgttatgagtgtccgcaacttgagttgtttctttctgaggtacggtcggctcataaaggtgttcgacgaatacatcggagggcgccgcctcgcgcttggatccaaagttggcaagtctgtcggcggcttcattgttgtgtcggagaacgtgactaagctcaagtccatcgaatttgtcttccaatttgcgttcctcttgtcgatatgccgtcatgttgtcgtcaaggcaggaccgctctttcataacttggttgacgaccagctgtgaatcgcctcgaactattagacgctttatccctagggagattgcgatccgtagtccatggaggagcgcctcatactcggcgacgttgtgggatgcggaaaaatgtatccaaagcacataacttaatctttctccagctggggaaattaaaaccacttccgctccagtgcccgaaagcctttttgacccgtcaaaatgcatggtccagtgctccatcttttctgcggggatatcctcctggcactcggtccattcggcgacgaagtcggctaatgcttgggacttgattgaagttcggggcttgaaggatatgtccaaagacatcaactccaaagcccatttagcaatccgtccgtttgcttcgcggttgtgcagtatatcgccgagcggaaacgatgtgaccaccgttaccaagtgaccttggaagtagtgagataatttcctggtagtaatcagaataccatataacagcttctgaacctgaggatatcttgttttggagtcggctagaacctcgctgacaaagtagatcggtcgctggactttctggacgtggctttcttcctcacgctcaacgaccaagactgtgctcacaacctgggaggtggctgatacatatagtaacaacggctcctgcgggtgtggtgaggctaagactggtggctcggtgaggagtttcttgaaatcttagaaggccttctgtgcctcgggtccctactggaaatcgtctgttttctttaatagcttgaagaagggcatcccccgctcgccaagtcgtgaaacgaatcggctgagcgccgccatgcatccagtcagcttctggacgtctttctgggagcttggcggtttcatgttgaggatagcagtaactttctccgggttggcttgtatgcctctatgacacaccataaaaccaagcagcttccctgacggtactccgaaggtgcatttttcagggtttagtttcatcctgaaagcgcggatgcttgcaaaggtttcttctagatctgagattaaatcatccttctgcttagtcttaacgactacatcatccacgtaagcttcgacattgcggccaatttgcatcgagaagcatctctgaatcatacgttgataagttgctcctgcattttttagtccgaatggcatggtgatgtagcaataggccccaaagggcgtgatgaatgaagtcttcaagcagtcggattccttcagtcggatctgatgataccgtgagtagcaatccaaaaaactgagtagctcacagccggcggtcgagtcgactacctggttaatgcgaggcaacccaaaaggatctttagggcaagacttgttgaggtcggtataatcgacacacatgcgccattgcccagttttcttccgaactagaaccgggttagccagccagtcgggatgaaggacttctttgatgaagcctgctgctaacagcttggttaattcctccttgatcgcgtccttcctgtcttgtgcgaagcggcggagtcgttgtttaataggtttagcgtcttctttgacatgtaaggagtgctcaatcacctctctaggaataccaggcatatcagatggtttccacgcaaagatatctttattattttgaagaaaggtgacgagcgcgctttcctatttacaatctaactcggcgcctattacagcagttttagtgggatcagaaggatctaggggaatttttttagtcttggcttcgccttctccgctctttgagaccttggtcgcgggcacttctccttcgcttgccgtggttgcagccagtcggatatcttctcgggcagacgccatctcgcgagtctgggccatctcgcaattttccttgtcgcatgtgacggcttgcttgatgtcgctccgtagagataggactccccggggaccaggcatcttcatcatcatgtaagtgtagtgcgggacggccatgaacttggctaacgccgggcgtccgagtatggcgtggtacgctgtctcgaaatcggcgacttcgaagcagatattctccgtgcggaagttttcccgagtgccaaaggtgaccggaagggtgatctggccgagtggagttgaagataaccctggaatgactccgtgaaaaggcgcattgcttggttttaacttggagcgaggaatctgcatgtcatccaaggttttggcgaagaggatatttagtgcactgccaccgtcgatgagggttctgcgaagcttgacattacggaccactgggtctagtaccagggggtaccgccccgggtggaccactcggtcgggatgatctgagcggtcaaacttgattgctgtctctgaccatcgaagatattggggtgtgtcgggctgaacagcgttaatctcccgttcggtcaacttttgctttcttttagattcataagccaaggggccgccaaagatgtggttaagctccttgcggtggttttgaaaacctgccggggggtcgccatcgtccttcttctttgacgtgctttgttcttcgtcggagttcttccgtgtagtcttggtgtattgttccgcgaactgtttgtagacgaaacaatctttggccgcgtggttggagttaggatgatgcgggcattgggagttcatgatcttgtcgaatgtattgacgcgcgaatgctgtcgagaagagtgagtagcggttgcaacaagttcctcaggcttacgcttgcggtccttatgattgttacttccaccccctcccgtagccggcgtatccttttttggcttccaactggagcccgactgctttgatgcgatgacggcatcttcagccttggcgtactcgttggcttttttaaacataagtttgactgttttgggaggcttacgcccgaacttgccgaccaattcttcgtggcgaattcctttggtgaatgcggcgatggtaacatcgtcggtgatgtcggagatcttattgcgttgtttagaaaatcgccggatgtaatctcaaagagattctccggacttctgtataacgttgtagagatcgaattgtgtgccggggcgctcgaaggtgccttggaagttggcgatgaagtggtcgcgtaattcggcccaagatccgattgtaccacggggcaatccatggagccaggaccgggcggaatctgctaaagccactggtaaatagttcgccatggccttgctatctcctcctgctgcgcggattgcgagatcgtagacggtaagccatgattccgggttggtggtaccgtcatacttctctattccagtcggcttaaagccggctggccaatccactcgacgcaggtcgttggtgaaagtggctactccgtcaaggtcgtcgtcgtggcgatccggcgaatgatgatggcttcgagctgcccggcgatgtatgatcgtctcgcgaagatcgacggggcgacgacgaggtggcgaacgaggtcgttccactcggcgctccctatgatggtcgggaggcgagtggacagatcgctcgtcgtgacccctgctcctgcgattagatcctgcgccagcgatgctgaggcttggctggtggtagtcgtgagatcaaagatgagggactcagctgccgctcggggtgcggacgcttccggagttaactgggaccgaagccgcaatcatggtctttatctggttcaagatgttgacggcgtggtcagattgattgagctcgttttccttgaggagggtgtcgaggagggtgatcgcggcaacagcattctgttgaggggtgcggaaaaccggtgtcccctcaacgtcttgttggccgataagatctcgcgctcggcgccctgcttccaaggctcgtagccgccggtcttcagcctcctttgcagcccgctcacgctcctgttgctcacgccgtagccgttcttattcttgtacttgacgctcctcctccagtcggcgtcgctcggcctcgcgtcgtgcttcagtttcccgggcttggcgttgctcctccgtctcgttatcggccataaagacgccgaaatagagaggggtgtagttgtcttctaggctttcatcgaagtcgtcgagatccgggtcgttgttgcgaaagccgaactcattgtactccacgatctcggtcggacgcgagtcgacgccgggagagctccagtagccatccagctggtccgtcgaaactgagccgagtggctggaggatgacgccgacttccctggagctaggcgagatcggtgttgaagccgatttccgcctaggcctacgggatggggacgctgtggtggtgaagaaggccgccaaatcgtcggggagcttcattaggatcggtgggtaagccccatcatctcgatctgatgacgttggagaagatgcaatctcgcccgagtggtttgaagccgactcgattgagatggacttggagtagatttcagccgcgtttggaactccaaacgggactgagatccggctctctcccgactggtccgattccgagtcgaggagagagatcttgccgaagttattggtgacgaagtcgaggctgccgaaccgaaacgcctgcccgggtgggaagatgaggtcgtcgatgccggagacggaacccattgcactgatcggtgaaaagcttgacgcaacccctacctggcgcgccaactgtcgaaacaagatttcggcaatactaaaagggggtggctatcaagctggaaaagtgtatgggtttggagacaaaggatttatacaggttcaggccttcttattcaagaagtaataccctactcctgtctggggatgaatccgccgagtgtattattggatgtataatctccaagaaagttgatgtcccaggaaggactcggacccctccttatataggggaaggagtccgtattacaaggtataactcatatccttatcagaatatgagagtacagataaaatacaatcgtaaccgactaagtctcagggtatttccttgacgtacaagttaagaaacaaacccgagatacaaataaagatattctatctatattcggtatcctatatccagtctaaatataatcgccgtgtagatatggggtatccataatcttcacaagccctatcctcgtttcgaaataaaggaccgtagtgaggatcgatcccggataagtgagtcagtgtagggacagaggctgatgattctaaaggtgatttaaaactagaagatgactttatttgaaaacggaatccaaatatcaacaaaaagatgaatggaaagtcttgtcgatatgaattgatcttcaacccaatgacaatgcttcgatttcgatcttgacttctttcttcgatgcctgaagtttgtgttcgcatttcatcaaaggaaaagtgggctgtacctacatgaaggtaagagttgctcgtgtaaaagcaatatcttctatttgacttatctagtcgtgtcttgtcttgcacatactcggctcggtgaatggttcatcttcgattggcatggagcaagaaaacagattgaagcagagccagcacacctcagtgaatatcattatttaggacaagcacgaagaggaagagctttgtccttcggccttgaatcagcataaagcccctcgctgagccacttctttgacattacgtcatgatgaatagggttcgactcattcatgtctccacacccaggttatgccgcagccccctagattgaaatatgacaacaaacatttgctatgggcggggggtccgcttcgataaaagctgtccagcctgccacgctttggaagagcttcggaacagtttttccctagttaggtaacccggttttgacaccatggcccctatgaatcatcaagctgcagcttcgctaccaggttatttacaaaatgaaagaagaaaatacgaaagaaaagcgtccattgtctaatggataggacagaggtcttctaaccctttggtataggttcaaatccta

SEQ ID NO: 11145 - DNA, 1568 bp, Oryza sativa
gactcattcatgtctccacacccaggttatgccccagtcccctagattgaaatatgacaacaaacatttgctatgggcggggggtccgcttcgaaaaagctgtcagcctgccccgctttggaagagcttcggaacagtttttccctagttaggtaacccggttttgacaccatggcccctatgaatcatcaagctgcagcttcgctaccaggttatttacaaaatgaaagaagaaaatacgaaagaaaagcgtccattgtctaatggataggacagaggtcttctaaacctttggtataggttcaaatcctattggacgcaatcttatttctatctattctttaaataactatactaaaaactaagaaaactttttgcatgattcaaatgaaaaatctttctcaacgatttctcctctactaacaagagtagacatgcaaaattgttgtttgttcctgaagggaaaaccgttcgagctgttcctgaatagcttccttcaaaaggatttccgcttcctcggtgaatgtcttgctagaagatagaatttcttggaattgaggtttggtatcttttaggtgtttacgtagctcatccagacatttctttacctgtccaatttctaaggaatcaagatatcctctcgttccggtataaatagtagctatctgctcttccactgggagagggtttgattgggattgtttaagcaattctcgtaatcgtcgaccccttgccaattgattctgacttgttttatcgagagcagaggcgaattgtgcaaaggcttgtaactctgcgaattgagctaattccaatttagatttgccagctacttgtttcatggctttaatttgagccgcggatcctactctggaaacagaaatacccacattaatagcaggtcgaattccagcattgaatagatctgcggataagaatatttgcccatctgtaatggagattacattagtaggaatatagtcgaaaacgtctccagattgagtctcaactattggtacatcggtcatactttcttcccctaaaagagaattgaatttagcggctctttctaaaaggcgtgaatgcaaataaaaaacatcccctgggtaagcttcgcagccggggggtcttcttcatagaagggacatttgacgataagcttgtgcttgtttggagagatcatcataaattattaaagtatgccggtacataaaatactcagacagggccgtataaggagcgaggtattgtaatgtagcaggggaatccgccatctcagctactacaatagtgtcttccatggccccctatttttcttcttgatcccaactcactactaagcaagttcgaacgaaatgcatatatattatctctcatatcagatgtgagtccccgcctaacatacactgacttatcgaggttcacactgtctcgcgggtaaagcaataaactctcttttccaggtcagtcaccaatcattccaaacgtggcaggaattggacaaaccgaggcccggaatgtaacccttctaccaatagtgtgagagcactattcctccaaactctata

SEQ ID NO: 11146 - DNA, 760 bp, Oryza sativa
acagtagtctatgcatgtacgacagttacacttagcatacatgacttagattgttaaaacataaatgtctcatgacttacagatgtttcttggattaacagaatggctgaccgggaagaataaccaaatttattaccggaccattccccaaagggaagcagccagtactagaatgaaaaaaaatggaccaaggatccaacccattctttaataaggaaggaaccttgaaaaggaatccgaagggaacccaccagggccccttgaaagggaatgtgaagggaaccaagaagaagaagctagtggaagtcaacccttccttggacaaaagaggcacgcgggcaacgaagtgcagcgaaaaagcttgaaggtcggcacatcataacggaagtggaagaagatggacgtcctagtgccccggccgaagctgccaagaactatgtacgtcacaacggttgggttgtgcgggataacgtgcctatcagtacggtgtactggcgaaaaacaagggcacgcggagatcatgagagctttgtcctagattcggaaaaagagatgctgtggaccacaatgctcgagacattcacccttcctgcgggtacagaggacaaagtgaaaaggtggactctgaagaaaatggcaaaacagtttcagagcttcaagggagatctgtaccagaagtatatcctgaaggggcagacacccgaacttcgacacattccccaagctaagggatcactgggacgagttcttgtatataaga

SEQ ID NO: 11147 - DNA, 2693 bp, Oryza sativa
gtcctattattgattaagatagctaattgaatccataggaatcctctctagctaatcctatcattgactaagctagtgttgatgcgaaaaacacacactggcctgggagatctgcttagctccagtgcaggtccaaagcttgatgagatgcgggcgtgccagtcagtttgatcctgcaactgacaagatatgtaaacagtagatcaatgagccgatcggctgacaagccgatggagtagttccagtcgatgccgataatagctgatgccgaaaccagccgataacgatagggtttaaacaatcggctatatgtccaatgtagataatgatataaaggcaatcggctaatgatgatgtaataaaataacaatatgatccagtataaaccaataggctagcagtgtgatatgatagaataagcattgatccgaaggataaagcatgtatcggctggaggtccgatgttataaaatccacaagattagattaaacagtgaaacctttgttgtcattggctaaatccaacttatatatacaatccttatgagccgatgcaacgtccagataattcattggctgaaaccccaatgaaacccttcttggcaatcaacaagcaggctagagattatggttctaagcacgacttagtagatcaaacttaactgatgcagcactaagtatgacaagaaacataatatctagataatcaagccgttgactgagttttctgggtggtagatgtctaagctaatctaatatagcaacgcgatttagccgataccggcagaaaccctaaagcgagaagtagccgatagagctaaattgatatgctaagactagattaacagagacatatgataaataggtaggcaaatataccatccaaaccagagcaatccaagaggtcgaatgtactgatgcagccttgaacgacgccgacgtagatgatacaattgcctgggccagcggaacataggacttaacccttcgccggagatcgaactaaaccgatgcagcctcgcgttaggtgccaggttccgtcggttgataagtaaaacctcaggaaagagggtggcgatgcaccgagagtagttgtgttgatcgagattgataaattacatagaccctaggtgtacatatttatacccatgggttgatacaagtccttgtcagacaggaaagaaactttcctaaagataaaaggaaaacataaagtccttatcggacactaaacacaccttcctaaagataaaaggaaactaacaaactattcctaattaatagataaactgccatgccgcatccttcttgaacccggactcttctggataaattccctttagttgatccgactccatcgagaacacggttgctagcgatttgacgacccccatcggctgattccataactctgaagccaatgctgactctaagccgatgatgactttgggcttaccaaatttcgtcgttaacacatgccccccagttttggagtatgaggactcatgctccaaaattctcttgtctgatcttgataactccaaaatcgatcttcccttgattctcgcaatcggctttcattatccggtactgtctgcattaaatgagctagactatcaaactcgtggcaaaagaatctctctctgataggtgctgacaatccttggaatgcaagatctgcgagttgttcatcacttagactcaatccatagtcgattctccttcttgctgctcaaacgttattaaatctgaaagcttcaactctttgattctagcaaagaagtgtcatgaaattgcttctcaagatcagcccatccttggatagaatctgatggtagcgatgaaaaccatgtgaaagccgatccagtcaaagacaaaggaaaaaatctaactttcagagcttcttcagccgatgcctgcccacattgtgctaagaatcggctgatgtgttccattgtagatgtatcatcctgcctgaaaacttggcgaaatattgaactttgtatcggtgtagcaatggcaccctatcaaaccactcaggatatggcagccgatacgcagaagtatgttccttatgtttgattccaaactgctcttctattatctttgcaattctatcagccaaatcattgttatattgatattcttcatcatacccatattgacgaagttcttctggctgatattgatatgcttgcccccgagctaattcttttgagcaactatttcaggtactatcttcttgatcacatcttgtagtgtactcaccaaaactccagactgatcaaataatgtgtgatgaaccgtgtcgcttcccaaatcgaccctaaaatacatcctctaaattatgcctagaataattaaaatgcttgtgaaagccttcaaaaattaaaatgtgcaaagttaaaagtcaaatagggcttggaggatttttgtatatttcctaaaagcctaaaatgtgtaaataaattttagtggaattttcagagcacaaataataattattcagaaataaacaaagttaaaatgattttataaaaagaaaaaccctaaaaatcacctctcccctctaatgggccggctcggcccatctccctccccctctctcctcctccccgcggcccactcggcccttcccgcgcgcgccccgctgacgggcgggcccgcccgccacccttgttgacgggtggggc

SEQ ID NO: 11148 - DNA, 637 bp, Oryza sativa
aggatcagttaaatgttttctttggacaacggatttggactcattcaggcctcgtttggatgtgtcgaaatccgaaagcccagtccatatatgcatgtatgggatttcagttcacttttcatggcttacatgtggatggactgggattgaggcccatccaaaagatatgccttgggagaactatgcaaggtttacatgaaattaagatgcatccacatctctgaatcttgatgcatggctttagtattacatgtttgtcagggtgacctatctttaattgactttttttttggtgggggaatgggggttgggggttttatacaattcttcataccgataaacagtcttgacttgatgcattatggcgtcatgggggtcgcaggtctcatcactttttcaactgttctcactctgcaggcaaatacacacgtaaatgtccatcaagacctcaaagatgtgaagctgtgggaggtctgtgccatcacattttctttatgctagttttgtgtaacatcttagaatttcagattgacactgtatggcttttgcaggttcaaactctcctaaaagggttggaaaaaatagctgttagtgcggacattccaatgttggtctgtggggatttcaattcagtccc

SEQ ID NO: 11149 - DNA, 591 bp, Oryza sativa
gttccttgtcagctgataaattctgtgggcttagcactcagcatgttgttttacccgtgcatatatgagttataccttccattatgatcattatttaatcagctgtttaactgttggttttcttcttcagtaaaaccggtaagggtgatgcccttttgttcttcagtctccaccccgatcgcacaccagattttgcaagcttgcacggaggtggccggttcattaaagttcaaagttgttcgccacttaatggatccatgtgaggtccttcgacatttctgtcaagcagggagcttccactgacgggtgcgaggatgagaacgtcctctgcccccagtgggctgcagtaggggagtgtgccaagaatccgaactacatggtgggtaccaatgaagcacctggcttctgccggaagagctgcaatgtgtgtgcacagtaagttactgatccacccttgtgatacatagcagcacgccctcgataattgttgccgcggtaccgggtgtatataggactgagcatagcatgtgtaacctggaaggagttaagatgtactaagatccatttcgcctatatgcacctagaaaaggg

SEQ ID NO: 11150 - DNA, 589 bp, Oryza sativa
  unsure (1)..(589): unsure at all n locations
ctcctcaccgagccaccagttttagcctcaccacacccgcaggagccgttgttactatatgtatcagccacctcncaggttgtgagcacagtattggtcgttgagcgtgaggaagaaagccacgtccagaaagtccagcgaccgatctactttgtcagcgaggttctagccgactccaaaacaagatatcctcaggttcagaagctgttatatggtattctgattactacagcaggaaattatctcactacttccaaggtcacttggtaacggtggtcacatcgtttccgctcggcgatatactgcacaaccgcgaagcaaacggacggattgctaaatgggctttggagttgatgtctttggacatatccttcaagccccgaacttcaatcaagtcccaagcattagccgacttcgtcgccgaatggaccgagtgccaggaggatatccccgcagaaaagatggagcactggaccatgcattttgacgggtcaaaaaggctttcgggcactggagcggaagtggttttaatttccccagctggagaaagattaagttatgtgctttggatacatttttccgcatccca

SEQ ID NO: 11151 - DNA, 1339 bp, Oryza sativa
ccaagccttgctaggcccgactgtagagtacggaggaagggtgttggccggttctagtgtggaaggcgcatcacctgctcgaagcgggtagtgatatcctccttccacccaaaaacaccgtccacgggaccaactggtgctcccgccagcggtagcccgagcaggtacgacacgtcctgcagtgtcggagccatctccccacagggaaggtggaacgtgtgcgtctcaggtctccagcggtctacaagagcggcaaggagtgaccggtctacatcccaccgcttcgctgggtcacggtcgtctgccgctgcctcaacaagcctacaaagtggtagaaggcctgccgcacgcaacctgtatagagcaaacttcaaacataagtacaacacaaagcaaagttgagttgaaatgtgaacatacgcgtaccaaggaacgtgacgggggtcgacacgcaaccactcgcgcgacgtgcgtggacggaaggtgccgagctgtgcaccctcgactgctgacaggaacgagcggtggttcctgtcaatcccacggttcaacagcgccggtgtgtcgtacgccatacctgcatcaaataggttgatcagaaacatataaataattagttcaacataagtaataaatgttcataagcgaattactaacacatattaaacaagagtacaaacaaacaaaagtgtttagtccgaacactcatcacgataacattatgatacaacaccgaatagttcgcaatactactagtacaacaatagtcggaggtactcattacaacaacattgaattgaaattacacgatagaagtatttagtccgaacactcattacatcacaacagcattttatttcctaaatcgaaagcattgttacaccatggaatcgcctgctgcgcgacgacgccttggcattgcgcgcctgcttgttgttccttcaccaggtggtcgcctaccatcacttgcctggccagatggactagcatctgcgccgcttggaacttctgcattcttcgggcatttcttgtaagtatggccgcgcagatcacacttgctgcagtgtaaagtcctcccacctgcttctgactcatccatatcatttctgatgcgtctagtttggcgtcgaccctttttcacccttaacttagatggatctggaatataaaaaacttgggcactcagcgttgtgtaagatcctgagatcccgaacccatatatctcctcactccatgtatgaaagattgcttctttcctgaaataatttgagacgtacacattgggagatatgccacaatcaccggcagcagcaagaacgtgtgagcaaggaaggtgatg

SEQ ID NO: 11152 - DNA, 6420 bp, Oryza sativa
atgtctggaatcaaagatatattatgttggtttgttctatttatctctaacggtggtttgtgcctacagctaagccatacaagtcacacaaaaggaaacaagaaagtatggcactacatgtacaaaagtcaatgacaagagatacttatttagtaacagagcatcgatacaaaataagagcccacatacaagatgacgccaagggaccacaaatctgctgtgtggttgtaaggttgttccctcacaagttctggagccatgtatagaggtgttcctgggtggaagaagaatgtttagtagaacaggtagccagaaaaaaggaaatcagttcacatgagtatacctgagtcactataatctatgaaaggaccagaaaggggaatgtcaatcaaaagcaggcatcatagcatttaaagtattggtttgttatgaaagaactgtttatgattattgtaaagtaactaccatatctactttcaaaaacaaacctgttggaagacagctatgacatgtattttacagtttatttatccttaatgattattattatttcaatatttgggaaaaacagcatgttaagtttcataccgaattgccagtagctaatatatggatagaggaatggatttacaagactagaaggcatatagtgctaaataaaaactgaaacatgctaaaagacacatacagagaagtaccttccatagaacgtaaaacaacagtactaccatggaaagaagctcaactatcatgcaaagatgaaaaggtaccttttatagaacgtaacacaacagtattagctgacatggcacgagcaaacccaaaatcacagagctgggaattagaaaaaggaaatgcaatttaaaacaaatatatatagtaaataagaataaataaagcaaaacagtacgcagttgtgtcatatactcatatatagtagcgatcaactcccggtgcataaataggactatgaggtaaggattgtggttattgagacaagacttcttttacaaacatgaatagacaattagaaacaactatgagcatcatactgtgaagctagacaaaatcagagaacttaaaaacataggatagtgttgctgcaagatatagaattaggtgcaatgtataacattttcgatgaagcaaatagtctgcagaacagatgatatactaaaaggcattacttttatctaacaaaaagtgtttagctaatagaacaagcagccattggcaacattgatgtggcaaaatatataccttgacaacagatcctttcccaataaggatgttctgaggtttcatatcccgatggataatacgattggagtgcaagtaatgcagtgccttaacctgaaataaggagatttgctgaaatgaagacaaccagagaagtccagtagtgtgtaagaaacaagaaactttttagtgcataccagctgcttagcaattgcttgaacctgttcttctggaaggcacttatcatcctcaagcacctcaaacagctctccctgagacaaccattatatatgaagtttaaccaactaaattccactgcaaaaccaattgttggtgaaaactacactgaaaaatcaacctgtacctgagcaaactctgttaccacacaaaattcctgaggggtttcaaatgaatcgatcatttcgattatattctcatgtttgagtttcctcagaatctaaaaaaatgatggcagcaaacagtaagatggaggaagcgccatatttaagatatgtaaacaaaataatttctactagtttgaagttctagctacatgagaaatgtcttatggcgaactaaatcaaagcaacatttgtgatttccaaggtgctgtatatattaattttgcattgttcagtaaaccatgagaaatgtcctgtggcgaactaaacaaagcaacatctgtgattttcaaggtgctctatgcattaattttgcaatgttcagtaaaccatggggggagctcagccgtatcccacaataaattcatcctcaaaatcaaattccatccccattgccaccttaaaagaatccaaaacaggcatttgaagatttccgcgcagattctagcccccaagggtcaagggttaattcaattagcactaaatatcaaattgcacaaacaaggcatgagacccttgacgtcatgagtcctcagagaagcagcgcatctcccgggagcacttgcaagtagagatgaaattgaaacattttattccctaagcagaatctcaagtagataaattaatagctacgattacctcaatctcctgccttagattatgtatatctttgtcagtcttcccatgcttaaggataaacttcatagctaccgtctgaaacaaatttaaacagaagcaatcaaacttccgagcaaaactagcagaaaaaaaaaagaaaaaagaattaaccattccatttcaccgtacgagcggaatccagagcacgaacctggcgagtgtacttgcgccttcccatgtacaccttcccgaaggagccctccccaacgagcacgatgacatggtaatcttctatccccatcaccacccacccactaggctcacacaaaccctggtagcaatccacaccgcaacgattaatcgcgcgaaaatcaaagcccaaaaatacagtgaaggtgggggaaaaaaatagtcaccggtgatcgactaccgcctccggagcagcagcccgggtgggcggaaccctaccttcccaacgacgagacaatcgaggaggttccagtcgagagggggacctgattcgtgcggtgcgcggcgccgcgcggccgatgggggaagcacggagcggaggcgggggatctcgcgagagcagaagacttgggggcggatctcgtcgggggctcgccggagatcgccggatccggccgccggaggggagggggaagggaggagctcgtggggggataaggctatgggctttctctctctacagggttgtgggtgggatattcccctcaaattctagggtttcaattattttcccgctcgctgcgcgaatttggaactgacgaactaggcgtcgcggatagagaggacaaagctggctaacggcccacttcttattgggcctagtaacggctagtttcagtctcacctgcatatttcacttggaacaaagtcaattaagtaacagaattttttttatttataattttttttattaaaagttttacaaaaataattttccattttgaaaattgacggaagtagtcgcctactgccctctgggaaaaatcgccctcccagagggcggcgaaaatgacgtggcagccggccgttcgctctcgggcgacggccgtcaacgaaatttgcaggcggcccccttgccgccctccgctagggcgattttatactgtgcggggggccgcctgcaaatgggcggcgaggggggcatggaattttgcaggcggcccccttgccgccctgggggagggcgattttataatgtgctctatatttttgtataaatatcaatagttatcaaatctttttatattgaaaactatacaagattaaaatctccaagactggtaaaatacaattttattattttttagggcatatttggattgttaccgtacaaatattttattagtgccaaaatataagcaagttttggcactaccaaatatttggtaaggcaaaattgcatttgatcatatttggtttgctgccaaaatgtaaaattgtagtgaagaatgttctacataatctcaaatctagattacgtattaccaatgaataggcttccattttcgtgtgtggtgtgctagtgggaaagaagatatgaagaggttgccttcagattgtcaattatatagcgtcgttttcactgcaatatatgtgaactcaatgagatacattattcattagatgtgacaagacgatcacgcgtgggcgtgattcactttatgtcaacaggcagcgccgaaagttgatagtgataactcgagctgccgcttttcatgtgtgctgttgtggactgtgcgcgctactggatctgacactaccgtgaagcgccgaaagtgtgttgtcgtgagcataagttgttctagcaccatatgaatgaaaagaactatgtagacgagacaaacacaagtagtactgcagtagtaatagcaaaagtagtactgctttacaagtttgtaagccaaaagaaacggtcacataaggactgaagaggtagaacactactgacgaggcctcttacccctgtccctcctaccctgcgccctaatgtgcccctgggagtacgtgagtcggtccgggggtacggcacggccaacccgtcctgcctgtacaggtgtgacctctggctgctcctgagtgtgcgcctctggagctcctccaagctgagaggagcctagtacgtcgtggtggtgtgcaccgtgcaagtcgtcgtcgtagaactggctagtaggaccagtcctaccggtgtgagacgaagaggccccagtaccgaagatcccggctgcaaatcctgctggacaaggaccatcagtttcgtacaagtatttaacagtagtaataaaaagtaaagtaccgtgtgggcgagggatcgacgctccgtgagaggaagagctggcgaacgcgcccgaagaggtggcgaacgcccctgcggagctcgcggaagcgccggtcgtgcctgcgaacgcgctcgaaggcagacgaggtcctgcgatgaggaaacatgcagttaaaacatggtgacatattcgtgcaaaagctgaaacaaaaatgaactaatatgtgggctgaactgtaccgtgcgaaaccggtgctgtaggtcgcactgctccgaagctaggggcgctcgaaggcaaacgaggtcctgcgagaatggaacatcaagttacgacggggtgatgttttcgtagaaaaacagaaacaaaacttaagaaacctctgggctgagcagtaccgtgcgaaacaggtgccgtaggtcgaggtcctgctccgacggtaggcgcgcgaggccgtggttgtaccggaccagctggaggtacgacgtccacggcgctgcgacaggagaagacgcgcatgaccgcacgcatcttctcctgcatccggtcgaaggtcaccctctgctcaacgtcagtcaagtgcaaacctctgttcaacctcacttggactgcggtgatatcggcactgatatcccgtgcggcatcagcctatgcaagatggaaataaaaaattcagtagttgtcctatattatgcaagataaatgaaataattgtaagaagtaatacaaattggacgtaccgccacgaagtagtctcggtcacggtgcgtgggatacgcgtccgtgacagcggcaacgtgcggctctggggcgtctggagtgaaggtcacacgcgcacgagtgcgaggaacgtaccagcgaaggtagtcacggtagttctcctccgtgtgtgggaagagctcgttgatcacctcctctgtagctaacacccagtcgtcaacgtactgctgtacacgtggagcccaaagtgcgactgctagctgtccccgtcgagtcaacctgtgaagagaggtaaattatatggctcgatgaagtaattatcataaaaatttagaaatgaacaattcgaactcacgagtggtcggcagggaggacggtcggctgcacgtttcccggaaacacctgcctaagtccgaactgtctcatcacacgctgcgggcagtgaggctcaacgaaaatgtcgaacaccatcggcaggatggtgagccagtaagcctggtcgcgtgtgcacaaggacgaaagtcctagcggtgctctcgcagcgacggcctcttctgtgtacggctcccagatgacgtcgctcggctggagacggtcaaactcgaacacgaagtccgggtaaccacgtctcacctggacgtgagcgtaacgacgctgcaataaacatgatcggaattagacatgttatgtgaagaaaaaaaaagaagacgactgataaacttataacgcagcgaagttgcactaaccccacgtcgacaccagtaagtccctatcgtgggaccgtcctctggccactgcgcgctgcgaccaaccccgtagggtgcgctgtccaccactggtcgacctatggcaaacctctcggctgcccaaagctgaagcaacatagggcagccagcgatgatcgctcccgcgtcagtcttcgtgcacgcctcacagagggcacggtacgtggctgctagcacggcagaaccccagctccactgcggcacgtcctgtggctgagcatccgcgatggaccgtgcgtagtggaccagccggaagtccacagcgtgcctgtgggtgctagtgaacatcacccacccgaacaaccacaataggtacgcctcaagggagcgtcggaccgagtaatcatcagcgtc

SEQ ID NO: 11153 - DNA, 10551 bp, Oryza sativa
  unsure (1)..(10551): unsure at all n locations
atcctccccccctaacacgctcctctcccccttcctcctccccttcttctttttctactacaccataaatttaaaaaaaataaataaattaagttagaaaaatttatgtatataaatactatatataaaaatatatttgaattcaaattcaaatttgagtcgggtatataagcttttgacttataaactttaggtctataaattttagatgtatagaaaatactatatataaaaaatatttcaattcaaattcaaatttgaatcggatatataaactcttgacttataaactttgtgtctctaaactttaggtgtatagaaatactatatataaaaaatatttgaattcaaattcaaattagaatcgagtatataaacttttgacttataaacattgggtctataaactttagatgtatagaaataactatatataaaaaatatttgaattcaaattcaaatttgaatcggatatataaacttttgacttataaactttgggtctctaaactttaggtgtataaactttagatgtgtaaacttgaggtgtacaaattttaggtacataaatttatttaaaaaaataaaagtaatgtggtgaaaaaaaaaccacgtggagaaggaggggtcatcgctgggggcgatcgatcgcccgttagacttttcgtccaccttgtccatcatcagctcaatgatgcactatcgttggacctcgtgattatacatcacctccactttatccaatggagaattcccgttcatgtttatcctattgaagatatgtaagagtatgatgctgggtattctgttctcctcaatgctctagtgcaaacttgatctgagcgtccatgtatatcaggaaagctcatggtgcttcctagggtcccaggcctagctaccatgggcaagcgacaactgacaagtctagctggagctactaacacttccatgtgatgttgtgaactaactcgtcatggatgactctctcttacagctcaaagctactcctcttttataacccaaatgacgtttgcatgtggagagctaggtagcatgtgcgtgtacactgatcagttaaccaacatatttcaacaggttgacagaatctcacgcaacagtcttctaattggctacactattggtgcacgatacattgcgtaatggtgctacacatatagaaatggtagccaaagatattatattctagtttagatgatgtagtacgttcataatttcgttgatctattaattagcgggagttaatgggtttgtcccatcatcttattcgtttattcttattttttacttctaaaactttttggttgtgtcattgtgtgcccattggtagaggctaaaacataaaccatttccactatctaaaaagccacaaccaaatataaaagttgactttgatttttttttccagagtatagtttattttttatcaacagcctgtaagtagttaaaaatatatttttttacaacaatattttttatcgctcatatatataattagatattgagaaaagggaaatcatattagttggtgaactatcaaggaaacatatgcagttgtcggagaacacagatggaagcaagatcggagacacaagtccacaatggagctagttggcggtactgccaatcacataatgcaacaggtgcatggagattgccggacactcgccctagaccggtatctagttcgtgagatgcagcaagagtgagctcccagatagacgatgtctgcagctccagccggatttggcacgcgcggtagctaatcgtgatgcctcgctaggttccctgcgcttatattgagtactgaccgaaatttgtaatgctttactagaaaatagatctagtgacaagagaactcttgatgtttcccaaccctacatagccacataaccatgtaaacgcattttcggtctggcggtatatatccaaattattctcaactcgtcgcggtatatgagcctgtctttcagcctctcacgtctttgatgtgccaaaagagattgtatatatgatatatatcactactaaaaaaccctcgtaggaaccttataggtgccggtttatttaaaaccgacacctattaaccttttcccacctcccatggtttaaaaaataaagaaccagcaactttaaacaactatagatgtcggttctaagaaaaaaacaaaaccaatactattagtaccggttttttaaaaagaaccgacacctataatatatatatattataggtaccggttttctttaaaaaccgacactgttgacggtacttaaatcataatatttgaccatcaatacatgtatataatgaaataaaatatagtatccaagttagtggtagggtttattactaatcattccactagtgttggtgaaatatgtgtttacgggtattttgaggagaaaacacatccatcatgcgataaaatgcacctccgcgcattcaagacgtgtttacacggattggagggcccatatgtcaaccaaaactacttagaattgggccaaaacgttgtgcaaaatgttgggggcccattaagcaacctaccggccaaaggagaggccaggaggacggtttttggattcggccgaaccaatcctggctcttcccgctatctggcttcatgtggacggcttggatttctcccctatggcgattgcagggtgttttggtcatttcccatgcccctaaacgtcatttggagcctatataaggaagagtccactctcatttcaacacacaactttgagctgaattaccagaggctctattgtatctcttgtacattagaaataggtagagagtgaggagaagctctggaggagtgcccggaagtttggcactctctccgacttcttactcgacgagtgtagcttactaggaggagctttggaggagtaccggagctgtcggtacactctgctccgggttcggagaacttcttctataaagtaagcattcatgatcttttcttatgttatttaattactttgtctaagtaagatagatttccacctttgcgggttcattgtttagtattcatattaagtgctccagtataaggactccggataaagaaggaagttcgcgctcaagtattagagtagtaattaataacttaggcgtggtgtctaggttagagattacctttgtttgttgtgtatcccacggatttgtcagaggtagggggcaggtggtgacagccttgaatcccgtcctagtaatcctccacattcggatacatcatagagctatagccggaaccacgctagcagaccagcaggggtcagtgcccgaagcaacagataggaaattgcatttacttagattagataattaaaacacatagaaagtcctctctagcctacctagcctacatatagttgttgtccttggatcgtcttagccttaggtagattacacacgttccctgagttcgatatccttttggggtcacccgaaggtgaagtgctaaagcggtattccgtgcgcttgtggatttatctgtggtcgtaagaaataccaacagacacctaataatcgagccgagctagcaacaaaacgaaccggtggatctggcggggcccacgcgaggacataagaccacgcgagaagataaggatcgatctctatccagccaggcgcctcctctctccctgtctagtcgccgccccctccccctctcccagcctccgcttccctcccccggtcctccgtgcccctctcccagtcgaccggccatttccctccccctccgccccatctcccagccggccggccgtttccctctagcgagcagcaacgcaggcgaccggcggcctccccacgggtgacggggaggcacagatccagcgcccctcttcctctccctctccgtcggcctcaccggaggcggacaaatctggggagggggtagtttgggtggtgggttgtcggcggcaacggtggccaagggaggcggcgggcgatctccccacgggcgacctctttctctccctctccgtcgggctcccaccggtgccttgcagatccggtcggggtgggttggcggcggtggccaagagaggggacggcggccgatcggcggttggctaagggaccatggcggcagtagcggtagtggaagagacgacatgtgcgttaactacgtacgtgattgcaatccatccatcccctttctattttttcaccttgttctgactctgcaagtgatcaaccgttggtttttacttaagaacaacaaaaaatgtgtgtgtgatgcagtatgatatgatggatgaatgtgtgtgaactatgaatgcagtatgaactatgaatgtgtgtgatctgatggattgcatcaatgcagaaagtggttgccaaaaaatctattagatcaatgcaatgacggacctcaataacttcccaataaggtagccgccaaaatataacggacctcaataacttcccaataaggtagccgccaaaatatagatctttttcttccacatacccttcttgtactcattgctacgatttcttttcttcacaaactcattagtaatgtccttcaccatattgtgtacctgatatccagacaaattctcaggagcagacccaagttctctcttaccattgaaaattttcttctttcttctaaaggtgtggcatagagggagccatctcctatgacacatgtaaactagctttcttgattccttcagccacctactgcgtgtatgttccatagagtcagagcaagcattttttcctttcatggtttatccagaaagattacccagtgcaggataatcattaatggtgcagaacaaaagaacttgtagcttgaagttctcctgaccatatacatcccaagtttccacaccttctttctagagaatctcaagatcatcgataacaggctccaagaacacatcgatatcattgtcgggttgtttctgaccttggattaacaagcacaacataatatatttccttttgaagcataatcatggcgggaggttatagttcgcaataagaactagccaagtgatgtgagaactgctcatgtctccgaaaggattcatgctatccgtacacaaacatatcctcatgtttcttgggtcggcagcaaagtctttgtgcttccgatcgatattcatccattgaatcgaatccgcaggatgtcttagcaaaccgccattccttctctctgtggcataccaacgtactaactttgctttcttggggttggcaaatattctcttgaaataatcaatgattggtagataccacacaaccttcgccggaccacccccgcagtaaaatcaaagtatgtttgattcttattctgtaatgaacaattggcatatgagattattggttttgatatgtagagattatttgacaggaatcgtcatagacatgcctcggccgaggatctgtcctagtgagtagagccgatccggcgacgaccagctgcttcctccttggtggacgccgctgccgtcggagcccttgcataatggaggcgagctcggcgtcgacatcgtcctccccctaggccgccacaccgtcgtccttctccactccgccatccttccgccgccaccgctgctggaaccacggcctctggcggcgggaggcgagctccgtgtcaacgtcgtcctccctccaagtcgctgcactgtcgttcttgtacgctccgtcatccttccgccgccgccgccgcctctaccagcgccgccaccgctggaaccacggcctctggcggtgggaggcgatctcggcgttgacgttgtcctccccctaagccgccgcaccgtcgtcattctccgctctggcatcagctaggctacgcacggtagcccgtccttccgcttccgccgccgccgcctccactcaaggacggaactagaacgaaatggaggagggtgcctcttgcttaatttactctactttagatcaagtttaagtttatacgtgtggctatgtttgtattgagggaggtgcacatatggtgaaaatcggcaagttataactaaaaaattttgttgaccgggttcctgggcagtcccctcccatactctacctccgcccctgcctccactggaggcggcgctggaaccaaggcctctggcggtggcgttgaagcacgggggcgcggcggtggagcatgggggcgtggtgccggcgacgagcgacgacgaggaggtgctgcccgggctgctctatttcatgctcctggcctccatgcggcggcggtctctacaggcggcgtcgacgacctccgcttctttcttccgcaagctaatgagctggtggtcgccaccgtcgcccgctggtggtcgttgccgccgctcctttttgcaatgctctctctccaaaaccgtgctccaacaacgacgggcaatgtttggatacaaattaatcgtcaaagctatcgcattcacaggaattcagttgcttcctcgaaattttgcaagtctattgtgatattttaattcaacttgtgtctgtttgccagctagtttggatagacacatatagaatattcatagtcataccatcagtcaaatgcgtgtgaaggtgtgcactccaccgggagagcacctgcccaaatgaagataattatcccttaattatggagtacttcttaacaagctagatgcaacaatacgtttagcaaccttggtcaactggctgcctgctcctctaaatgttttttttaaaaggatgaactagcatggtgatccgcgcagattacacggctagcatcattatattttctttcatataatagtataaatgttttctcattgtattattaaaatatattaaaatgataacgtaattttaaattttgtactaactttacgaaactactaatgtgtaatattcatattatattttatatgcattttatatgcatgttagttattaattattttaatatcaaattttagttatatctaaattatattcctatatggactatagactcgcctttcaatatttcttttttttattccgaattttcgttatgtgtacattgtatttctatatagactctaggctcttctttcaatattatctatttttaattctaaatttttattatttctaattatatttctatctggactctaaactcatctttcaatattctttaatttttaatttcgaatctcagttacttctaaattctattcctatattaactttagactcttctttctatgtttttttttaatttcgaattttagttatttgtaaattgtaatataaactctaagctctacttttaattttattatgtttattccgaattttaattagttttaaattcctatataaactctgtactctacttctaatattctttatttttaattccgaatttctattatttcttaattgtattatatatggactctatactctacttctattgtactaactttacgaaactactaatgtgtaatatttatattgtattttatatacgtgttagttattaattattttaatatcaaattttagttatttctaaattatattcctatatggacctagactcgtctttcaatactttttttttaattccaaatttttagtattttttattccgaattttcgttatgtgtacattgtatatctatataaactctaggctcttcttctaattttatttatttttaattttgaatttttattatttctaattatatttctatgtggactctaaactcatctttcaatattctttaatttttaatttcgaatttcagttagttctaaattctatttctatattaactttagattcttctttctatgttttttttaatttcgaattttaattatttgtaaattgtattatttttatatgaactctaagctctacttttaatttttttatgtttattccaaattttaaatagttttaaattcctatatagacactgtactctacttctaatgttccttattttttttccgagtttctattatttattaattgtatttctatttggactctatactctacttctaatattcgttatttttaactctgaatttctattatttcttagttgtatttctatatggactgtagtctcctcttccaatattccttattttttaattccgaatttcaactatttccaatttgtatttctatatatatggactctgtttttcttcttctccgattaatatgagaatttctagaccgtgagagcgagcgtggaggctcttttttctattcttttaataagttaatagatgattgaatagctgaattttttgtgataagtattcaatggtacaaagaatgaattcaaaattcaatgcaacaatatgcttcaaacaaccttggtcaactggctgcccgctcctacatccacatgcatgcttcacactgccacctagattaattacttcctcacgaagcaccaagtcttagtcgatcaccaaatcatttgcacgaatatgccttctcccattccttttctagtaaattcacatcaattttaataatcaataatcatccaaacattagtgaaagtagtactatatatatatatgtgtacaaacattacttctgcccaaccacggttagccacatagtagtaattaatcagctagtcagcttacacttgtctacacgcggcgagcggccatggacgcacctcgccggcggagcaacggcgcgtgggagatcaacctggtgcggcggagcccggccacggcgcggaccgaccgctgctcgaggctgctgctgctgtggagcgggttcgtcggcgtcgtcgtcgtgctctacctgttcgtcggccacgtctgggcgtccgtcgccacggcggtgctcctcgccgccgcgggctggttcacctggtactacttcggcgcggcgccggcgccgccggtgctccccgatcatcatcagccggcggcgccggtggaggcccgcgggctcagccaggaggacatcgaggccatcccggcgttcgagtacaggaggggatcatcgggcagcggggtggcgcagtgcgcggtgtgcatcgccgccgtgaaggacggggacacggtgcggcggctgccggcgtgcggccacgcgttccacgcgccgtgcgtggacgggtggctgcgcgaccacgcgacgtgccccatgtgccgcgccgacgtcgtcaaggtcgccggagagacgacgccggcgacggaggaggagccgcccgtgtagccgagcccgcgcaagttgaggcatacgacaagtcaacaaaacatgcgccggaatggaaacgtgtgcttccatccctgcttgtttcttttttttccacttcgtttgactttctgttttaagtgtcagcttggtatagtatggatctgatatagtgtttactagcaaggtgtatatgcgatacaattaacaaaaaagttgtgaaaagtgagtgtcaatggcaaaattacttgagtgtgatatctacttcattttgccaacttctgttatctctttttgaatcgaactattaaagtgtactccgtttctaaatattcgacaccattaattttttagcacatgtttgaccattcgtcttattaaaaacttttgtgaaatatgtaaaactatatgtatacatataagtatatttaacaatgaataattaataattacttaaattttttaaataagatgaacggtcaaacatatttaaaaaaaatcaacggtgtcaatatttagaaacggagggagtacttttttacaacatatttatatagaaaagttgttttaaaaattatattaatcatttttttcaatttgttagtcactacctaattaatcatacgctaatttatcgtgtaaggatttggaaccctaaggttcgaatgaagaagacaagccaatcaaccttagggaaataatttatgcacgtcaggagaattagaaaatgctggtcacgaagtcaggctttcatgtactgtaactatcattgttgaatgggaaatgtatagaaatcttggatacgtatggcctgtttggtagagctctaacttctaaatttagctccaggagttgggactggagtagacttgtggagctgcctaagagcatccctagcagatacgctagccgggactccatccgaaatttggtgcatacgagcgtgaaactagcttccaacagatacgccatcgctcctccaaaaatagcgcatacgccaaaacggcaaagagagaaagggcaaatatagcgtgtctctctcctcacgccataccacatcggatcgagctcccgtcctaatccagagttccgcgacctccccccatcatcgtcgtcgctggagggtggagagagagggtatagcccaggatggagaggaagagccataccggatctggaaggagaacgccgctagcggcagccgcctacgcccgccgccgtccccctgcgcgcgtccgccacctgcgtcctccgcccctcgcccaactgccgccgcctccgcccatccgcggcacctcccctgcctcctccccacccatncacgccc

SEQ ID NO: 11154 - DNA, 6404 bp, Oryza sativa
  unsure (1)..(6404): unsure at all n locations
catcatgatctggaagctgaacaaatccggcatttacactccaaggtccctctgtagggctattttgtttggggggggtaatagacacaaacatgcaggatctttggaagatagcgcacccctaaaagcaaaaatttttctttggctaatgcttaaaggtagaattcaagccgctgcccagttaaagaagatgaactggaacggggatcctaactgcaaactctgtggggaaaaagaagatgtggaccatctgatcttcagatgtgcgccagctagatttctatggtgttgtattagagatgtgtttaactaggatgtggtcccttcgtctagggacgatattgttgccctgatgcatggcccaaagaagaaatctttgctcgttttcgttgctgctgcatcatgggcaatttggctaaccagaaacgacttggtgtttaataacaaactgatgaaagatgttctgcagctacctcataaaatgctctattttttaattctaaaattgttaaattctataaattaaaactaaacaatcatacgtatctatagtcattatattgatataggttacatatctctatctattataatataaaaattgaagatgtttttctcgagattttggtacatatgtgtttaagttagtttttagttgcataacgcgggcggttcgtttatatcgctaaatattaattaaccgtttgtatcgaataccaatacggtgtggtgttgtggacgtagctaatttgcttatgccgatgaggtcacatctaagtctaatctaatcaaaactaattaaataataataactttctagtcgtcagcaaaaattgcgtctgtgtcaagcggatccgttaacttatatgaatatgtgattggagtccgtttcaatttgtgaaattcgtggcaagcgcataattagcattctccagcgcatgctcctccgatccgctgcggcgtccttacgggcggcaagccaactccgtgagccacgtctgagagaccacgtcagccatctcgagatcgtncagcccgccctacctcgcctcnttttatttctctctttctgcaggatttcctcgaccacactgcctactagaggtgaggtgtaagtgagtcagccgcgaactcatttataggccaaaataagcggntttgtagtttattttagtctatactaaaaaaatgctcgtgcgttgcaacgggtgaagtctattttaatcttattattggtatatggtttagataagataaaattcactgtgcgagttctcttggatatatatatttttagaaaatcatgagctgcagttaggagttcaatcatctcaagttaacatacgagtttttttaaataaatttcttatatgattccttttgtattaccaaaagtgaacaatcttaaaaaccgactcaaatacggatatgtatttctaaaagcaaacgaacttaaaaaccgactcatacacggatgacataccaaaatactgacaaaaacattttcaatttttataatagtagagatagagaagatatatagattaaaaccaaaatataaaaattaaaaccgactaaaacacgcatgacggaccgcgtaaacatctttaatttttataatagttttagaagatcatgagctgcagttaggagtccggtcatcttaagttagcatgcgagttttttaaatagatttcttatatgattccttttagattaccaaaagtgaacgatcttaaaaaccgactcaaatatggatatgtatttccaaaagcaaacgaacttaaaaaccgactcatacacagatgacgtactaaaataccagcaaaaatatctttaatttttataacagtagagatagagaaatgggtttcgtgggttagccgcttacaccccgaccgcctaccatggcgcgaaggcacaattttcgatgccacgcgacggcacgccaataagctgatggagagctgcagcttcgtcgtcatcgttgcttgttgcttctacgaagaaggcgccatgcatgtggaggctaggaggagtgcagcgcgacgtgacggatcgatgaccggccgcgtgatctccagactccgcatgcaccgacctcgccgtgcactaggccagtgctgcacgcttgctggttgtgtaggagacaggagagatatagcagggaacgcttgacatgtattcctacatgaaggtggagaagccgcacgtatatggcacgtaacgtggttaaattatcggtgccgagaagatccataccactgttccattatcagctctcgcggcgcacgtatatgagacgtaacgtttttgtcctcgtttcatataaaagacccttataagttggccccacttatactcaactagtgaggttgtgctaatattagtcctaacttatttttaatggtacgggtttagaaaagtaggaaaagtggttggatgaaaaaattcatactttacgctagattcacatcttagtcctagcctatatatttttagtgctgaggttagttgcaatgcatggccatactactagtagagcagaaattatgttaagttttctcgtgtaaaacagttacttattgctggagttaattttgctgaaatatgaaatatctagctatattttcaggaaaaagtgatacttttgataagatttttttcgttttatcgatcattgtctaaaaagttgttgttttatcaatttgccacataatatctgttggaggcatgccatgaagcccttcggccgaacctgccgaaaccatagtaccagtaaggattcaagccaaagacgtcaagaccattcaggcgaagccctatggtgaaagccataagcgaagatggcgaaggctggaaagccgcgtcggtactccgaaagtaaaggcatcttgggcgaaggcatctcggacaaactacaaagacttcgctatgacgagttcggcatcaaggaggcccaacaggcctcccccagcctttaaggcccgttagccatagaccaggcccagcctatcagcccattaaaggcccatatgtgcaaatgacactgcatacccatgtaaatgtccctttcataagggcaaccatgtaaaatcccctgtaaccctaaaccctagaaggtgcaagcttgtcctaaggctataaataaacctctagggccatgtaatgggggatccccaaaaaattttacgaatcaatacaattgcttttacattccaactactgttgagagaaccacgcctttcgatgtggatagttgtccattcgacaacagctggcgccgaccatggggaacccagaccgaaagggcgaaatgggaccccttttgccacacccacacccttcgccacagtacctgcgaggtacagcgacaagggctaggggcgaaagtgagttaagtccaagctggggggctacgaagccgcccaagcctctagacacctttcgccacacgccacgcccttcgccatagtaccaatgaggtacagcatcaagggttgcggggaacaggtttcgcccactcacgccctttgccatagtacaaatgaggtacggcgtcaagggttgcgggcgaagaggtttcgtccacccatgcccttcgccatagtgccaatatggcacggcgtcaagggctgcgggcaaagaggtttcgccacacgccatacccttcgccatagtaccaatgaggtacggcgtcaagggttgcggacgaagggatttcgtccacccacgcccttcgccatagtgccaataaggcacggcgtcaagggctgcgggcgaacaggtttcgccaacccacgcccttcgccatagtgccaatatggcacggcgtcaagggctgcgggcgaagaagtttcgccacacgccatacccttcgccatagtaccaatgaggtacggcgtcaagggttacgggcgaacaggtttcgcccacccacgcccttcgccatagtaccaatgaggtacagcgtcaagggttgtgggcgaagaggttttgtccacccacgcccttcgccatagtgccaataaggcacggcgtcaagggctgcgggcgaacaagtttcgccaacgcatgcccttcgccatagtgccaatatggcacggcgtcaagggctacggacgaagaggtttcgccacacgccacacccttcgccatagtaccaataaggtatggcatcaagggctgggggcgaaaataagttgcttccaagctagggggctacgaggccaccctagcctctggagcctttcgccacacccatgcccttcgccacagtacccgcaaggtacggcgacaagagctggggacggaaatgagttgcttccaagctcaggggctatgaggccaccctagcctctggagcctttcgccatacccatacccttcaccacaataccaataaggtatggcgtcaagggctgcgggcgaacagcttttgccacacgccatgcccttcaccatagtgccaataaggtacggcgccaagggctacgggcgaacaggtttcgccacacccacgcctttcgccacagtaccagcgaggtacagcgacaagggctaggggcgaaaatgagttaaggagttgctcccaagagcagccgaaagagatttatcatttttcaagatgctccgaggggccggcaaactcaattggacacatgagtgtcaagccgccttcgatgggctaaggcagtaccttcagcattagtgtaaaaatccgttcagaaaagcattttctgcagattcggtgtgccgaaagagttcattaccggcaataacaagcggtttgactccgagaagtccaaggaaatgtgcgaacggctaaaacttgaaatcgagttcgcatcggttacacacccgcagacaaacggggcagccgaaagggacgaatgacaaaaccctagcagcactaaagaaatgaccgaaagccggtaacagttaaaaaggtcgaaatgctaaaaagaccgaaagccggcaacgtcaaaacgatcaaagtacctaaaaatacctttgccaaaggcaaaaaggggaaagtacgagccgaacagccgtaacacacaccacaacccttttatttgccaaaaagcacaagttacagataaattccattgcccgccaaaaggcattcggactttacatccgattcattaacaaaagcagtcctcaaatggcgaaggactacccacttgagcatcttcttcatcgctagttgttagatcaacacaaaaaatttagcggtgaagaaggaaaaacagggattatgctgcgtcgacgctaggcaatggaaaactgacgctcagtcatataaaattcataggtgtgttcgccttttttgtgtatgatatttcgtggaaaaaccccaaggcaaacgtttgatcgacgaaaacgccaggggggcgatacgaatcggccgaagcacagctcgccgaacgttgaaaccgcgacaactcattttcggaaaacataccgatcgtcgctacactcgacttatgcaaatacttaagcgtttctagacgcacatgccaaaagtcgagagcgaatgatgagggctggaaagtcaatgtgaattcctttcgctaacatgcaagggggccgacacgcctcgcccttccgaacgtacaagttccaaaatgtgatgatagcgaaaagaaacataaaaacacgcacaagctccatcgggcaaaagcacatacgtgttatacaaaggagcaaaaaattacataatccgtttcagaacatttttgcctcgcccctactaagtcccgcgaacacggttcgtcatctatactgtacacgactctaaggggggaaggaagcgaaatacacaccgacgtcaagcgatacaacttgacgattagtcatttcgaagtctaaccaaagtgtggcaatgtcatcgcggcgctggatgtggcaccggtcgtaatcctctaaggttcgaccaggatgtcttcgcctccaattcgccattttgacaacaacatagctacataaaaggcgaacgcttgatcgacgaaaacgctaggggggcgaaacaaatcggccgaagcatcgctcgccgaacgtttaaaccgcgacagcttgtttcggaataaagataccgaacgccgttacattcaacttacgcaaaacacaagcgtttttcccagcgcaaaatgctacgagtcgaaaacggaagtcgaaagctgaaaagtcaacaaatcttttcgccaatccccaaaagggggccgaacgcatgactttcggcgaaatccccgctaaaacaatagggaaaaggggaaagaaaaaaatacaagtcaagaatcgcgcaaagcagacaaacttggcaaaatataatcacctagtgtcataatacatcttcgccattctcaaaaggcgaacgccagtgttcatattttttctgc

SEQ ID NO: 11155 - DNA, 9232 bp, Oryza sativa
  unsure (1)..(9232): unsure at all n locations
tccccccacgtcgccaccaccgctgccggcggaggaacgcagcgagccgcctcgggtgggctcgccggaggaagtcagcggcacaactattattgcaaggactaaacaagcatgaaactagcttaaagatgggcctcatgctaatagggccagttaatcccttcatcctaaaatataagtcacaactatttttttatatattttataatacaagacgtgctcccactctcctttattttttttctttaaatcctcaatctcaaaatctctaattccattgagtgtatgtattgtatttactaggtgatactccgcgctttgctgtgggattcatggacgagtatatgctaaatattgtcaaaatgatgaaagttgaaatgttaagaaaataatatgaggaagatgatttgacacatacttgtcgatttctataacattatattgtagatgattatgctagaatagtaattgctagtgagtgaagatgtggcatgcttgcatgggattttaaataggctaaaatagtaattgctagtgtgtgatgatgtggcatacttgcatgttgagctttagcttataataattattattgggtactactatatagaaagtatagatttcttggttttgtgctaatagtagttgtgccttatatttttgtatggagagaggtattaaacaaatgatgcttgtcctcgttcctcatgcatagaaaattgtagcaagagatttgagtgggttttctttcttcccatggttttcagtggtgaaggaagcattccttcaatcttcctatgatcattttgagtggtccgaatggtaggaaaggaaacacttcattcaccctaatttctgggtgcacgaaatcaaggagagatggtgacacagttgtttatactggttcaagccctcaatgcgaggtaataccctagtccagttgtttgtggattgaatctgtgtcggctgtgaatggtagaatgcataacccctgcgtgtatgctgggttctggagatgatacccgatctcgggacccctaccccctcttatataggataagggggagggttacgaggaaagtatccagttgactacaactagatctccctattctatctatataagatatgcatgatccccgagatttatattttatcccgagaatatctcttacttaatttataacatatccttgtgggcctagggctcttggcccactccatgtcatacggcccaaaggcctctccttgggtacccgagtgccgtgtacaccacactctgctctggccggcgtttcccgtcatgccgcgctagctcttctgtccctaaccccctatctccttccataggttgcacccgcctctgtctgccgctccctgctcgcaagccatagccgggacctcgcctctgccgcgacccgtgtctatgctgccaaaaccccactgccacccttgccgttcgcgccaccagtgagctcccagctccctcctacgcctccaccgcttccttctactgcttccccgcgccgccgcttgtcgctggtgccaccgccagtggctcatggcccgtgcactgcctccttatatattttctattagggatatataaactaatatcattaatatgtcacaataattactactccctccgttttatcttattataagtcggttttaactttttttcaagtttgaccaagtttatataaaaattattaacatctacaacactaaattagtttcattaaaattaacatttaacattttttacaatatgtttgtttcgggttaaaaaataattatttatttggttaaaaacattagtttaaataatatataataaaaaaaaggaaaactcaattagaaatggtagaaaaagatataaatatctcatatttcgaggtgaagtatccctgcataattgtgccaaagaaggaagagaaatcatcatgatgggtgtctcgaggatatttccccgtccactctgtgttgactccgactctttgtgtggtgtagatcatctagagttgttgctaaaaaccacctagtatggttgcaaaaatttctagcatctctttgtttctactagctgtgattaatttatcctaattaactctcttaacaaatattgatgtagtgagaaaatatttttcttttcaccaatgagataagcaacacaaatatgtatatccccatgagttcagtttatcctcattctacatattgaaagaaattttatctctcagaacgctacttgaaattgatctaataaaaaaaagagaagaaaacatatatgttttctagatgagaaaattacattgccggtacatgaacttgtcaggggagtgcaatcctatgcatgaacttgtaaaatacttgttttggtgcatgaacttgtctgatgcgtgcggatgaaggtgaaaagaactctacatgactaatcttattgatttaggggctgattaggatatatatccttcatcatatatatatatatatatatatatatatatatatatatatatatatatatagaatgggatataatgatagtagaaaaaagataaagagaaagctgagaaacgatataagggttagcaatatatatgatgaaggataaagtagagaccaaatttatacatattgtcttatgcatactcagtacacatatgcatgtcgcatcctaatcaacatccgcttcgtaaagtgtacattgccaagttaatttggtccttaatcgcacgaactagacaagttcgtgtactgaaataagcactttacaagtttatatattaaattgcacccaccgaacaagtttgtgtactaccaatgcaatttaccgtttctagattgtattgtgcctgcattttattttgggaaaagagtgtgttatttttttaagtgttggctggagagtaatcgctataatgaaagagttcatcccctttaatttgacactaataaaattaattaggtgtgattgaggtgtcttaattgatcttatcggtagaaacataagaatggctacgagtttgccaaatctttctataggttgtcaaatgggctgggactttccttgtctgacctagcacgcatgtgcaggtcacagcccaggaacaacacggtttgtttggctataggttgtgctggcacgacccatctagccaacacgacatggcccaggaatagcacacagcttggcccgttgttgacagaaaacacaaggcctgggagatctgcttaactccagtgcaggtccaaagctcgccttcggatatatgagcatgccagttgatttgatcctgcaatcaacaagaaatagaacaaaggaaccgcaattaatcctataaatgatagccgatcggctaggtgccgatgacatatcatttatttcaagccgatgtcatgcgtgcatcgatcggcaaatatcaataagcaaatcagaactaaatctactcgatcggctgtaaatattaatgatatataatccttatatcgatatatacttaaatcaagtgattgggatagatcggtcgccttaccgagacagtataaatcacttaaatcgaaatatatattaatagtgggattatacgcatttatagcatagccgatcaaatggatctagcgtgtattggctaatactccgatactactctatattaagatgttaaagcaagtaaaatataccaaacagaagtctaatatacttagatgcgacaagatcttaacataaagggcaaatttaacatatagattaagcatatgaaataaaagtagttaaatcagataagatcggctaaaactccaatactaccctaatcggcaactagaaagcaggctagagattgcaattctaagcacgacttaatagatcaaactcaactgatgtagcattaagtatgaaaagaagaacaatatctggacaatcaagccgctggaagtttcatagagtggtagatatatcacaaaatctaagttaacgtcattgtctaacctaatcggctgccttccattaacagatgttagtcgattacatgttagataaagatattatcgaagattatgtaagatatatgataactcgacgaattatatagataagattagagtatcataaagatggaagcactaatcctgagaacataagtcgtcatgacaagttttacctcttgttgaagatcggaaccgatgcagctcaacccgagagcatgaactcatcgaaagtaaagcaaaaagggtggcgatgcgccgagattgtattagatgtctttttttttgttttttacatagggctcgggtctatttatacccgagaattacaagatacatccataacagacacgactattatctctaacaaactctaagataccataagtctttacggcagacttctgcccaaacatatctctaaggaaattacacagaatatcctaattaatagatacaattgcctccccaggactctatccatgcgtggcaatcatcttgaagcacatcaacttgaacccgatgacgtacaccgagtcatattatcggaatcggctgtatcggctagccccgtccgactcgaactctgccgacctgaccttagccgatttggactgcagccgattcttactctgtttccgcaacgatcttcatcttggattccacttcgatctgatcttcacctccgatgccaatattgatagaatttaccaaaggagaatggaagaatcgagaaagccaggggctgagggcagaggaagcgatggtggacactcatcgacgtaggactagacggtagcattgtggtgtggccaaccccattctcgagcacgataactaagcatgtcggtcattgggggctcaccggctcggggagaagtgaataggaagtgaagggtcacgatggtgcttgaagaggaggaagataaatgtgctattagtgagcggaggaccttgctagagtttcgccgaagtttgtgcgactagatgacacggactttgttcgcattttttcttggtatatatatgaaatttgggctaaccgatctccacacaacccacgtaacctatcgtgccatgccaatacgacatgacccaacatctcattaggctccgtgcttgggatgaaaacggagcggatacagacggataatactcataccatttttatttccatattctttgtcagatacgaaaacgaatacaaatagctcatatacggacgcaaatacgaattatatcgaatacaaataagaatcgaatatgaccggacacgaatactgagacattttttctgtcggaacacgaaaaccacctcatcttcatatataattagttcattttatataaaatatagtatacgtttcaaaaatatttaaaaatttaaataatattaataatatggactagtgttaagagatggcatgctattaaaatctagaagggtagatcgaaggttgtagcgttataaagaaatgaaatatgtctcatgatatcagtggatatccgaatagagaccatgtgcgtattattatctgtatccgtcgaaaaccctaataccatgtgcgtattcgtatccgggagaaaatatcctattcatatccgtatgcaaactatgcgagaattatccgctccgaaaagtatccgtattttttctcttgagtggacggaaattatccgctcgttttcatggccgacaaagtacggctcgttccgtgagccctgccgaattgggcagtgctcaaacgtaactattatttatctactatattaaaaaagttaaataaaaattcaccatctcagagggcaggtccggctccattcgaaaaatgggattaggaccgatggacatacataatttctatttttctgatttccaacgatgtgatgtgcaagcaatccgtggtaggcgaaattactaaattaccctcgcgaagcctcctcgtcagtttgcctttgccgaccgcctccgcctccgcctccgcctccgccgatccccatccatcccgcgagcgagcgagcgagcgagcagggcgccgtcgatcgtcctgctgcttccgccgcatccatcctggtgagcacatcctccgccaccgccgcctgcactgatccccatccatcgcgcgagcgaagcgagcaggggtcgccgtcgctcgtcctgctgcttccgccgcatccgttgcgcacgtcctctttcccatctctctctctatacccacgcgctttttctcgaatttgtgttaaccctagcttctgttctagaaattttggcttaaccttaatactaataacagtttgatggttcccaaaaaggtttggggccatgccccatgttagatccaacacatgtcacaccagttctaataattaggggatccgttgatgaattttaggctattaactatatagcaaacttgctgagtttttcttctttccgagatatatgcattgtagtccattaggtacagtattgttctacacaggtttacatcaaatttatatgtattttcctgtaccacacatgccaactttcaggcttcatacttgtttctgaacctagacaatatggtatcttaaaaatgtgatagaaactggaaaaatgaaatattactaatataggtgaatctgcctgagttgcatcatgttcaagtcctcataaaattgccaatttgagaacagaaaattgtgcatctttattgaaaggtgtgcattttatttacctaaaatgtaagattttcgacctcttctattaagctgtgaaattaccagtcctatctgatatttgtataccaccaagtagctgggtaacattcacttgactaataataattatctaacctatattttcatgcactccaactgatctggatccattttaagaatatgtcttgaatttccaatgtacgcgattacctcatcgtgtactcacctatttgtaaaatgtcaagccccccccccttctttttttactctcttcccaagttcatgtgtgtactggttgttgaaaagatggattaagaattagcacttgtttttgatataattttatttattgtaataattttttttttgagaaaagaagaacattccttctaaccttcttgaaacctgaatcagggacattcaatgtatgctgtgcaccctgttcttgtacggactgtaaccgttcttcagtcctgatggagtcagaagcaggcagtgcacctaatggttgtacatctacagtaaaggggtcagaagagaggcacagtttggaacgtcgtcatgatgatggctcatgtatctcagagattaaacttatttctaatatggttgtaaagaaaaagagggggagaagagcacctccatcttctagaagattaagtggtaataaggttattagtggtgaagatgctgttcaaaatcgcaaccatgctaaagaagaagaccaggctggtaaaactcagtctaatttatttacacattaataagaaaagcattattgccttattggtagaactggtggatttaacttaccaaaaacttgtctctcaggtaattcttctgatgtggcgttgtcgccatctagcaggaagacagaaggtcaagatcagtcgacaaaccccaaagatttgtttgagaaagcttgccatcaagctacagagatggttactgaaagcacaactggttgcaagaaatccttttgggaagaaaagggaagtgataataggagaggcaggcaagctacactttgtgtgaaacaggatgggcttgatattgaaacaacaggcaaggatgtctctgcaagtgaagcttatgaaaaatccagcacactggaagatacttctgttgggcatgcagcagcaaagagtgttaatcctgaggataattctctagatcctatggataatgtaagtttcagttttccttttttatctgcaactactagtacatattttatccatcaacagatgtccagtattttctttcttttttgtggttaagtcatgcttctgtcataatctagcaattgatgtttggcaatttggcatgttgatccaaacataatgtgtgtatacagtttgatttatattcctttgaatttgtgttcaaaattaaattccttggacatggtttcaatatccattaggtgtctgatacacatgtgaatgccacatcttctgaggacaaaagttctgaagaagttgaggacgtgagttcaaaacctttatttttgtgcattaaaattatgacaaatctttttgtgtagctaaatattttgtttcacttgacaacaataggtgaaagtgtgtgacatttgtggagatgttggtgaggaggagaggcttgctgtttgcactacatgcaatgatggtgctgagcatatgtaaggcttatttgttccgttgctttttatgtataattactcatctttgattgcttgatgacatgccatgatggttaagattgttgcacttgtagtttgcaaacaagccacaattaggatgcctgccctgtgtctcaggacaggaataaactactactgttattatgcagacaagccagttaggagtattattttcagaatatttttccacattgagaatatgggtattgttaatctacttaaattttgtctcatttctttgctccagttattgtatgcgggtaatcatccaagaggttccagagggtgaatggttgtgtaaaaagtgcgaaaatgaattggaatatgaaaagaagaagcaactagaaaaatctcagctgaaggttggtgcctcaaaaagccagttctttgaaaggaaaaccaatanaattgccaatgcatcaaaaagcaattcttatgaagatgaaccctcaaaagcccttgaagggaaaattagtaaacctgacactgctttgaagaacagaagttcttttgaaaatgaagtggagaatgaaaatggagataagaaagagttgaattcaacaaaccaatgcaataatagcaattcgaagaggaaggaagaaggtgcagggatcatttcctcgattaaacaaagtattactgaacgctgtggtttctccatgggagctgagtccagaaaaaggttgccattgtcatgtgagagctcatttcggttggatgtagagaagggaaagcaagccgctaccaaagtaccaacttcattggcatttgacgctgccaagaatctgggaccaccacttcgtggtaaatttttttccattattactttcaattcagacactttacctatgtaaa

SEQ ID NO: 11156 - DNA, 1024 bp, Oryza sativa
taatagtgtgttgttaatgtgtttaacctcataatctgatttatccttaccatttcaggtaggaaatgctgcttatcacaacgacatgctatatgaagaacttagacggtccattcctcaactcaccaagctacttcttgcacctgaggaggataaaaccaagggcaatgctgcaggagcgttgagtaacctagtgaggaactctaacatactctgtgaagatattgtctcccagggcgcaattcaggtttgccaactgttgcttactgctcatgctcatgcatcttattctcaatacaggtccacaatttttatcgttgttaagttgtacagcaagggaaacgacttgcagttatcgtgggtgaatgaatgaagctactaaatgaaatcagccgcaaatgcaaaattactgtgctgagtcagtggtagtattatcttaatgatgcattttagagaaactaaacatgatgcaggaacatgcatcaaatgaatggcattttatacaattggatggcttgacaaaaaacataacctacacccatttttctgctatcatcaaccttggcctatctgaacatactctttcatcccctgacctgttgctatgcaggccctgctgaagatggtcagtagctactccaccgtggctctgagccccagcaggaaagacgtgctaacagaatctccgctgaagatcgtgctcttcgcgctgcgcaagatgtgcgaccacgccgcctgccggctcttcctccgatcgtcggagctgctcccggtcatcgtgcacctgaggcaatcgccggatccagccatctctgagtatgcttctgccatcgcgaccaaggcttgccagccttgagcctttgacatccctggttcctcccggccgtggcgggggcatgatcatgccgccgcaatgcgaatctgaaatctttgtaatgtcctggaattgtaatgtagtacagtatatcacggatcaactatttgtatatatatgacttgatccatataattacccgacatatga

SEQ ID NO: 11157 - DNA, 15329 bp, Oryza sativa
ggaggtgcaccacatggacgtcaagtcagcgttcctcaacagtgagctccaggagatggtatttgtttagcaaccacccggcttcatcaacgccaacgatcaaggcaaagtgtacaagctccataaggtgttgtacggtctccggcaagctccttgagcgtggaacgccaagctagatagctccttgttgtcgctgggtttctgttgcagcagctcagaacatggagtctacacacgtgccaccgccggcaagcgactgatcgtcggtgtgtacgtggacgacctcatcatcactggtgatcacactgaagacatcgctggtttcaaagaggagatgaagaatctcttcaagatgagtgatctcggaacactcaaatactacctcggcatctaagtgactcaacgcagtggctgcatcacgcttggccaatctgcgtacgccaccaagatattggagaaagctgggctccaagactgcaatccaagtcagactccgatggaggtatgtctcaaattgagtaagaactccgattctcctttgatggattcgactttctactgcatcctcgtcgggagtcttcgttacctcgtcaacacccgccccgacctggcatatgcaatcgggtatgtcagcagattcatggagactcctagagaagagcatctctctgctgtacggcgtatacagcgctatgtggccgggacgaggaactggggactcacttacctcggtgggaaggaagaaaagcctagtctgctgggttatagtgacagtgacctagcaggcgacactgacgatcgccggagcacctctggacaaatcttcttcaccggtggaagcccagtcacctggcaatcctccaagcaacgagtggtggtggctctgtcttcttgcgaagcagagtacattgctgctgcggtagcagcatgccagggagtgttgttggcgcgactcctgactgatgtgctggaggctgatgcgcctgctccaaaactgatggtggacaatcagtccacaatttctcttgtcaagaatcctgtgcatcacgaccggacgaagcatgttgacatcaaatttcattatctccgggagtgcgcagaacaaaagctaatcgaggttgcgttcgttggcaccgctgatcagcttggggatatcttcaccaagtcactcggcagaaccaggttccacgagctgtgttccaagattggtgtttctgatcttcgtcaaaggagtagcaagaattagggggtgatttgttgaataaatctagctgctttgtttgttttagtttcccctgttttcggtttttcctagtcaagcacgatctggctttgttttcaggtcatgtgtagtaaggcttgacgcgcgctgagttcgcgcggagctggtgtcgtgtgcgtcgtgtcctggatcgtgggatggcacgatgtggcaacggatacgtgtgcacacatttaggagtccacttcctttcagttgtaactttccttatttatagttcaatgcaacaatcagaaaagctgcagcttcacagcaccaaaaacctcacagagttcgtttctttcttctttgcaaaagttcgagaatcttgagtgtttctgtcactcgacttatgaattatgactaggttggcctctgcctcaggatgctcgtttagattgccatggggcagtggatggaacgctcaatcctggccatggaacggggtaggaagggcctttttggttggtgtcttgagcatcatgcctgagaggaataggagaagttgatgaaaattgcctagctaggcagcctggcattttgcttgtttggttgtgcatcgttgcctgaggggaaaaaacatggttagagtttagatagtactgctaagagcatccacagtgtgtaatcgattttaggattataaggtcgttgacgtggaatttaatcgagagctgcagtgttgcatcagatcgttgtcctcaagggaacaataaaaaaaattataagctgcttcttggctggacagatgaagccatgcttggcctgacacccgtatctatctattcttgcgcctggatttttttaatcagcaatgcgtggtttggttcggctcgtctttggagttcgatttttcctctgacacgcaccagtcgaccgccccagtgtactctattcgatttttccgtctcacggttcgatttgtccatacactggagtttctcaaactcaaatgctaattgaaagacaaatctcgattcgcctagctttgttcacttttagttgttcgctcttccgaacaaatcaatttattgccttagcttttgatgaacgaaccatttgcatacatcaagaagaattaaagaatgaagaacataggaaaaaaaaaatcccaaatccacgcatctagcagaacgccaacctagaatgatttctgcgggctttctttccaaggaccaatcaatcatcacgtacatgaagaaggagaaaaagggaacagaatgcaatgacagaaattcccaaaccatcaacgatttcttcaagattcaactgcatgcaaagcgtttcaatcgtttcggcagatcggcgactgctgttgcttcgtgcggaagatgggtcgcagacgtcgatgtcgcgccttgaccagctcccacgggtgttggatccattcgccggaggggactgcgaggcgggggtggcagtcagtggcggatggtgtgtgcggaggagggggctgcgaggaggcggcgacgcggtggagaggcagggggcagcggttagtggcgcaaatcctggtgagtgagagatagaagatgggagatccgcgaggagggtggggcggcgtgaattccttgaagagcggagtgcgtgcgatgagagtggatgggagcgggaggaaacgtcggatgatttgaggcgttggattagaaaattctgtatcattggatttgacgaatgaagtacgaaggatgcaagatctagttggtgaactcataaggtgtaatataataatatgtaatataaggtgtaatagtaatataatactgtcactatttatcataccataaatctatctattatcttctattattattattattatatactaaaagtccattaaaaatcctaaaaacacactcaagtcgccatgtgtcactctataaacactcctataccaccatgtggcactatctaatctcaccatcgattttcatttaattggtggatccattattttagaacattagattagatctgatttttattaaattggtggacccattacttacactgatcattagtatataatatcttccctttataaaagtgaaaatacgtacgtcagcaaaaaaaaaaaatcaagtatctccggtacatatgattcgggaataaaagcgttcacattccgttcgtcggaagaaaaaaaaattgcccggccatgttataaaagagacagagaaaaaaaaaagagaatactataaacactcctataccgtcacgtggcactatctaatctcaccgtcgatttttatttaattggcggacccgttattttagactaatcattagtgtatatataatatctttcctgtataaaagtgaaagtacgtacggtcggcgaaacaaaaaatcaagtatctccagtaggtatgattcgggaaaaaaaaaacgctcatgttccgttcgcggaagaaaaaaaatgccaggccgtattaaaaaagagataaagcaaaaaaaaaagaatataattttctaccgtataagatacagcgaaaaaaccatatatccgtagtaccatctatatctatctactatctatctattatataataaataaaatccattaaactttctacaaacactcccaaaccatcacatggcaccctataaataatctcaagtcacaacataaataaaatagaaatctaaccatcgatattcatttaaatcgatggacccattattctatatcattagatctattgtagaaaaccaaaacctcccacgttcccatatccgtgcaccacacacgtacagatcaaattgcaggctacctgttcctttctccttttttatccctatcacaatttaaattaaaattatcattatgaaaaacaatatcataaataggtgttaaagtccattaaacattctataagtatttctaaatcattgtatgacattagagaaacttctatccattggtttccacttaaatctggacacattaatttacatcattattggatctatttttttaataaaaaaacaccccaaaccatcttccctttctctccatccctatgggcgttttgccaagctgctacttgtctcacttaaattagattctaataaatctgagaaaaaaatataatatccaaccatcgattttggcttaaacttcaacacattattttatgtcgtcagatcaatcattttttttctaaaaaaagaaacatcccaaacctccctccatccccgttaccatgcggtgtgtggtgttacttttctatgttttttccggctctatgataattaaaataaaattatttttatggacaaagaaaagaccacaaatgaatctccatctattaggtctagctggctattatttttttaagtgaaaacaataacttaataacgatattgcctatatttaagtgctgaaaaatttactttatgaacccacatccatattgaagcctctacttaataaatataaaatttgctacaggacataaaagaagtgtagttagttgagagacactggaagaacatatatatgctatgggacacagaaaaaaaatggtaattagctgttggatacccgtggcattatttttttatatccaaaggaaagggagagagaaacaatcgcgaaagtatgattttgccccttccttccatgtgtggctcgcatatagctctgacgccattgtagtcatgacatggcagcgtgtcgtggcgcagctgcgagaccgacaacaatagcctgcgctctgcggcgccctgctcgatataaatcaggaggtgctccatgttgtgctcacccccaagcgcggtgtgtggtggagcatcgacaccggcatggccctcgcgctgtagcgacacgagtgcgggaacgacatggagctacgggccctccttgaaaccccctccccctctagatagccacctcaccggcggcgggtgcggttgccgcgttggaggtgtatgcgagccggacttggtagccaaggggcaaaattgtacttttattattgtttctctctccatttccgttggacattataaaataatgttgcgggtgtccagcaactaaataccagttttttcggtgtcctacagctgatacacattcttacggtgtccctagctaattacctttttttaatgtcctgtagcaaattttaccctaaataaaataaaatactaaagttgctcactaaaaatcaaagtatcctagcttaatttttttataaaactggtagacccattatttatatcccgttagacatctaacaactttctatcaactttattaattttgttctcagcatgtatacatgagctatttacccatacattttgatattgatgcttttatgaataaatgattattttaggagataaataaataatcttaagatgatcatatcatctaaattatatatatgatctatgaagttacgtggccagttgaacaacatactgatcatactaagcacgttggttgcaccaaggaatcttaagagtgaaacaaccatgatgtgccctcaacaatatataagccaattccagataggaattaaaagaccgtatccatttacttttcgggtaaaacttgctacagtacattgtgaatttgtgacatagcatagaacaatctagaaacgtgtaattattacatgacactccggtttagtggtaatttgctaagaaaatactatggcctctattttaaattttcttacttgattggagcgagataatttagaatggatgcctttaccccatgccaagttgtaggatcaacccacttatattttaatcccaaattacatacatcaaagcatttcaagaagcttcatagagtggatttgtccaaaaaaaatgaagataaaaagaaatgaaaattaaacaaagtttatctaattttaaatttcttttcgttgggtttataacccattctaaatagaaatatccaaacattttaccaagactaatcaaatgaatatatttaaaatttcaaacagaatttaacaaaaaaaagggcattcatatgaaacacatcaattgtttcgatacaaaaattttctcatgaattaaaagaacacggttttgaagtatttttagttcacaatttatatgttgcaagtaacgaacgttcaaagaaccaggggcggatccacagtatatggagtggggtcccactcaaatttaatatttagtgtattactaatgtgtaattaagtaaaaaaatttaagcacactatcaattctaataagatgcccccactcgatttttgggctaggtccgcccctgcaaagaacgttaaataagttaaattttagtttatgataaagtaaaaaaatatttttgatataaaaccatccacacatggacattcgtaataaaattttacgcacatgcccgcgcatatgcgcgggctaccttcctagttttgaactaaaaatttaacctgtacaaaacaaaagagaaaatagaaaaaaaagtcaatagcagtaaattgaaccactcgtagaaaatcttataatcttacaaccaatttggttcttaaattgagataatcattgcatcatttttaagtgattaaatataaatagcgttccctctacccctatacaaagcattctccatatattattgcatatataagccacacaaagatagcaatatatagttagtttaaaaattatatttcttactattaaatatttttaatatgcatgtttactaggtatattttaacaaaacacactatagatcatgcatacaatgtctacaatacatatatatctactctgtctttattaattttatgttggtatgtataacaaattatggtaatgtgatccaactgaaaagagggttagtttgatagtactattagcaaatatttgtttttcgagatttgttaaaaaaagatcccaaaacagtccattaaaaaaacacctcacttccaatttacacttaatttattagacacattttctaaataaactaaatctatctaatttattaggcacgttttctaaataaactaaatatatctttttttcgaatgataaagaagactataaataattccgcataaggataagttaaatatcatctttaaaaaatctattatatactaaaagtccattaaactttatagaaacgctctcatgccaccatgtggcactctacaaatactcctatgccaccacgtggctctctaataaatttagagaaattaaaaaaatctaaccgtcagttttcatttaatctggtggacccattatttttaaccattggatctataataaaaataaccaattaaatttatccttaaaaggcccacatacatgccccacatacgtgcatgaacgtacgtacttcgtgcaccgggccccacgttcctcttttctttttttctctctttttcacgcacctgagataaaaaccgaattaattattctataatatattatgtgttttattcatatattattagatatttaatatcaaatatattattttgacaccgtgtcattgtcatttatctcccagtaaagacttcgtttgatcaagctcattgtgtgagcttatccagggtacgcagaatggtgcaagtcattagcacatgattaattgagtattaaatataaaaatagaaataaatttgttttatttttaaaaaaacttttatataaagcatatttgtaatacacgcaccgcgtaatataccatttagtagttcgggaaacatgcttgatataaataagggagtagccaatccgataagcactttagaacatagccttaaatgtattatttaggtagtaaaacattaatatataatatacaatatatttgtatacttggtcaatcatagcctaaaatatcaaacttatgtcctcactgatccttatgtatgtaagttctatatataagccactattcactgattgctaaataatattatttacgcagtatctatgcacaatgcacctaaaaattagctgatatccaataagcacgtgtgtcatctaacaccgaagataaatggtgacactaagtgcacaaccatcaacaaactatagagtaagtagacgatgcaaacaatagttaactacaagtagattacaactatgagtaataccattcctacacttctataaacgctcctaagatgtcatgtgatactctaataaatgatgaaccctgagttccactcgacactcaaggctgttgtttgcccgatctttcggtgagttgtagataactatgatttgagagaaacgttgacgacccgactacaatcgtacgagatgttgtgttgcgccttagcgatcgatacacctctccgagggttgttgatcttgccggtgcagatcaaccttattcctgcaagcaaatcaaagaaacaagcaaaaacaaaataaaatcaatctgaattgcaaataggaattgagtacacacgataagttggggtttcgaatacaagcagacggacggtctagccgacacgcgcgctgcaaggaagtagcaatggctaaactttcatctaaacaaaacccgagagttcttggcggcaactagaggtataagaagaggggaagaatgaccacagggtcgtgctccaaccctaggacgtgcccctaatgggcccaacttgatacatagcccattgggccaaaagaggtgacgcagcaccatggacataaaatagtcaggagtaaaatgacaattgcggccgcttcagaacatatatggacatgtggcttgatccatttgaaagtagacttgataagctttccatgaagtacttgcacgccaagctttccatgaagtacttgcacgcccaaatcagagttcgcatgaagtcgtggcggccgtcagaagttggcgctaccctgcaatccgaatccaccccgcgcgaatcctctcccctttggatcctctccatcattcctgagtaaaatgcgagtgcacgcgtctccggggtataaagaagaggaacatgaactcaagaaagaactcacctgatagtttagttgacgtgcacgagcgcgggtaataggaccatcatgctgtacttgggggacgtggatgtatcgatggtgttgatgtcctcatcaataaattagaaagaatatatgaaaagttatataaaaaagtaaacatacatccatcaatttacacttaaatagatgatccattattttcaaccattaaattaatttagatatatgaaagtaatccctctgtcctaaaaaccatataatatgtccctacatacatacacaactcctatataatttcgtacacgatatatatatatatatatatatatatatatatatatatatatatatatatatatatatatatatatatatatatatatataaatataaaagaagagtgggtatgtgattcatcttatctggtagttttctctttctttccagctctaagattttctcaaattgaggatatataaacatagcaaccactcctagcgaggtggtaaaacaagccatgtcgcagcgttgcctcacgccacccattgcttcactctcctccagtcaatttttttgaaagtatctttttactaacaatgtgaaagtcaatcatatgagctcatatatatatatgtgcacatgcacactatgaatacacatgcatgcaccatatccctatgttagaaaaatattcattcagaaaaaatgaaaaacaaacgtatgcatgagagactactattcggtagaaaaaaacatacatataacaacattatatctatttttacgtcaccctcatccaaatagttttaacaaattagctcaaattccaacgcatattaaccccagcgtacatgcataggtgaattagatgtataatacaagaaaaaaaaaatcaaaacttgtattaacttgtaagttagcaaaggataactgtgtgagcaaatattttttacatggtcgttatcactgtagctattagacagtcgaatgatcaaccctgctatttttttaacaaaaatatctatactactaaaaattttagtattgattaacaccttaaacaaattttgtctactctaaacaacaaatcaactcaagataaaaaaaaacttttttttatcaatatgccaagtatggatctcaactggctacattgtagtaattatacaggagtatgcattattcagttaagttggtccgagtaagatgttacggttgacaataaagcttaactggccttctacttaccgataaaattatgttaccgttgaggagcacgactatatcaatgcaacacccatgaattaaggcattagagaaaaatccttagcggctatagtctgcttcactcgatcgtcagaggagcatttatatataagtttaattgttttatcctattaattggtagaagcggtatttttaaatatttatatatagatttggacctatgagacatgggcacttgggtataatgtggagattaactttttatggtattaatgatgtattggggttttttttatacagctacaattccatcgattaaaaagacacacatacttcaaaacaatgataataagttatggtgaatggtgaatttacatataattgggataaagtgatttttgtttggataagccattttgatcatttactacatatcaaaatcaatggtctatttcttatagtgaatatggtaagatatggtattctttttataggcaataaataaattgcccgcgcatctgcgcgggctttcttcctagttattataaagaatgattaagccgctacttagtttcgataataattatttattggatcaaatccatgaaaaatatcttgacgagggattagaaggaacgttgacgaggcctcgacaaccagtcccatctttcaacatgtcatagtttttctcaacatgtcatagttttagtagaccatattgttgtagttcgttagaagcatatatatggtggactagcgcttctatcttattagcgaggtcatcggaggggatgttgatcttattactctactgtactagctagtcccacctttccacggttgctactgctaccacacaaccatctagaaccatggaaaaaaaaatagaagaagacgaagacgaagttgacgagaacggtaggagaacgactaagtccacaactcggcattgagagtggccgattggaataacaagttaggttttttgtttttgcaaggaattactgattgcttgcttaaactcgattaggaccgggacctattggcatcctattcagcgtctaattcaaccagtttggcactatactgtttgagctttggctcgcacgcacgcagtggcattcctaggttatattacacggggctatgggaccccgaagagaatttcaatctgtagtaatatattttagtctatttattagtttaaaattaaagtattatatatgctagtatgatatatgtacagaaccctcgataattttttgttaagggttcaccactgctcgcacgtatgttttgcagtgaatttataaagatccagatagattgcaatcatctggagacttaactaatgagtacttaatattggtcgacgaccagattgattttattgacaattaaacttagactgttatcaaattatgtgacagacatacataccctttgaaaaagaacatttttagctaggaacgtcttttcggaccgagggtgtgtatacatataaaaggggataaagaacattaaaactaaagctatttacatatacagtttaatcatgcaaatcaaatgtaacttgcacggaacaattaatcatgcgatgctcatctcatagaagcatatagtatcgtctgaagatcgaaacgaatcttccaattcgctggggctacgttgactgactgcatggtactctatgttgactgagcacaccatgtagtactggctagtggctacgttgactgacttcagtatcaaacaataatccgagagcgctttcgtccgaacgatcgattccacatttccacgagaaaacttgaacacccatgtcaccctctcccttcttcactatatctctcctttctaattgtacaggccactttgcatacagcgtattataccactataccatggattgtatcttagcttgccacgtaggaaccaagccccgtttcgggccaggaccatcgcactgccaggaatcacacacgcctcctgcagggtccacacacctccgctcgctcactagtagaaaaatgatttttttaccaacgttggttttttatttttccagacataaaaaaaccctcttataactatttgcgaaaatagctaaagagcctctagatttaaccccgcctgtgaaaatcaatttttccaggtggacgccttcctttattttcgcatatggacgtccaactagaaaaatttgatttcacaggtggaaccttacgtggttcgcctacaaaaatcatgcctgcagaaaaaatattaagtcgcatccttatcttctcctctaccatccttatcctttccaccactcatttccctccccctcccccctctctctctcttctaactgatgcgcgtcggcgactctgaggaggtccactaccagctgcgacggcaacgacgacgactgctacgatgatgatggtgccgacgcctgggtctcgctgtcggctgcgatgacgaagacgacgccgcgtggatccgccgccggccgatcttggggaggtgagggcaggcggcggcaacgacgaggtgaggcggcggcaccttggttcctccctctcccagcctggcaacgacagcgacgatgagggctagcagcggcttggcgacgaggaggggaggcagcggcggcgctccaatcctccctcccttcctcctagatctatccatcggtggcagaggcagggcggaggaggagctgatggtggtggccatcgcagacaacgtcggcccctcccctcctagatctggacggaagaggggagccgggcagcggcggcggcgaacagaggaggagagccgtcggccacaaggagaggggctgtagaggggaggccgacggcggcgctcacgggtatgggtgcggcagcatgtttttttttgttcgctgaaaatattttcgcaagcaggtggatctaccactacgaagatggagatgttgcctgcgaaaatgattttcacaggcctttgtgtacaagtggtcatttcccccgcctggaaaaactatttatggctgcctgggaaaacgattttcctagtagtggccctagcttaggaactgcgaaggtgaggtcatctccatgtggtagatccccatccatctcgtccttctccttcttctccttctttgctcttcgccagaaagagcacttgtgtcgctgggagtttgctgctcgattcatcatcctagtcgccagcctcgccgccagagccattttgatctacacaccgaccagcgccacctcagcccccgcactaggaagcatggtggtggccagcgaaggatgataagagaagggggtatggcagtggtcacctccatagcgggaagacactgcgagaagctccgctggccaatgacgcccctatctatgctgccgatgtctattccgccgccccgaccatcacttcaagctgatccgcccgaccaccgctgttggcagatccactttcgcggccctgatacatgccgtgcctccttggtcttcttggtggtgctgccaaggagagtgggggaagaggtggctccaccaagaagtggagaggtcatgccaggaaggggagaggtgctaccaggaaggggaaaggcaatactgcctggaggggaaggggagaggtggtgatgccgctcgatggagaggaggacaattagaagttagggagagtaggagaggtagaggggtgggttatcatatatgtttatgattcttagagtccatatcataaaatattggatttatttgtcattgaaaaaaaatgaggatttaaatacaaaagtatccgactgatcaaggctgaaatacaaaaataaatacatggctatggcgtgcattggatgaagaatatcacatgtgtggtttcatcctaagtggcacctcctttttttctttggctatggcttccattggtcatgccctaagtgtccgtgcatgtacatgcatgaaaacataaggaaaaagtacgaattacacctctgaactatcgaggtcgaccgaattacacccccgaactcaaaaaccagacattctacaccctcaactattgaaaccggacaaattacccccctgagcactgttttaggtggttttgggatagacttgctgatgtggcagtcctacgtggccgcacacgtggcactggccccacatgtcaacctccacctcatccaccctctcttaaaataattagtgggacccactgtcagatccccacccctccctatctctctctctcttctccctcccctccccttctctctctcaggcgtgcgtcaacgggtagtgggcggcggcagcggcatgcggacgggcggcgagcgcggcggcgggcgtggcggggagtggtgggaacggggcaggcggcgggcgtggcggggcgggcgtgatggcgccgtgcccccctgtcgcggcggagggcggcgaagtggcgagggcgacgaagtgcccccctctcacccctctctcttgggccgtcgggaggtcggcgcgcacgcccgagctcgccgttgtcatcttcaatgtcctcggcgcccgccgcccgtctcgccctccccaccgcgcccgccggtgcttgaggcggcgggaggaggggatagcggaggggaggctgtcgagacaggctgggatgccggcaagcgcccgcggaggggatgcggcgagcgcgccgagagggaggaggcgggcggcgcttctctccgccgccgcgccaaatctgagccgagcaggtgtcggggaaggggtagcggggcacggcggtcgtcgtcgggccaaaggtggtcatcgcagcaacgagtatggctgggctcatcgtactccggcgggagcggctcgaacgacgacgacggcggcgtctgggggat

SEQ ID NO: 11158 - DNA, 4608 bp, Oryza sativa
atttgcattacttgttttgtagcaggtgtccttgcagaagcaatgtttatgtgcagtggtgtttgagggctactttgctcattgtttatttgtggttgctgcaaggatgaaattgtccaataaggagcatacccaaaaaagggttgatgtttgaaaaaaaaagacaagtaaaaaaaatcagaggttattaccgcacgttgttcaaccatatcgatgttatctgatggttcctcttcatataagaattctgcaaagtcatcttggtactcgttttcatcacagtgttgtccctcaagcctcctattccccatgtttgcagtgaagtttgctaacaaaaaatcatccacataaaaaataaaaaaaaagtaacaagaaaaaacatctaacatgattgtgcaaatataaatttggctagataatctttttattctttctagacattttgattccccccctctgattgttactatttacgtctataaaataaattaattatagtacaaaaaaataattttatgtgtatagagaaaaagggtcaaagttgtacctgataaatgttgaactccatctttattgtttatgcatgttttgggtgtgtgcatgtacctctccccctgcatcacctgcatgctgctatgttcaatgtccatgatgtttgtacctgatgttgtttgggacaagaagtgcccaaggctggcacttttgtttgcttttgatttatcatcaaaatgatataagcattcaaatttgggttgctgtgtgtgagttacatgagaagaaattaaaaagttacaaatcaggatagataaaaaaaataaggtacattttttgtacattaaagtgcaacacagatataaaaaaaatgtaagtttatcagtcaatcaatgctgcaaatatttacaggattaaaataaaaaataataaaacaaatcagtaaacagtactggtagaaaaaaaagtgacaaaccaaaattttattacatgtggagtttagattttgttcttgatgtgtataagataagatgacactgtaaattaaaagatgacccaaaaaaataaaagtgatttagaaaacacctctatgcttctatgctctagtttcatctgttctctaaaatttgaactctacataggcacaacagtctatcgttttgtgtatagaggtgttttctaaaacaatgtctatccgcttctaaaaaattcatccacacatatataatatgtacaaaacaaaaatatggaccagtgtacaatgcaaaacaaacattatataaaaaaaatagaggcgtataatacacaaaaaaaagagaaagtgagaaaaaaagcagtttgttgctcacaaaacaaacactaaaaaaactaagaaatactagtgctttaaaatgcatgatatatgtttgatacatttgtgctcttgtgtggaatgttgtctgattcatcttgtgtaggatcttggctcttatgatcttctgaagagtttgaataattcacaagaatgaacttcgtcttatcctaaaaatattaaaagagcataataaaaaaagatataaattgattaaaatcgttgaaacaaaaatggaacaaaaaaaatatattaccattgtgtgacctgttatgtcttcaatatcatatggaccctctatatcgataacaaactctgtagagttgctttcaagatccttagtgggctgcaccttttttgcaaaaaaaagaaagacatatgtagtgaaaaagccaggaggaaaaagtataaatggtttgaaatttatattatgcaaacagtttttgtatataatgatatgacataaaaaagtaaatagtgtttttacctgtttccttactgctttgcgaatcttttggtcagaagaattttttttcgatgggctaattgatacaaccgacaaaggggatgctgaatgtaatctcttagctctagtcctggatgccacagagttgtttgattgctgactacaaacaaagtccttactggatgcttttttatctggaaaatgattgttttagagtgaaattatgctaaacaagacattgcttaagcgtgctaaacaaaagatacaaacataccagaaaagaaactggaaaaaaaatgaacaaaacaagataatgctatagtacaaaattgaataaaaaaaacttgcatgctgtgtttctttgcaagcgttgtccttgttgctgtttgactttgagttttcttgttcagttggttttgatggtggtgtggtttgtagttgggaacatgtaacattctctgaaaaaaagtttgtttcagaaaaaaagtattgctgtcaaaacagatattaaaagaaaaacagctaccagtaagacaacataaaaaaatggagtagatggtgtgcagtgagattatattttcagattcaaaaattttcagcttgcaaaagctatggaccgtggcatagctgaatcctggagcatattacagcttaaaaaattggtgataaaaaataaaactaatcagtgtgatccatgggtagcctactggaacaaaagaacaagatttatatgggtagcctactggaacaaaagaacaagatttatgtgaaaaagattgaatgaacaacatatagttgttcgctttgaaaaaaattaattgagcaatagactaatagggctctgtatgaacatcataatatatcttctatatttgtgaaatacaaaacatatatttgggcctggtaacttatggttctaataacattgagtactgacacagaactaggctatgcttaatcctgttccagattttaaagaaagtatacatgcccagtaaaaaaaaatgctatagtccagaatgaacattttttttggactggatatattggtgttggtggtagggaaattttgcttagcattggcacaaattatttgaatctgttgggtttgtgtgctatttgtctaaaaagaaaaatttacaaactaacagaataataacatatacctgtagggggtgctcctttgctagtgctggtgttgttgatgttagactttgttttatgctctgcagttgattttgtttgtggtgtcttgggtagttgggaacagacatcagtgttgttttggtttttttgttctaggggtggggcattaccattatgtgctacattgctggcaccctgcttgcttccccccttgctcttctcttctccactcttctcttcccttgttgtggtgctatctttttgtgtgaataggcttgcttttgacatgtagacgcaatccaaaaccttggcagctagttgtgcattttttttcatatgttgtgtcagaatgttctcttgtgaaccacttgcaagctgtggaaatgtcatcaatgagctgcatttaaaaaaaaacacaaataggagtgagtgtattggagcatgcatatacaaaactaagaaaacaatttttttaaaaaaacagagcatttggaggagcaaaagaattacccttgggttaaatgatttgctatggtattgctggagagcatcgctgcatgacatgttgctattgttgccctgttgcttaatgcagcgggcccctgaacatattgcgtcataacttaatttctccattgctttgatctgagaaaataaacaaagtatgatctaagaaaaaaaagaaacaaattgacacaataaaatttttctgttgattttacttactagtcgctttccaaaatctcctgttttgcattcatccatttttgaatactcttttatcattccgcctttccaaacagagattcttggtggtggaccaattggaatacttctaattccaaaatctttgaaatcaagatatttaatctaaggaaacaacccaaaagaaaaagaataagtcaatgtttagaaatattatgggtataaaaaatgacttaagtaataaaaaagagatgcatacagcaagtaagtgtccgcagccgccaagggtttttgatgtttgttcctttgatttactctccttttggaacttggctatgtatgtcataagccattcataaacaaactttgaccagttccactttgagctggacttgacatcaatcagaggttcgaggtattttgggctagggtgagtgtctaagttggggcaaagaaaggttgatagtgcaaccaccatgaaacaacgtaggacatcatcttctgatagtttgttcacacccttgtcgctaagcaacttagtgccaaagaaggaaattaagggttttgtgctcccataatgctgatgaaaaaaatgttttcctacatcattgtcatgcttgatcgctaaacctccatttgggataccaagtatgaagttggtggtgtttggattgattggtatggatctcccattgacaactatatctgagcagctaaagtcagtgtgactagctatccatttgacaaaagatagtagtatagcacacctttgaaagtttagaagtgaaccaaaagcagatttctcaataattgtcctttgctcgttgctgagcccttcaatcaaattggaaaagtatgtgatgtttagtctgcttcttggttttggggactctgcacttccagaatgatcttggtcatattcaagttttgtgcgctggaagaaaaaaaa

SEQ ID NO: 11159 - DNA, 10394 bp, Oryza sativa
ttgttcccacctccctccttttatcctcttcctcccatcttttgattttttttttttgctttttttcactttccaccacccccttcctccgaagaacaacatgtgttgaggaaagcacaggaagaacttacgggaaattcctttctgtcttttttttttttttgcttttcttccctttccactatccctgagttttctgctgcttccctacacaaaactttattatataaaaactcataagcaacacaacattaatctggtctatttttttcatgtggttgtaatgcaaaattactgcaaaaaaaaaactgccctcaactatagaaaatcttgtgcagagtgtttgcttttccttatgcccaactaggtgactgaatttctaaagagtgcacaactcagaaatatcttgattcgctaactgttaaaattgcacatttgttctcttgtagtcatgctttgaattatgggagctctcagttcatgcaaatgccattacattgtacagaaaaaaggatgtaatgccatttttttcatctatccaaatgtgcagggcacagaggcagaatcaaatgaagactatgggatgttattcagattatcacaggagggaggcatcacctatacaaatttaatccagcaagtctctgtctcacctaatgcaattcttcctagtgctgaggtggcagtgagtagaaaaaataaaacacatattaaatgaaatatttaactaaaactttatgtgcacagtcataactcccacactgtctttttttttttgcaaaacagggtggtcttcctctgctccaaaacacttatggcagtttcatgcagctattgcaagctcctattgaatcagaggtgtgttcccttttgtttatttgatttgtgctgtgccatcccattatttgattaaaaaacatattcatgattggtgtggatatatctaatctggttaaaaagttcaaatcaaaatagaactataaaaaagatctctttattagaattttttttcttaccactgcagagtgctctatatttgacatccaatagatttgagtatgacaataccttttggggttttgatcctcacaatggttatcaacaaaatgacctgcaaaatgcacaaacagacacctctcagatgtgcaactctttgccataaagtgtagctgtgcatcctcctatggcatctctggacatgctatatgatgaaatgcagaaatcaagcgctgatgttgataatcaagctgagatgtgcaggccaacagtacaattgaaagcatcatctgtagaagtgatttataatgaaatgcagactcaaactattgaggctgatgcctgttttgaccagcactttgagcaagcaacagaagaggatttattgtctgatcatgcaatagttacatttcagcaagttgaggaaatagaacacgataaaagtgcgcaaaatccagatcacaattttagtgaggaagatataaacatatttctggagaatgaaagtgtgtccattgttccaagaagggggccagattcttaaagtgccccttgtccctcattcaccaaggttttgcttattaaaattaaacctttgacttctacaatgggtatgcttatatgggtggtttctctacatgcaaagctagcaattaccatagcagaaaaaccgatgttgtgacaaggcacacgttcaaatgcaacaggtggcggaaaccaagtgatccaaaggagaaggacctgcctgaggttgatgaagttgagaattgtttgcaaacaaacacacaaatccattggtaaaaaagagaacagaataaagtggtttacacaaattgcaaagctgagatggtgataacattgaagaggggcttttggtacattacaaggctcaatctagagcacaatcatccactatctccaccagaagaaagaaattcctaaggtctcacaaacatatgacagaccaggagaaacttttgataagaactctgaacaaaatcaatgtgcccacaaggatgattatgtctgttttgtcatatgttaggggtggcttgtctgcagttgcttacacaaaaaaggctgtgagcaattatagagattttgttagaagagaaagtgggaaaaatgacatgatgcagtgtttggatttttttgagaagaaaagatcagaggatccattgttttatttcagattcagaactgatgagaacaatgttgtgaagagtctgttttggtccgatgggaacagcagaaaattttatgagatgtttggtgacatagttagttttgacatgacgtacaagacaaacaggtatgatttgccctttgctccatttgtagggataactagtcatggtgacaattgcctatttggttatgcattcctacaagatgaaacaagtgagacttttcagtggttattcaatacgttccttgattgtatgggtggcaaggttcctgctactattataactgatcaagacttggcaatgaagactgctattgccatagtttttccagacactgttcataggaattgcctgttccatatgttatcaaatgcaagggacaaaacaggaaggacattcaattaagaggatgaagaagtttacaaggatttccatgatattgttacaaaatctcagacagaggctgaatttgaatatttgtggaaagatttcataagaagaaacaatctgtataatgttaggtattttcagcttatgtgggtcactagaaagagatgggcaccagtttacttcaaaagcaattggtgccctttgattcagacaacagcaaggagtgaggggacaaattcaaggtactaagctgacatttgttcatctcatagtgtttctgcattcctagcacagtatgaaaggattgcagaaacaatttatgagtgcttcaaagaacaggaatcgctgactaggaatactgttctagatacttggtcagaatatcaatttgagaagcaagctacaaaattgtatactaggaagatattttgggcatttcagcgtatcttgcaaagctataccaagtatgatgtgaccgtgaaagtgcgtgattctatttttgaggtgtacaaatcagagattcatgaactacaggatttcagaaaaagaaagtacattgtggttgttgatactatatctgaagaatatgaatgtatctgttcaagatttaagaaggatggtattttgtgtgttcatgtgctcaaagtactcattcacttgaacataacaaaactacctgagaaatattttattgaaagatggaggctgaaagacaaaaaccaagaattatctgtgccaaacacattgatgtctgctactgttcttgaatgcaaccctttactcaggttcaacatcttgtcacagaaaatgattaagttggcttcagatgcatcaaaaacaaaacaaaagtttatatatgtgatgaatgaaagtgacaagattgaagatgggttgaaggcaatgagtgatacggctcctaacgaggctactgttcatgttcaggatgcggcggcgatgtcacgccctaaaaatcttaaatatataaattgttgtttaattggaatttttagaaattattttaaaagcctacaagctaaaccctaattttctaggaaaattttcaatataaaaatgagctagataaaattttattaaatactatcttgctcctctatttctagaattttctgggaattatttgagcaagggaagtatttttaataattgaaacaacatttcacaaattgtttttatttaaaaagttcaaaaatccccctcctaggccgttgggccgatttcggcccgactcctctctctccccgcgcgcggcccatgcctgcccaagccgccgctcctcctctcctcagccgccgacaggtggggcccacctgtcggggtcgtcccctacctccggccgccgccgcgcaagccgtctgagtcgccgttttgcgccgccaaatccgcccaaatccgacccggtttcttccgattgttagaggggttttgttcctctcgttctcctctttcttttcccccaagaatcaaagagaatcgttgaggatttgatccgaatcgagttcgttttgattttatccctaaaaccgagtttgatttcttcccaaatcgattcctctcgtttggagctcgatctcttcgatccaatgccatataaagcgtcccctcatcgtcctctttcgtttgccccctctcccgagttctcccgtgcctcctagcgccgccgcgacgtgctccaagtccgccgccgccgccggccgtcttcggcatcgtcgccgcgccgtctccgtcgtcgccgccgcttgccgtcgccgccgttaggtgcgccgtggtgagaggaagctcggccgcccctcctctttcgccgccgaccaccggagcccctccgtcgccgtcgacccgagccgccgcgccgcttcttctcgtcgccggccgccgtcgcgcaccgtttgttgtcgtggtgagtaccaatgggttcgcctcgttgtcctctacgcgtagatgccctccgtttccgcggccgacctctctagctccggcgagctctccaacccgagccggccgccgttgctgacgtcagcgtgacgtcatcgccagggctgacgtcatctctagggctgacgtcatcgtccccttttctttttctttttcccgattttctaatagattaaaacttcggaaaatcataactaaataaccgtagatccgttttaggtggttcaagtttctaaatttttctaaaatcaagatctacatgataaaaatatccacatatactgttcatgcttgtttttgtactgttttgttgattttgtttatttgctttagtttccgacgttccggaggagagcgtttccgttgaggaaggtttagaagcgtttgtggaagcccaaggcaagtcacacagatcccaaacaaccctttgagcatgttgatcccgtttaaagctattattttatttcaactatgcattgttttcgaatgtcatcgggtggaaaacctttcccagttaattaatggccgaagatgactttattttcctatgggttataatttgattatcatgaaccttatatattggattggtttagctaaatgctatatataggtttgcttagtcatgcttagaaacattagctaactaaaaggggttaaatataagttttattgcataattattattgttaataatggttatatttaatggtagctcacgatggtcaatcgtgcgatgttaattaattgataattaaaacctggataaggtgggttgtgagcatatggttttgatggttgtgctcatgacaattaaggaccggttcgcgagctactgttgtgaaacatttatcgtgccaaccacaagccagcgtgggcaacggctttatcttttgtatagcgtgatttgttatagtgcgccagactgagaagtggcgagaagtccacgggggtcgctggggagtccatgccttgtttttaaagggggtgattatgatccaggaaaggtgcactgtaatgggttacgttgtgcaaggggtattgtcacaattcctttccgagataccgtggtggtattgaggcacatggtgacatgatgtggggttgtgtcttgtgggtacagtggtacaactctgatcagagtttaaactattcgaatagccgtacccgcggttatgggtgagttgagcaatgttttttgttattagtctcacactactcattaatggtaattatgtggtaactaatttaattcctggtttggaggtttaatttgttcaactggggttggttgttcaaatgtggttgggcctatgcaacatgggtgtgttgtatggtgtttatttaatattgattaattattcaactgtttttactattctcttaaatatttattaaatgatgttttctgcaaatgagctatattgtgccatcctttgttatcctgtgcacttgcatatttgctgtgtggcttgttgagtatgtcatatgctcattcttgcaatattcattcatcagaagaagagtatctcagtgaaggtgatgatctggaggaataggcttgttctcggttaagatgcctgtggagtggagtcgccatagctgttccgtagtttgttttagttttgttttccgctgcgtagaatgttattttctttgagaggaactatctacctctgtaataattttaatttgtgactattcgatagttatttatttgtactctattatcaaattgtcattgtgtgcctcggttgattcctggacgagggcttaacacacatgtaagcgtttggaattttggatagaaattccgggcgtgacaggcgacaacttgtggtgtagcttctgttggtgctcaaactggtatattgatgggtcctagtggtgttggtattgatgctgagagcacaaagggtgcggttgctgaaactgaaataatagatatggttggaattgcttctacttctgttttactggatccaaaatgctctaatagcaaaggcaggcacaagagtgagccaagaaaaaagaggctgatagatgtgattagaagcaagggtttggtgacatgtagtggttgtggatcccatgaccataacattcgcacttatcccaaaaaaaagagaagccaaatgcaacagaagtgatgcaggagaggaaatctagagaactttagggacatagaactttttgggtagcaaaaaaatgactggcctatgtcttatgagtagaaacatcaagaaaaaaatggcattccacattatgtctttacccccctttttgtttgtgtgttttttggatggtgcaaatacaattacatggttggctttgcaggcataactgattattaaaaagaaaaagaattgcttgtgtgaaaaatggcgtaccgtagtttgtcttcactcccttctgttgtgtttaacgtatatctatcctccccccactccctaccccccatcccccaaaaaaacaattggacctgcacacagttgaaaggagaaaaaaagtcactcatcagatatctctcattagtaagacgatcagtatcatgtaaaacacataaaagaaaaatccaggtccttttttaatatttgggtgttatgatattggatttatcatatctagtacaggaattaagctccacataagagaacacgtagcacacaattttgctgaacatgtcctagaatttagaactcagctgtagtacatagaatacaagcaagcacaaaagtatttgtatatataagtgtatcttatatttgtgcaccaaaacaaaactgaaactgtatgttactagatagtattttttttcaataggttgaggactgagataaacccaaaaactgcatgggcttgaaaaaaaaagaaaatgtgacatctctctctctcttactacctggtagtgtgtggccccatctcatgggctatacagaaaaaacaggattgtctaatctgttggtacagaaacaaaaacatctcactgttgccttgcatattttccatgctttgttggattgaagcttctagctagcatttttgcttcttcttgtgaattgtattctgagaacaataggtcatttgcaatttgcttcctcatgtttgggatatattctggtctgatcatatctttcaagtgcatccttgggtttcaccattccatgcacttcatagcgtagattccgcaatcatgccttgatgagacaaaaacaaaaataaatcatttaagaaaaacaaaatcatggaaaaaaagggaggagttttggacaaaaaagaaaatgatatgtaatttgtggatgattgttggggttgataggtagttacccattgttttggcgagtaattggtgggtattggatatcaaatttactaaagtatttctccacatctgagaattcttcccacattgcaatgaatcctggtatctgtgtataaacaagaggagcatgaaaaaaaaccagaaaaaaaatcagtggacgcggtctttttaaattttaaaaaaaaaaaaaacaaaaattggtatggaaaaaaaagaaccaaatttgtatagctcacacatagcccttggattttcttatgaaaattgccattttcctcataaatggagttcaggaaaaaaaagtgatgccccctgaagttccccggtaaccccaacccattattgttcatccaacaatgggaaattaagttccataccataaaacccaaaggggcttccttttatgttattcccccccccaaaaaaaaggatcatttttatgtttgaaaaagaaaaatgaccaaaccaagtcatagtagtgcagaggtttcttgttctggcaaatgtaaaagcttgtcttgcgcaattttcatagtcttcctcttttccagcaccttcccaattcttcaagaaataaacctgtgaaaaaaaggtagagaattttgaagtgatacaactggagatgagaaaaaaaatgtatgtgatagaaagtatgaaaaaaacacatacactagttctatggaagaagtaaaaattcatgtattcattttcttggtaattctggtcgttggcaatcttcttggcatacgcgttgaggacatatgtatccaccactccccttggtgataaagatttagacaatgatgatcatgtgacttttacattgtccattagaactgcaattttactgtaccacaaataaagaagataaatgcttttagtaatgcttagtactcttaaggcagaaagagtacaaaacaaaaaagttcagattacttaatttcagaaaattggaatagtcagcacaagctgtttgttatgcatattatgaaaaaatgcaaaaataatttgtaatgtcatagatttttcacccttctttgcatgccttgttgtgttaaacaaaaagtgataaactttcatttggttgtcaatgcaaatttcagctgcgcctaccaattcaggatgatcatacaaaatataaaatctatgagacatatgtatcaaatctatctgttttcaagcatttctttttgttatctatggtgctttttagatgcctgctcttcttttaaaaaaaaatttaaggattggatcatttcttcttttctgaagtcttctggatgacaacttggctgacaaagtgaaaactgaaaaaactgaagtgctacttgttttcaattgaaaagaaatgcaaaataggatgtggtttgcacacgttagtaactgcatggttagattgccaaacaaaatcgcttttgaattaaggtgtagattaacgaagaacagggccaaattcatccgagaattcacattgcactattggttgattgcagaaataatgatgcgctaaatgcacccccagttcatgaactatagtcgctaatgctttgttgcttgtgaggtctgtcagaactgactgccgtcaccagtgatgcaaaaatgttcaggtgataggggtacaaatcaagcaccgacaaacaaggaacatacatgctgccattaatcgaactgctgctacaacaactacacttttactcccagtaatgtgcaagtttcaaaatatttcagaatgggcagaactgagcaatgaccacaagtatggtcaaaaagatagacaaaagtatttatccactgcctgaataactaaaacgaaaaaaataactactgtacatagccacacatagcagatgatatagcagaactgttgctgaacactggtccgctaatcccagatcagacatctatgcactaatcccagtggtacatgtaaccatccaaaatcatccaaaccctagcaaaaatttctctctgccctgtagatgcatgatgggatctcatcaaccctctgaacaaaacgaagaaaaaaaaactacaattccctgccccgtcacttgttgtctgtggctgccacttcctgcgccactccctcattccagaagcagaggcgcaagagcgccactcccccatgacacccagaatgcacttcagcggtacatgttcgactatgtgttttgaacaacgtttgtaaaaactagagaaaaacacccccctcccatttatttttaaatagaaaagcttgaaatgatcacaaaatctaaaaaaagcaaatgtaaaaatgcaaccattataatgttgttttgtgacacttactatttatattgttgcgtctcaccaatgctgagtatgttgttgtagtgattgagttcagctgccaagattgtttggtgccgtgtgtagttgtcatatggtgagctcttgtatttacttggatgtacaattcttttagggcgataaagattgtgtctggtaccagaacagttgccagaagcatttagtgagtcgatgattcttgtcattgaatattgtctttcttctggttgatcatg

SEQ ID NO: 11160 - DNA, 10496 bp, Oryza sativa
gcagggcgccattgggtcgaagggtataagcagagcaagaagggcgaaagctaagcgaaagggctcgaaaacgagagcgtacgcgcgagcgggagcaagaatgtgtatgacggaagggaaaatgacggcggtgaaaagtgaaagcgaaccacggcggggttatataacccgactacacgacggttcacctcccacccaatcccagcccgccatgtggcacccaagggtagacgaaacggtaaattcccgttgtgtagtacaaggccgagcgaaacagtacacacggcccaatactgttaaaaaaaaactctcaagatttcgttgaacataggcacatgtcgagaagacaaaccacaagctccagaaagataacaagtgttgagttttgtaggtggaagataggtttcagcaggaacatcggccgaaagggggcgcctcatgccataccatatattttgcacggtctcagccgaagctccctactcacccttgcccgtgagaggcttgttggaggcatgtcacgaggaccttcgaccggacctgccgaaaccactgaagccatagggcaaagcgcctgggcaaagccgaacggtgaagatcgaagggcgaagtgttttgggcgaagccgaacgatgaaaaccgaagggcgaagcgttttgggcgaagctgaacgacgaaaactgaagggttcgtccccaagctcaccacttggccaagtcactgctaagggcgaaggctataaggtgaagcaagaggcctttgctcgaacagaaggggccttggaggcttggactataggcttgggaggccttgcagcccatggttcctatcgccattagtgggccggcccaaggagatctcctgagggcccatgaatacaagacacactgtgtacccacactaatgtccttatcataagggcgtccatgtaaattccgctgtactaaataaaccctagagtgtatgagcctgtactaaagactataaatagccccctagggctatgtaatggggagatcccaaaaatttttaccaattaatatattgcttttactattccatcaactcactgagtgaaccacgtctttcgatgtgacgcagttatctttcgacaagagtgatggtttctgaaccgccacaaccaactcgtcagtgatgatacaccgccagtgatgttatgtgaaaaccgccagtgatgtaattttccaaaatccataaaatggacaaaaaaaatccataacaatagtttcaggttaggagaccttcccctcgcgcgtagctcccctaaccaactgcaccacacactctactgtatatattatagattttcgttctactcatatcattctcaaccgaattcaaattggttgtttgatataaagttcgtcttcatcggacatcatatgaaaaagttatgatttttttcacgcagcctgtcattcgcccagcagagataatatcagtggcagttcgtggctcaaaccggcagtgatgcacggactgtgcggttttttaaaaatggcagtgatgcactatcagtggcggtttttgaaaaagtcttaggctgtgatctttcccatgggttcccaacccatctcccttgctttccgggtatacgcttttcaaactgctaaatggtacacgttttgcaaaaagtttatataggaaagttgctttaaaaattcgtattaatccatttttcaagttttttaatagctaatacttaactaatcacatgttaatctatcgctccgttttcgtgcggaggggaggagttcccaagtcccaaccccttcaaaagaacacagccttagtcgttgcgaggtgctcgcattttctcttcgacatagcattacattgtcaagaagcactgctcgcccaagcaattcaattcgttagatgttgcttccagttgaatcatgcatgaagtatccatgcgtaaccaacgttattctaggcggtagagaataaatattagatgaccttttgtttacttgttttttctgacaagagaacatgtcaaacatcggttaccatgttagtatgcatgataatttcaaaaaacagcaatctagctcaccctggtcaaaatatatgctttatagaagattaaacctgtcatgtgcggaggcaggtggatggatccatcagagttaattaaagagactaagcaataccataattgaaagtccaaataaaaggataactccaaaaaaaaaaaatgatagaggaaccattgagctcgctcacatcaaaatatatgctttctcacaaggtcaagccaatcttgtgacgaagcaaatgggtagatcgatcagagttagctaaaaaataaccagccaagatcataatagaaaagcatgacttaacagaggacaaccatttattatcatatacttagcttgtcagtttccttcaatcgagatgtcaattatgtttacacctatgtgacaggttggttcacatgcgtaatactctctcgtctatataaaatataaagcatggttatactaatttgaaatgcaaatttaatgcaacttcttttaaatttcaatattaatgtacatgattagttgaagtcaactcgctaggatcgacgccatgtagtattattttagacctatgattgtcttgcagtaagatagtgtagaagtcttggtcattgcgagctgctcgctttttgtcattgatgtagcattacattgtttagtcaagaagtactgctgctcgctcgagtcattcaattcgttagacgttgcttctgattgaatcatgcatgaagtacctatctgtaaccaatgttattctagatggtagacaataaatattggatcaccgtttgtttacttgttatacttgacaaatagacacagaacgtgacaaacatcggataccatgtccagtatgcatgataatttaaaaaaagaacaatctagctcatcaccccggtcaaaatatatgctttaatttcttacaagattaatcctatcttgtgaggaggcaggtggatcgatccatcggagttaattaaaaagactaaggaagaccataatagagaatccaaataaaaggatacacattgaccgtaactatcaagtgcaattaaaagtacaacttaacagaccacaatcatgtgtccttccagtcaagatgatattattgagatagtgatcgagtagtggtgcattaagatattattggatcggatgcaaatctgttctacgatgaatttaagaatacactctgcctccaactatatataagaatatatttattaaatgtgcaacatatattaattaaatgcccaagttaacaactacgacccttcctgttgaatcatccgtttgtttacttgttatatactccctccgtcctaaaaaagacaaaccctggtttccgtgtccaacgtttgaccgtccgtcttatttgaaaaaataaaaaaaattaaaaatataaatcgcgcataaagtattaatcatgttttatcatctaacaacaataaaaatactaattataaaaaaatttatataagacggacatttaaacgttggcacggaaacacagggtttgccttttttttgggacggagggagtacacaataaatattagatcaccatttgtttacttcttacacctgacaaatagacagagaacatgccagacatcggataccatgtcagtataaatgataatttcaaaaaagaacaatttgcatggctcaccccggtcaaaatatatgctttcttacatgtttaagcctatcatgtgggggaggcaggtggatggatccatgagagttaattaaagagactaagcaagaccataattgaaaatccaaataaaagaatatgttgagcccaactatcatgtgccctatattaattaaaagcccaagctaacatactacaatgatgtgtcattccagtcaagatgatcaaaagtcagggtcatgtaggagtggcgcgtaaaggtattatgggatataaaacacttctatgatgtatataagaatatactctgcccctaacttgaataatatcactacgccagatcctcacacatttgacgacatatctgtgacatgcataaggtgttggtcaacaatgagggtcacctttgatgggttctacaggatgccgtcatcggtgagccatccggctacggtccgtcacaggcatctagtcacctgtgacgggtcaagaatggaaccaacgggccatacagatccagctcgtcaaagatgttatgaaaccatctctagtgggtccctttttttccgtcacaggtggaatctatccaacccaatccttatctatcacccaccgacagcctgagaccacccatatctcgtttttttctttcttccttgtccatccctctctctcaatcgtttttctttctttcttccttagcatcgagcgtccacgcgccgagcaccgggtccggtggcggcctctgactccatgcgtgagtagcggccaccgccggccaccggatctggcctatggggcgcggatccggccaccacagcctcttcccccaccgccggccgcttcctcctccgcctcctgaccgccagctgacgctgcctcccccgccttccgaccgccggccgccggatctggcctacagggcgcggtttcggccaccgcggcctctccccccaccgtcggccacttcctcctccgcctcccgaccgccggccgccgccgccttgcccgcctaacgaccgccggcctcgacacgtttggggaacgcggatccggcgcctatcccccgaccgcctgtcgcctcctcctccgccaccccaccgccgcctgccagatccgacgacagctgcaccgccaaccgtcggattcggcggcctctacccccgactgccggcgtcatccaccgtctccttcttcacccgctagcgccgccgccattttcaactcttgtaggttgtgcaaattttcattgccaaatttcagattgggttatactcacggttgcttgtgtggatttgtagttgcttgtgtggatttgtagtttattactcaaagttggtgtggatttgttatgtatattacttgtgtggatgtgcttcatgtgtcaacatatctgtcaatgaaatgcaaagttattctgtcatgatatcttaagatgttcttcatgtcatgagatatggcgtgtgggttgagagctgagagctagaggctgagagcttttgaattttttttggttgatttttcacacctgtgacaggtggtgagttgaacctgtcagaggtgtttgtcacctttgatgggctaaaaagatccactcaggtgttttattcagtctgtcagaggtgtcaatcattattgatgggctttcacccgtttgagatgatgtgtagtcatcagtgaccactaatctgtagccaagaccaaatccgtcaaaggtgagggttagagcccgtgacagataacgggatccggcctagtgtatattaattaaatgttgtatatatgttaattaaatgctcgagttaacagactaccaccatttattagcatataaaagcttgttggtgtcgttctagtcaagacgatagcggagcagtggcgcacgtacaaatgaattatcagatgtaaaaccctctccattggcaaatttaagaacacactctgcatttgactttaaggataaaaatggtacatttttgtcaccacgctcatgccctaaataccaataggcagagaacatgccaaacatatgttaccttagcagtgtacacgattaatccaaattaaaaaaacaactttggtagagcaaccattgagtttgctcccgtgtcgaaatatatatgatttctcacaaaatcaagccaatcttgtcacggggcaagtggatggatccatcatccatcagaattaactaaaattcactaggcaagactataatagacaagcacgacttaacagacgatgaccatttattaccatatattagcttgtcagtgtccttcaattgagatgtcacgtgacaggttcgctcgctagcgttatagatcctctgtaaaatttttttttcgagcccctcctctataaaatatgaagcaaggttataataatttgaaatacaaatttaatctaattgcttttgtactaaattttttttggcagagatagataaccaatatgggacagatggagtaattaagaagatatagcaagatcacatggtaaaatgggctgtatttttgaggactcgaggttgcagtgaccttatcaattataactagcaattattaaacaggaaacgtactttgattacttgaagtcatctcactgggatatacgccatgcagtattattgttttagacctacacagcttgtctttcaataagatagtgtagaagtcttggtcatctcactgggatttcgctgatggctgggctgctcgatttttctctttgatgtagcattacattgtttagtcaagaaggacagctttcccgaatcattcaattcattagacgttgcttccaataatgcatgtaaccaatgctattctaaatggtagacaataaataatagatcacattttgtttacttgttgcagtcaaaaagatagagagaacgtgccaaacatagggtaccatgtcagtatatacatgataatttcaaaaaaacaatatgatcattgatcaaacaacaatctagctcgctcccgtcaaaatatatgcttccttacaagattaagttgtgaggaggcaggcggatggatccatcagaattaattaaaaagactaagcaagaccacaacagaacagtgtttttcagccgctttaatccagccagaacagtgtttttatctcacaacaaatcagccagaacaacagttatcatttgaaaccatagttataagggcatccacaatgtgaccaaaaagcagtccttataactctatatgggtacctttaccattgtgggaggtggcattaggaagagctatatgataagctacccatagctataaagaccacctatatagattaaaatatactatctctctccttttgcttctttcatgagagaactatagcatttggaagtaatttttttagagtgtgggtcccatcttaatgtcaattactatctatatacattgtggaaatataaataacaaaaaaaccacttatgtgggtcccacctatatagactacttggtccatatacattggtgatgccctaacaacatacaagagacttatcatatggaagcctgtcattattgttctggtcaggatatcaaatgttacatctaatatcatgtgagtgtgaccagttcaataatcttcaatcactagtttgatagtcggtccaccatagaaatagaattaggcgtgatttaatttaatgcatctggatcttcaatcggatggtttccaggtttcacaatagtagcaattgctaagttccctacaaaagtattaaacagatggaagtttggatggaaggtacccggcctggtacaagctagatatacctagaggctagagcctatctatcggtatataaaagggagtatgcctacccatttacaccatgactgaagagcagaaggtgtctagctagttgcctagttagcaccgtgttgtactgttgttccactcactcgctcgtgcgcatactcctgctccatcttagcagtcaggttcaggatggcgttcaacgacgatgagaagcctgctactactccaattccgaatggaggtatcgtcttaattccatcagccttccattgatgcattacatactggaatacataccgtttgccgcaatttcgaaatgatcctgcattgaggcggattcaatacatgtatatatgatgtgcagggagcaaacagggcctcgtgacgatgaacatcccgacgtacagcaagaaagatgtggctctgacggcggactcagtgacggctgtggtggagatcaaggcgacgtcctccaccgccgtgagggagggcctggacctggtggccgtggtggacgtgagcggcagcatgcgagggcacaagatcgagagcgtcaagaaggccctgcagttcgtgatcatgaagcttacccccgtggaccgcctctccatcgtcaccttcgaaagcagcgccaagagactcaccaagcttcgtgccatgacccaggacttccggggcgagctcgacggaatcgtcaaatccctcattgccaacggtggcaccgacatcaaggccggccttgacttggggctggctgtcctcgccgaccgcgtgttcacggaatcccgcaccgccaacatcttcctcatgtccgacggcaagctcgagggtaagacctccggtgacccgacgcaagtcaaccccggcgaggtctccgtctacacctttggtttcggccatggcacagaccaccaggtatgtatgtacaattgctagttgctacttgctactccagttgctagctattgctaaccatcctcctgccttgtaattggacgaatggtattgccattggtagctgctcacggacatcgccaagaattcccccggcggaacgtacagcacggtgcccgacgggacgaacctgagcgcgcccttcgcgacgctgctgggtggcctcgtcaccgtggtggcgcaggacgtgcggctgacgctcacccccaagacggccgacggcgacctggacaagatggaggtggccgacggaacggactacacgcagaccaccgacgccaaaggcgagatcaccatcaaattcggcacccttttcagcggggagacacgcaaggtcgccgtcaacttcaccctcaacgaaagccccgacaccgaggagtacaacgcgaccttagcggtggcgaggcacagctacgccgcccaggaggcgccgcagcctgcccagaacatcgtgcggctgcgcaaaccggagccgaccactcccggcagcgacgacggcatcgaggagcggtccgtgcaggccgaggtggtgcgccggaggcacgccgacctgatcggcaaggccagcgagctggcgaatggccagaagctgggcgacgcgcgggaaacgatcatggacgcccagaacgcgctgggggacatcctcctggacgacggcgacaggatggtgaacgcgctccaagccgagctgctgcggctgctggaatacatggagacgcaggcgctctacgacaagctgggccacccctacgcgctcgccaccatcatctcccatcgccgccagcgcgccgctggaaggggcgacgaggaggtcatctccctctacgtcacgccgcgcatgatcgcctacctcgctcaggccaagaagttcgaggagaacccggaagcgccggtgcccagcgctgacgaggatgtcaagcaggagatggctgccaacccactcgccgctatctccgccccgctcggcttctacctggagaacgccatccaggcactgcaggccatccagaagatcatcgccgccaacacaatttgatattatatattgccttgcccgtccaattcgaatttactatcccagtcccagacgcgcatgtgctaagttacgttgttcttcatctctttcaatttcctttctcgcttctgatcatactacttatatgtatgtaaccgatccaataagtgcgccggcccctaagatgtaatcaatctatatatgtaccactgtaatgtaatgcaagaccctttttagagcaactacaatagcacatttaaattcagatttgctcctttgcagacgattgatattttgttattccatcagtcacatgtcttggtgcaaagttttgagcatattagtatgaagttttataatgtgatagttcaaagttttttagcagtgcctgatattttgttttcatatcggtcaactgtcttggtgcaaagttttgagcctattataaagttttataatgtgatagtttaaagttttttaacttaccagtacaaagtttgtattgacatagttcaaagttttatatttttgagtccaaagttttgaacctagcggtacaaaatttttattgtttgagtgatggttaaacaaactttggggctgcctattctgcagtcgattgcaattttttcatttgatcagtcaactttgtgcactattagatatgtatctaacggtaaagctcaaaaaatcaacacgtgacgtgcaaaaacaatcacaacctgatgcagatgtttgggcccaaaagctaacaaaaagcccaaagcccaaagttgtttaaaacacacttttgggtccaaaaaactaacaaaaagcccaatgtttgggccccagttttttgggctgtgttatgggccagcgaaagtgtgggcccgagtctttttttgggctgtagttcagtgagtctggattttcagatttttagctgtgatttgggcttttttcaacaaaacaaatgggctctcacatgatacccgtttttgggctttttagctccgatttgggttctgtcacaaaaatggtc

SEQ ID NO: 11161 - DNA, 12629 bp, Oryza sativa
gccgcggcctcacgctgtcgtcctcaagatgctgccggccggcgccacgacggcccgcctttccgcgatggacgccggcgcccacctctcccccatcccctccacctcgctgcgcgccgccattcgcgccgaccgccggcctgcccccgcgcgccgctgcccatcgcatcccctcaccggcgctcgcctctctgccatggcgtgtcgccgtgcgcggcgctgcctgctgctggccgacgaagagagagaaagagtgtatgacatgtgggtcccaccattttaaaaaaaataaaatgctgactggactgccacatcagcaagtctatcccaaaaccacctaaaacagtgctcagtggggtaatttgcccggtttcaatagttgagggtgtagaatgtttggtttttgagttcgggggtgtaattcggtcgacctcgatagttcaggggtgtaattcgtactttttccaaaacataatagcaacactttaaacatgttttctcgtaaattatactccctccgttttttaatagatgacgccgttggctttctctcacatgtttgaccatttgtcttattcaaaaattttatgcaaatatataagatataaattacacttaaagtactatgaatgataaaacaactcataacaaaataaattataattacgtaattttttttgaataagacgaacatgtgagaaaaagtcaatggcgttatctattaaaaaacggagatagtatatcatatctatgatctgatcacataattgtatctgttacaatatatctttataacaaggtctattatatttcgatgaaagtattttgaaagttttttcagtgcattggattatttagtgttgcacatagtgttatttatatgtttcattaagtattgttttatgttttactaattcatttgttaatgttgtacacaatatttttttggatgtttcactcattattttatgatgtttcacaaaaccataacttgatgttttatgtgtgacataaaaatgtttcaattaagttaaatattttatttttgtttcactcattggaattaattaatgttttatgtagtggtttttagcgctgtagtcagtattttttcagtgttgtatctcactgaaacatttcatggagtgagtcaaaatattttttttatatgggatgaaacaaggctagatttttaatatacgtatttttttatcaaaatataactgtatttgatcttgttataaagattaattgtaatgaatacaacaatatagtcgaattattgatcggataattaatttagtgagtaaaatcatttaaagtttgataaaaaaagtattagtatgatgaggagagagtagtcgaggagaacatacacgtaggagcttgtggtcctgtacaagcagctaggaaaaatggtactcctacatgaagtccgatacatatttgcttccacaataatctaatgaagtcttcaggcctgctgctgcacagcacaagtgcagaactaaccagccagcaccgcctctataaatacatacatgttgccactcgcacaattgcactgcagactgcagtgcacatctgcacacgttctcgccaatcgccgggcggccatggcgatgaacttcgagatgtggggcgcggtgtggtctgcgctggcgagcctcgtcttcctctggcccatgctgcagaaccacgtccccgccggcctccgccactggctcaccgccatggccgacaagctcgcctcccacctcagcccctacctgcacatcaccatctccgagtacggtgaccaccgcttccgccgcagcgacttcttcctcgccgtcgaggcctacctcagccacgcctgcgcccgccgcgcccgcaggctcaaggccgacctcggcagggacgccaggagcgtccaggtctccgtcgacgaccaccaggaggtcaccgactccttccgcggcgccacgctctggtggtacccttcctccatgtccaacaagtccagcgtcatcagcttctaccccggcgaggatgagcgccgcctctaccgcctcgtcttccaccgccgccaccgcgacctcgtcctcgacggctacctcccccacgtcctcgccgagggccgcgccgtcaccgtccgcaaccgccagcgccgcctcttcaccaacaacgccagcaccagctggaacccctaccgccgcgggaagggcgtctggagccacgtgcccttcgagcacccggccagcttcgacacgctcgccatggaccccggcgacaaggacgccatcgtcgtcgacctcgtggcgttccgcgacggcaaggactactacgccaaggtgggcaagccatggaagcgcggatatctgctctacggcccgcccggcaccggcaagtccaccatgatcgccgccatggccaacttcctcgactacgacgtctatgacctcgagctcacggccgtcaagaacaacaccgagctgcgcaagctctacatcgagaccaccggcaagtccatcatcgtcatcgaggacatcgactgctccatcgacctcaccggcaagcgcaagaagtcctccggcgacaacaaggcgtccgacggcggcggcgagggcagcgacgacaaacccaagctgccgaccgaggcggacaaggacgacggcggcagcaaggtgacgctgtcggggctgctcaacttcatcgacgggctgtggtcggcgtgcggcggcgagcggatcatcatcttcacgacgaaccacaaggagaagctggacccggcgctgatccggcgggggaggatggacgtccacatcgagatgtcctactgcggcttcgaggcgttcaaagtgctggccagcaactacctcggcgtggagcagcacgagctgctaggcgacatacggcggctgctcgaggaggccgacatgtcgccggcggacgtcgccgagaacctgatgcccatgtccaagaggaagaagagggaccctgacgcgtgcctggcaggtctagtcgaggcgctgaacatggccaaggaggaagcacaagcaaacaagccggcgaaagaggacgaggaggcaaaggcagcgaaagggatagaagagatgaaaaccaaagagcaggcaacgaccaacggtgaagacgaagggaaggacaaaaggacatcggaagagaacaaggccaacggcgacatatagatattactagcaaggtgacaactaaggataagtatttttctacacctaggtgttatggcacccatcatttactagcgactcagatagttattgaaaaaaaattgtaacattaattgtgatgatataagtttaaacacaaacatgcaagactatctacaactagagaaacaaaattaacaaaattagatagttaattgtacccgtacatcgcagataaaatttgttatttttattttttcatgtgtagatcgaatttagacttacatatttgtatagtgtcttatattatcatagtctatcttattaaattttatgaaatttttatataactgttaaactatatgcatacattaggtgtggaaaatacttttcgaacaagctgaacgcaaaatactacagtacgttctcaactaaagctcgtccctcgtttactattcctacagtagtgcaggtcaattctgtgtgcttactggttgtttgattacgattctctgttctttttcagtgggatcatatcgggcagctgcagatccctggagttgcaagccatgtatcctagcagagtgctcatgaagattttcaacctttatttttacataacagtttgctaatagggcctgcgaaattgttagcatttccgtattatattaaggctgatagttgcttgtattttgtaagaatataataatgctatgcacgccttcaagcaaagagattggaggtaatctggccgggactagtgcctagatttcagacgccaaatcaaacggttttcatcgctggccttagagcaagtttaatagtatagcccattactagctctaaatcatctatagtcaatataatagctaattcatacaatagttgattactatactattaatacctggtcccacctgtcatacacacattacgtcttggagtccgtgctgcagctgactacagatctgtagcctgctgctccactacgccggaccaggccatctctgacgggcccaaacgtaactttgttgatctctgacgggcccaaacgtaattttgttgatctctgacgggctaaacataactttgttagtcatctctgtagcccgctgctccacattacgttttggttgcttgatctaaggtcgtttgaaaattttgaattttcattgtgagcaattcaaacgtaactttgttggatagatgatttcaaaagaaaaagttatcgactacaaaattttttaactttttgagatcaacaactatcatttttcccatttctccgtcggaggtcatttgaaaatatgaatttcaaacgcaattttccttgaatagatgagccaaatgaaaaggctgtcatctacaattgtacaacttttcgagatttacaactttcgtttttgtcgcttcttcatctgacatcatttgaaaattttgaatttctaatatgttcaattcaaacctgattttgttggattgatgctttcaaataaaaaagttgtcaattaactacaaaattttctaacctttcaagatcgacaccttttgtctttggtcatttctacatttgaggtcttttgaaaaatttgaatttcaaatgttgggaaatttcaaatgcaaacttccttggatagatgagccaaattaaaatgttgttaactacaaagttgtatgactttttaagatctacagcttttgttttgttcattttctttatccaaggtcatttgaaaattttgaacctcaaatatgagaaattcaaaggtaattcgttggatagattatttgaaagaaaaatttatcaacttgcgttttgggtttttttttccattcaaggtcatttgagaaatttgaatttcaaatatgagcaattcaatggtaattaaattggataaatgatttgaaataaaaattatcaactacaaggttttataacttatcaaaatctttaacttgcgatttggtcggtttcatcatccgaggttgtttgaggaatttgaatttcaaatgtgagaaagttcaaacatacttttccttggatagatgtttccaaatgaaaacattttcaactacaaagtttgacaactttgaatatctgcaacttttgttttgatcgtttcttcatctgcatttgaaaattttgaatttcaaatacgagtaattcaaacataacttctttggatagatgatttcaaatgaaaaagttttgaactataaagtagcataacttttcgacatctacaacttcgattttggttgtttctccatccaaggtccctaccactacacactcaattgtgaccatggagcatttggattcctttggtttaactttgtcgaaaagttgtcaactataaaggtgtagatctcatcgaggatataactatattggtcgagttgtgttttaactatgttgggcctaaataaatttgaactgggacgaaattggaagcctccgagcatctcccaaagtattctaaattctcttcctaaaaatatgggggttttaaaggccccaaaagatagagagaaattaaattgcctatcttccaaaggttcccatattccacttccataaagatccaacttttggattttttttggggcactatttcggagagcgctacgggtcggacgtccgatatttcactatatatcggacgcccagccaaccactaagcgcatgctactgcgcttctttgctcctcgatcacgggcttatggctgtgtgttggatggctcttttcatgtctagatggcagcatatcacttcttgccgctacatgcatgttatggctgcatgtctactctttaaacaaatcataacgtgtcttctccttttttttctctcatatatctactctttaaacaaactttaatcttaaaatgcaaatccaatttttattcaattacgccataaaatatatgtgtctcaaaaaatcaattgtttttatcatttatagaaaattgtttcaccatttgtgcctatgtttcaattcatctcatgtgatgtttcagagaattgcaacatatgaaaaatactagttgcaacaatcataaccactagatgaaacactaaataccatcatgtgaaacataaaaaaaacatacattatatttgcaatttaaatacttgattttattaaaaaaaattaaaccacacatgaagcatagttgttattgttgaaaaaaatcattcaaaagaacaccacttgtgcaacattttcaaataacatagtggaacattaggaaatactcattggaacatccaaataatattaggtgcaacactaagaaaatcagtagctgaaaaataagttttgataaagttgtggggtcttgttattaagatttaatcgtaacaaatatattggtgtaattagatcatggattggacaaatagtttaactagaaaaatcatttgaagctaatgatttctttttcttccctttcacacagtgtgccaggttaacacctgggctggcagagcactagagttgtatgggccacgagcgtccgatgccatccgacgtacgacaggaagcatttccgcactatttctttttcatgcgaggtccatctgcttgcgctggactcttcgcgccgccgctcggaaacgacgacggggcgttcgtttgcccgggcatctatttggactgccgtccaggtacagaacgctgaaattctgtgtgcttgatgccatacaatgtgtgcttctgtaggtctgttaggctgaaattctgttggccatacatcatgagatttacggctcaggttgtgtacgtttatatgtgtatttgtaaagtatttctgggattatttttctaaaggaaaatgaccatagataaagcaaaggcacatgcgcacagcactttcgttgtttggagatgtgacgtcatcaagctaacaaggagcacgaatcggccctcttggcgttgcgtgcgagcgtgtgcgatagccgaggccgctgctcaccggagtcgccgccgcctgtgccgaggtcgaggacgctgatgctgccgcacccgctacccgccgaggtcgctgctcgccggcgcgagggcgtcgcctctcccgctactcgacaaggccgaggtcgctactcgccgaggccactgcttgccgccggtgcggaggccagcgcctctcccactgctcgacgaggccgaggtctctgctcgccggcgggagccacctcagccatcgttagccgctccggcgtcgctcccgtcgggattgcgtgtgtgcgggcacagagctggcctgcggggctcgcggtcgcggccggcgtcgcgcagcagcgcgcctggtgtgcggagatgggacaaaagcggcgacgaccggtcggagtggaggatgcaggcgccagcagagcacgcagcagagcaatcagcgcctgtaggcgtatacgtacgtaataaccgcaaacagggtaagaactgaatttcttcaaggaaacggaaacggaaaacgtacagataccaaaccgagccgcaacgaaacggagacggagagcttattgatggctggagcgctggagcatgatgcagacacccaagtgaattgcctgtgttagcgaaaaccaacgattgaacacctttcgtgcgttctgcaccaatccggcaagacaacgacgaagcacagtgaagaacaaagacgatattcagagaagaagaaacagaggaaagcagaggagtttcagaactttgcagtttgcacgagaaggaaatgcgtgtggaattttctgtagatttcattcaactgaataaagaaacttacaaatggaaatttagctattctgctacttatactccataaacagaaaaaggaatcctaggctcaaatcgcgccatcccacgatccggaactcctggattcaacgccgtgcaaaactcacgcccacaacgcacgacctgacgcggtcgccaactcctgcagctcgccacatctctcgtgcacgcataacaaactcaaaactgacttattcatccagccgttgcaaaagccacagtctggaacaccttggggccacagctgaagtaacaacgtcaatagcctgatcatcagcttccttcagcagcaccgcttttggatggtgaggtgtccggtcatgtgccaaccctctttctcgccggcttcgccgcgcgcgtacgggcaccacggcgtgaagttgggcaggctctccagcatcttccacttggcgttggggtcctcctcgtcgtcggcaatgccggtccatgtcggcgtggagtactcgtagcggctgtgcgtgatgcggtggaactcctggatgtccctgttcttggccatgtccgtggtgtcacgcaggttgacggagaagatgtctccgtagggcctgaccgagtgcgtgaagtggggcatggagatggggtcggcggagaccgcggcgaggtcggcggcgaagacgatgctcttcatgtccgggctgaacacggggtggttgatgtgcccggcgatagtgggcgcgctgtggatcacccgcacgggcaccggcacctcgcccttcttgatgtctttggcgttcaccaggtacacggcgaagtagcctgggtccaagccgtggtccttctccggctcgtccttgcccttgactatgtctttctcgggcctgccggtggaggagaagacgatccagtcgcagccctcccgcggcgaccagctgcagtgggtgtcggtccaggggccgtcggtgagcgggaccacaccggcggcctcccccttctccgcgtctatgatgtagaggttcttgtgctgcctctcccctccggccaccctgttcctgcttgaccggaacacgagcttggtgccctcagcgttggtggacgggaacgcgcagttgtactcctcgtcggtgagcgggaacgtctccatgttctcgtagtcctcccgggacacgttggggatcctcatgatctgcaccggcttgtcgatcgagaaggccggcccctcgcagacgtagagcgtgtccaggtcgtcgttctggttccacgacgtggagaagacgctcttggtggccctcaccttgtacaccacgcggaggcccctgccgtcggcgagccacacggccttgaactgttgtccacgaacgccagcttcttgccgttcttggagacggacgggaacacgccggtcaccctgaagagccccacgtcggcgtgcgactccgggggctgcaccttgtcgaacctcctctggatgcttgtcgtcggagtactcttttggttttggaccttgagtagcttgtcggttcgacagcggtggtagcccacgcgtgttcctccgtcgagcacgaaggggttgtagtggtccccttcaggcctcgtcttctgggtgatgggcaccgacgtcttggaggccgtgtcgaagatctcgatgtgcctgtactgcgtcaccacgcgctccaccttcatgaggacctgcttggacttctcgcggacggtcgccacggccacctgggtctcgctgatggccgccggagtcatggcatcgatgctctcatccgtcacgcgttcctccttgccagcggcgatgtcgaaccggaagacgccccacctggcggtgttggagggcggcgtggtgtcgaagcctcggtggaagaagatcacgttgtcgctgccccacgtcggccagccgccgtccttgatgagcaccttgcggtcgctgcggccctgcgctcgtttgtccacgttcatgaccacaatgtccgtcttgaggttctcgatctcgccgttccacctgttctgctggaagttggccaccgccaccatcttcccggacggcgacaccgccgggctcagatcgtactggcccagcggcgtcaggcgctcggtcttgccgtcggcgaggtcggttctgtacaccacggtccacggggtgcgccgtgctttcaccggcgccttggtggacacgtacaccagggagtggccgacggtggtacgcccaactttgaagccgccagcgacgcagccgctgtcctccatgcgcactccgccgaaggtgtcggcaccgtagatgttgcccaggctcagcaccttgacctgcttgccgccggcgacgaagcgcaaagccacgtgcagcgtctccaggcccctgtccctctcggagacgaacaccaggccggtgacgcggcctttctccgcgtcctccggggtggcgccgcactccgacgccagcttcgggttcttcttgcccaagaacgtcaggagctctttgagcgccgctgctgggatgggctgcccgttctggttgtatgactccccgtcggtgaggagcagctcgtccttggcagactgcggcggcggattagcggggcaggagaagatatccaggggcaccggtggcctgtaggtgccgaagaaagcgatgctgccgcggctcttccccattccgatctgtccaaagaaagaacaaagagatgttcttcacttaatgatctgtcggtttgtgtttgtgtggttagatgatgagcttggatgcctcatttatagagtagctgttgattgatcacctggctttcaaagcatgtgtcttgactaatctctgtatatcgaaatccgcgcagattagtgtgcaattgtagtgaggcaaaaatgagcggttcgtgcatatgctcttcccgtgaagggctaaaatgtaaaatataaactttggttctctaaactttaggtgtataaactttaggtgtatagaagtactatatataaaaatatttaaattcaaattcaaatttgaatcggatatataaacttttgacttgtaaactttgggtctttaaactttaggtgtataaactttagatatgtaaacttgaggtgcacaaattttaggtgtatatatttactaaaataggaaagtaatgtggtgccaaaaaaggaaaccacgtggagggggtgattgatgtggggagggggaccgatcgtgcccggcgatcgatcgccccttacaactaatcggcctctcgtcctctcctgaagggtaagggttgaccacttgaccccatgtctcttccccttccaacgatcctttctcgatgcctcccgataatggcgctggcatctaaaaatcatgaaccgtcggatggagcagtcgactttattatagccgtacactactacaaatagtagtatcaaataggtgtgccactataggtgccagaagtgataaaaccggcaactatagtgctcttcccaccctcaaaagaataaaaaaaattaaaaccgacacctttaaacgaagataggtgtcggttttagagaaaaaccaacacctatattataggtgtcggtttttttacacctataaaatcgagcctagccagctgggggagatatttttcctcccggtggggcccacacccacactggcaggagataaggtcaagccttctctcggcttctcccctagctcctcaatttcctctctctctctccacttctccccttctctcggcttctcctctcctctctctctctctctctttgcggcagcggcggcctcccctccgctttatcggggggaagggaggtgcagcggcggcccggacctcccctccgccagatcggggagagagaggcactagtaaaggaatgatttttctagacgccggccccgatagattccagacgggctataagtggctccgtttagaaaaaccgaatgaccggcgttgggctgtcacccgcacgggaatatacattttcctgtgcgggcgtcttaacccgaccgcacagaataatcatcattatcccatgcggatgcggttgacttaagaggaccgcactgtcgacggtggatacccgtagaccggatatagagggtattggggtacgttggtacgaggatctacgtagtacgacatcaagcaaacaaaagacaaggattatactggttcaggccccttggtaggtaatagccctaatccagttggtatgggattatatgatggagaccatagtcgagttggttcgactagatcacccgatgacttggctcctgtaggctccggcttcgtaggctgtggtggatgtgttggcggtgagattcgatgccttaggtcttgctcagggggtcccttttataccacgggttagttgatctccaagtaggactcggagatattggacccctcacgatatggtaaagacctagtcttatccgagtaggactcctcccatctgtggattctgtttctatcacgtgatagatttccttacgtataaaggaactatccgtatacgcgcagggtataccgtatcggcatacaacgtacatccaaggatagagggtataccttatccgtaaccctgacacacatggaaaaatcgattttcgcgtgcgggctttttaagtggaccgcacgaaaaaatacctctccctcttttccctctcaccacttcaaaattttcacatcctctctcttcttttccccttttttattct

SEQ ID NO: 11162 - DNA, 6578 bp, Oryza sativa
caaagggttaggtaacccatattgtttccggtgttacactaaagggcatacaatgcaagaatgttcttccaagttatactgtgaaatttgtgaaagtaaggatcatgttgctactcgttgcccgatatttaggtcaactaataaacctattgctcagttatgtggctatgctgcagatggtcttggttttttccatattccactttcagctggacagaggattaggcatgatccaaaggctgttttggttaaagtgactaacggtcagatgacaataaatgctgtcatatctgagctacatagattaatccctggtaagtgggagtgggtggttcatgacaatggagatggtacttttcgcactatctttccttctgcagctaaattgagtcgcatggtggagtggggcaaggtacacactaaggttagtgaggctcagatggagattgtagaatggggtgtaggaaatgaggtgaaatatgtggttccgaaggtgtgggtacagtgcaaaggccttccttctgaattgagggagtttttaattatttgggctgttggttccattcttggcattactaaagccgtggatatggttttcactagaaggtatgacatcgctcgtctgcaggttttggtccttgacccatctttgattccggatgtagtggatgtggttattggggatcacctgtatgagctaacctttagagttgaacctgaaaatgggcctgaggagcctatgcccatggagatggaaaatttggaggatggagatgtggagaagaatgatgaggggaatataaatcagaaagttgggaaggaagctggtcttgatgattcaggaaacggttctaagttgggttctggtgttcagtttagtgagaggggttgcccacctgctccttcctcacagctaaatctgatacatgaatatgatggcttgactgcttctgatgaagattttgatggctttgttgaagatactttaatggttgacaaggttcagactcagcaaaatttggtggcaaaactctctgctatccctgaggcagtactctctccatcaaggaagagtaagagaagagcaagtgacagtgatcagcttgttcttgaaagggcggagaagttgaaggctgataagaacttggagaatctgcatactaaaggtatttatttaataatgtttcttttactgaattttcaaataatcaaatttctgcttatttggatagtcttggtgttatacctacttctgaaaatgttgttttagatgatgtaattaatgatttgaaatgtgtggagagtaagagattaagtgaatatgattgttctgctattaatcaggtttctacccctaatgttgatactgagtcattagatgactagttggaggacaattttctactacaacatctatgtagtgaaattatggaggaggtcatggatttcagtgaggactgtgagaacaatcttacaaatactttaaatcccttggcatctccctctaactctaagaataagagtaaaaaggggaagaagaagaagaaaatttaaaacaatttaaatgaagggaatcttttggaattgtgatgggttcaaggacccgaaaaaacacaagtttatttctgacttaaccaaggaacatcaacttgactttatagctttgtctgagacggttaaaaaagagtttactccggctgcacttaaaaatctttgtgctggtaaggagtttttgtggccctgtaaacctcctagaggtaggtctggggggcttcttttgggcatcaatttactaaatgttgatattggtttaattgatgagggcgatttctatattaagttccatttatgtaacaaagtggataagttcaagtgggctttacttttggtttatggaccagcacaaaatgaacttaaggatcaatttctcgctgaattagttaatttgtgcagtcatgaatctttaccaattcttattggtggtgattttaatattttacgtagctcagaggaaaaaaataatgacaactttgatgatagatggccctttctttttaatgctattattgatggtctgagccttagggagttgcagatgtcgggtaggaattttacttgggcaaataacttagcaaatccgacctatgagaaactagataggattttgatgtccactgagtgggaacataagtttcctctttcatcagtggttgctcttaatagagatatttcggatcatactcctttacttttaaatacaaactcatcttctgtgggtaatacacaccatagttttaaatttgaacttggttggttgttacgtgatggctttgttgacatggtgaaggaggtctggtctagtgtcaatgagggtaatactcctatggagcgttggcaggagaagattcgtcgtttaagacaacatttgagaggttgggctaaacatacaagtggtatgtataaaaaagaaaaaaaaggagattctggataggttggatttgctggataaaaaggctgaatctgatcttttaactcaggaggaaattgattttagatggttttgtaggaatagattatctacacttttgagagaagaagaaattaggtggtatcaaagggctaaaactaaggatattttggagggtgattcaaatacaaaatattttcatttggttgctaatggtaaacataggaaaaccagaatttatcaacttcaagatggggatcaagtaataaatggtgatgcgaatctaaaatcgcatattaccacttattataaaggcctttttggtcctcctgatgattctgatctccaatttaatgaaaatcattttgtttacattcctcaagtttctcaattggagaatgaagctttaatacaggactttactgaaaaggaaattaaagatgcaatttttcaaatggaacataataaagctccgggtcctgatggatttcctgctgagttttatcaggttttttgggatgtcattaaagatgatttattaaaccttttcagagatttccataatggtacattgcctttattctcccttaactttggtactattattctcttgcctaagtgtgcggaggctatgagaattcaacaatatagacctatttgcttacttaatgttagttttaagatctttaccaaagttgctacgaataggataatgagcgttgctcaaaaggtgattagtcccaactcaaactgattttagccctagaaaggaatattatggaaagggttgttatcgtacatgaaactatgcatgaattgcttcgaaaaaataaaagtgttgtcatttttaagattgcctttgaaaaagcatatgataaggttaaatggtcttttgttcaacaaacactaaggatgaagggcttccctcctaaatggtgcaaatggatagcttcttttattcaagggggtcatgttggtattaaagtaaatgatcaaactggtaataattttcaaacgcacaaaaggtctaaggcaaggagatcctttgtcaccaattctttttaatatagtagcggatatgcttactttattaattaagagggctaaggatgttggttcgttgaatggggttgtccctcatttagtggatgatggtttgtccattttacagtatgctgatgataccatcatttttttggagcatgatttacaacaaacgaagaatctaaaattgattttatccgtgtttgaaaaattgtctggcttgaaaataaattttcacaagagtgaactattttgttttggccaggcaaaggaatattatgaccagtactcttaacatctttggttgtaagcgtggctcttttcctgttaaatatcttggtatcccaatgcattatagaaaattaaataattaggattggaaggtgattgagcaaagaattgagaaaaaacttagcagttggaaaggaaaacatttatctgttgggggtagactggttttgattaactctgtgctttcaagtctagctatgtttatgatatcattttttgagatacctaaaggggttcttcaaaaaattgattattatagatctcgtttcttttggcaaggggatgattataaagaaaagtgtagacttactagatgagatataatttgtcaacccaaagatcagggaggtttaggggtccataatttggaaatacaaaataaatgcctcttgagtaaatagttgtttaaattgattaatgaggaaggggtctgtcagaccttattaaagagaaagtatctttataatcagtctataacccaagttaataggaaacaaggggattcacaattttggtcagggctcatgaaggtcaaaaataccttcttaaatatgggttcatggattgtaaataatggaagacaaataaggttctgggaagataaatggctaggtaacttggcttttaaagacaaatatccacctttatattctattgttcgaaggaaaagttctactattgctagtgttatgagttctgttccacttaatgtttcctttaggagaggcttagttggccataatcttacatattggcatgaattgtgtacttctattatgcatattcaattgaaccgttcttctgattgcttaagatggaattatcatcagagtggtagtttttctgttaggtcaatgcatctagctttaattaataatggatatatcgaaagaaataagattatttggaatcttaagatgccactcaagattaagatctttatgtggtacttgcttaaaggggttgtgctgactaaggacaatttggcaagacgaaattggaatggcaatttaagatgttgtttctgcatgaaaaatgagaccatacaacatctttttcttgactatcattatgcaagatttgtttggagagtagtacaattctctttaggtttaaaccttccaagtaccatatctaatatgtttgatgggtggcttatgggggttaataagaagaagtgtaatctcatacttgtaagagcatctgccttatgttgggccctatggttgagtaggaatgatttagtgtttaacaaatcaccatatacttcatatatgcaggtaatattcaaggtaatatattggctccggttttgggcaaagctgcaaaagtgtgaagaggatggtgaacttatgaaggttgcatgtcgcaaactcgagacgacggtgatgccactttttgccaactaaggatggagattccccaataaacttgaaataaagtggactccttatcctgggttgccttttaatttggtgagggcggttgattacatttgaactaccctctttgtatgagtgatactttgtaataattggctgtagctctgtcgagtcaaggccgggatataaattccgttatctaaaaaaaatttgagtaaggggccgaacacatttcttgaacatcgtttacccttccaccatgtagttttctttcttaattaggtctatttttgataatagaaacggttgacgtctccggtctctgccaacatatatacaccaagtaatgttgttgataaagaaaatttcaaacgacgggactagtccgaacctgcttaaaaaaagaccagttggctgattaaaatttaaaaagcaagtaattttataagtagtatgccatctaaaacggaacagaacacgttttgcaaccggttcaaaaattttagcaccatgtagtattagtgtttgcatgcttttctttgtgatagtagcatatcccaagagtagggccttgtgtgtttttacaaagtggatgacaaaagaaggccgatatgattagattggagttttattaagagcataacaaattgggaaaaactttgcggcccccctaatcattgatcgtcatatcaggcaaaaacaaaccaaaaaaatcaaccccccgaacaatctgcatctcgagactccaattctttcagttccaaggttatctacctcccattgaaatttccattctattttattctttctccgaaagaggaaaaactattatttcttctagttaaaaaaaaacgaaatatgatccatacatgtagttacatcggaaatatatataagttacctctagaaattagttccaaaatttgtattacaaaattaaatcatgcatctgaaatatgtaggtacgtactccatgatgacaagcactgcgccatcccacagccgtccatgtcgcacaagacgtgtgaaataggaattccaaccaaaaaagctagaagattagcgcaatgagcagaagacgcgcgcgcatccgaaaatagtaggcttccagataatttaaatgaagccatcctactaaggactagtgttatctgccaaaggccctgtttagattccaacttttttattcaaacttctaactttttcgtcacatcgaacttttctacacatacacaaatttttaactttttcgtcacattgttctaattttttcaaactatcaattttagcgtggaactaaacacaccaaagttgtcatgtctttattgcaggtttcagttggatgaaaactataagttatgtggttgttcacaagtgtaggcctatgctatttc

SEQ ID NO: 11163 - DNA, 6203 bp, Oryza sativa
tttgctatatcggacgaaactccgcactatcttatgcgggttgtttcaagaaaaataaaatgaaaaagaacaaagaacttcattgcattcttgttttcgttctcatatggttggttggttgcatgttcccggccaatatctctccctctggcagcactggcactgggcagtgatggttagctttcatcatatacattactcgtagtcattctattgtgattaaagcttctgagacacaacgtgctagcaaagaggtaggttatatgaatgtgaattcaacacatctcccagacgttctgctacatgaatggttaatataaaggctagctacaaaggtgttgtgctaattacaactttggaatgaagggccaaagtacagaacaataatgtaagccttaggattgtgaggcattgggaactgaactactgaagctacagaacatccccgctcaggatggttaggcaagagttggcgtactaccaagctaagttgtgcctgtatggtgctttgtaggtaacgtgtgctcaaaacttgttcaatacgtgggatagttgatcaaacagattgatgaatcgtgcaatccatcgtgaccgtgtgagactaatttgttttgcagccctaggtttcaccaaagctttgtgtataagcaccctgaacacaacatgtcacgcccggaaattcactagtaatttacaaacttatttgtgcataaaatcctcgtccaggaatcagccgaggtacacaaactgacaatttaatatacagattcatcaaattaactaaaacgataagtacttacttaagaggcacttagtcctcaccatgaagaaaactgcagcggaaaaataaaatctagcgaagctccggctccactcccacaggcagctcaactggggtataagccaaccgtcttctccttctggatcctttttcttcaactgaggttgattgattattgcaaggtgagcatatgacatactcagcaagccacacagcaaatatgcaagtgcacaaggataccaaaggatggcataatattggctcatttgcaaaagcagcaattagcaaaacatttaagagaagtaaaacaatggagtaattaatcagaaattttaatcaacactgaacagcacacccatgctgcacaggcccaaccatcctgaacaaccatacccggctgtacagatctaatctccaaaccaggagctaaacaaattattaccaggtataacatctataattattatgagaggtgtgagactaatcacgaaaaacattgctcaactcgcccataaccgtgggcacggctattcgaatagttttactctggccagaggtgtaccactgtacccacaagacacagctccacatcatgtcaccatgtgcctcagtaccaccacggtacctcggaaaggagctgtgacattaccccttgcataacacaacccaccgcagcgcaccattcctggatcataatcaccccctcaaaaaccagaggcatggactccccagcgacccccgtgggcttatctccgccacttctcagtctggtgctccgcaatgaatcatgctatacaaaaggtaaagccgttgcccacgctggcttgtggttggcacggttaatgtttcacaatagtagctcgcgaaccggtccttaattgtcatgagcacgactctcaaaaccatgtgctcacaacccaccattatcaagttttagttggcaagtaattaattaaccaatcacgattggccatcgtgaactatcattaagccattattaaataataatgagtcataaattatcccaatagtgtgctaatgtttctaagcatggctaagcaattatatctaatatctagttgaaccaatatatataaagctcaactagtccaattataataacccaaggtatcaaggaatagaataatcaatgcaaattggccataacaaaagaataagttcacaccacccggtgacattcgaaaataaatgcacagttgaaataaatagagaatttaaatataggaacaacatgctcaaaggattgtgtttaggatctgtgtgacttgccttgcaataatcggtcttcaattaatcttcttgaatacttccggcgcactcgcgaaccttcacaacgacggaaacgacaagctaacaagcaaaacaaagaaaagactaataaaaaccaaataaacaatacataaaaagtaaacaaacatgtagatcatatttttagatgaattatgagacttgaacggcctcattctgacttcaaatgaatttattatgaattttacaagattaaatctatttaaagcccatttaaaaagaattaaataaatttaattcaatttatggacaattttagtatgtagatctttattttacacaacttttgcaacttgaaccacattaaactgagttcaaatgaattagttatgaatttttaaagattaaatcggattaaaacctttaaattgattttaattaaattatgacgcaataatgaattatttttgaaaaggaaaagaaggattattgcgtcagcggctagggtttgcggtggaccgggtgcacggcagcggttcacggaaacaaacggccgagatcaaccctatccaaaacggacggccgagatcgatcggtccacgaccggctcacgggagagggcgacgatgacgtcagcgacgacgtcacctccggcggcggcggctcggcggctcggacggcgcacgctcgccggcgaacggcggcgcttcggcacgaacggaaggcaccaacagatagaggacgacgcagcgaactcaccggtgaccaaaaccacggcggaagagcaacggacggtgccggcgacgaggaagaagcgacggcggagattgggtcgacggcggcaacggcgctccggcggtcttcggcggcggcgaaacggtggacggggacagcagcgacttggcgatcccgacggtggccttcccgagtgacgacgacgaccgtagcgacggcggcgcacggctggacgaacggcggcgacggcggtgcaaaagctcacgaggctagggcgctacacacgacggcgggcgaaggcgagagaggcggcgggtagaggagagctcgggggtccttataaaggggcaaggaggcggcggcgaaggcccacagcggccggcgacgagaaggaaagatcgggctcggagagagaaaagccgatccgattcgacctcgaatcaaacactttccaagccgatttagccgatgtttccaaaggagaaaaggaagaggagatcaagaggattatttcccctcaaaagattcggccggagaaggaaagatgaggccgaatttggaaggagacggcggcggcttgcgctagggtttcgggcggcagcggcggcgcgaggaagacaacgacctgacaggtgggtcccgcctgtcagcggccgagagagagaaggaagggcggcacggcggactgggccgactgggccggggagagagagagagcggttttgggccgactttcggcccaaagccaaaagaagacttttaaaaacctttttcaatttaaattatttcttaaatgcaattctatttattaaaaatacttccttagctcaaataaatcccagaaaaatctaggaattatagaattaagcaaagtatttaacaaaattttatctagcccaattttatattgagatttaacaaattaaaattagatcttctcttttaagcttttaaaatcatttctaataattccttttaaacaacaatttataatttaaggatttttttttaaacaagaaaagcacttaacaaaaataattagatcattaatgatcaaataattactgaactgttctttgtattatttaagaattgagctctgaaaaatccgagaaaatttcagagagtataattaaccatggagaatttaataaaaattaaatccatccatgctttatatttaggaaattttatttcccacatttaacttcacttgtaaattaaagatcatttaatataaattctattattaatttattaaataatttataaaccctgaaacaaaaatcaggatgtgacacaacacagatgatcactggtgatagcaaccctgacaaggaggttgaatcgatagcacacagacttggatgtgtactgatattggcagtatcttctggagtggaggaacacacaacacaaggtgttctgatttccccgttggcggtggggacccactccaacaggtctgggcccgggaccgggtctaaatgtccacctatggggcagtcggggcatgacctgcatcttgagcagggcttggggtgggtttgcagtttcacctgtgggtgacccaagaggtcccgaaaatacagaattaatgaaaaaagttaatagcctattacaaattttgctcaccaagacaaattcactggagcacatatacatcaagtaaccttagatatctttgactcagtcccacatcgttcgccacccgcatgcgccgtcacacgctactcgtgattcctgagtcccaatgctgccctctgatattgcccctgacacttccaacaccgccgctcgcacattgcgccgctggtgagaattactgcttctcgcttggcctcttcttgccacaggaagcacctcccagtttgccaccggtgagccctgcccttggattttgtccgtcaactcctctcaacagtctgcctagtcccttatgttccaacttgcctcctagccagcggctgatttcgatctcatctccctcaatcctaacaatggctcagtgttcctccgacatggcagcttttggtggattgccttatcttctcagttcttgtgttgtcttcaccgacagttccaaccccggttgggggtggggactcacagtggccagggctagagcaacattgagcccgagttggagatggggccggggacaggtgaggaagtcgagtgtcagggaagagggcattctggcccaacccatccctcaccagccctgttactacccctactcaacaccgacaactctataagactgctaccagcgtcagggatattcagaggaagatgtgcatcatcagatgagggacttaagaggagtagaacttgaggaagtgttctctcctagttatcaaattcatgccgatctgcatttacttgtcatccggcgttcctttttttttcccattcgtttcgaggcttgtagtctaacagctcttatagtttcagttgtgtatacctacggatatatatccatagaccgaatttaatagaaaacaaatataccttacaaactcccttaaaattacgctgtcaagatcacaatagctgagattaattttagatgagaaagctgtaaaaattcgaatcttgctttaaaacgatgaagtgagtggacatagtgcgcacttgttgacaaaaaccctcgggtggtgcagagtcagggagatcgatgtatagtgccgtgtcgtgatgtcatcgccagcggagttgaacgcggcagcggagatcgatacgacgacacgggcacgatctatcgaagcccggctagatacgttgttgggcgttaaaaatccactgatataatatttaatctacagtcataatttatgatctacctaatcaacggttagataattctgattaacgtgagagcttctaaaatgtgtccaattaatataggtatggatagattagggccttcatgcacttccattgaccgatattactgtatcattgcattgttgttggtacttataaagtagcaactataacctaatttcagtagaattagtgcatttgtactaccttacattgatctggaagctttgtttctttgtcctttctattttgcctggtctgaagaaacatgcgacctactgtgctaatactggaagttcagaaatgagaattcagagcaagaacacaagaagcatagcgtgtatactgaatgcaggtagaaagaaagtaatagtgtacttttgctgtgttgcagttataaacacagcttacgctatgaggccaataaaattgtactagcagtaaatctttggttgtatattagagtttgtgtcgaatatgtgtatgtagtcggttatagtttagtatttacaaaatatcgaccctcggtgtgattaatatcgtgtatggctcttttatggtgttttttcagcatttgatttacgatggt

SEQ ID NO: 11164 - DNA, 7013 bp, Oryza sativa
aaaactagagcagaaaaagattaaattggataatgttgggtctgcaaattctagtttaagtgagaatacaagtgatggaaggctatcatccaaggtgcatcccctcgtatcttcctccttcgatgattcagttgaccagtcattggcaggaagctcaaagtgtaatggaaagcgcatatttccgcttgatctaaatacagtggatgcaggaaacgttgtaaatatatcggatgacgaggagatgcctgagcgtgatgcgccagattttgagctagaacttacggacaacaattctcccagaaagaccatgttttcatttctttcccctaaggttgaagaaaatcggagtaaggaacattcattgcctaccgattcaccaggttccctctccctctctcttgcctttccggcatctagggaacatgctggtaagttgcaatcagagataccgaagcagttgcctgagatgagcagccagaataagatatcttcgatttgggaccgacaatgatggctgcccgctcttgcgttcctgatgttttgcgggacagatcgatgtttgcgtcctctggagaaactatcttgaatactatgtatctgcaatgatgccactcaggtgtgctgacaagtagttacatccagggggcagaactattgaactgcaaagaacagagttctggacgtaagtgttattttgcaggaaacagtgatatgcttttcaagacatagggttatgacatgaaagttcatactctgcactgtaaatttctgcacaactcatgtaaagttttggccttaagctggaagtcatctcaaatttgagagatgtctgccgtggggggaaagatggtggttattatctgagattagtatataaatgtttctcttttcttgaaatgttctcgtggtacccgttagtttgtcatatctgataaaatgactttccgacactatcatttttttttcctaaaatgacatccctgagctgatccaatctgctggtttaaatataatcatgctgtattcggattctacgcatatactctttggaattgtgtaattaattagagcaatgaatgtactagttaatccacacgaaaacatgtctcaaacatgtcctaaattaccctacaggtcccttcactttgcttttttggaggtacaagtaagaacacaaatcaatgcaactccacacttgcaccatcgcatgcacacacacgtgcgtgtcttacacacataggagtactttttggtacagattatatgccacggacctcgaaacacggaaaacgtgcgttcagcgcacacttttgggtagagattagatgccacggacctcaaagcacggaaagtgggcgactcccgctaagagccggtacaatagcaggctataaaccagctacaaatatattttaagaagataaataaaaagagagaagagcagtgggctacagatttgtagccagctgtagcacggactccaaaacgcagtgtgtgcatgacaggtgagaccatacattaatagtgtagtatgtaactattgtatagatgagctattagattaactatagataaattggagctagtagttggccatactattaaacttgctctaaacgcgcacacgtgtgtatcccattctatgggaattaatctcacgattgatccccaaggagcgaggaaaaaatcctcctaggccacactcggaatattggatttcgtaaccaatcaagcgtgaggggcatatcatgacggtatgttgtcaccaaaattccttgtgacggcatttagactttttgtgatagtaaggggtagtcactaatagtccattttctagtagtgtacctttgtcctagagtttttttttaagataatggaagctttattagtattagtcaattactaacactcttttttatagctaagatgcacataaccaaaatacacttaaaaaaagtgatcacaggaaaagtattaaggactatcaattatgagactagatatctagatcaccgcctatgttcccggctaaaacacatccttgaccaccttgtccaatcgtggacaagccacactcaccaggtccagcaaaccaagcttttgaagaataactcatgtacaaaactagtaagaaaataacatgtagaggagataaaatagctttaacaatgctatttgcacatcataattgcaaaactaatctgtacccaaaaataccgtggcaattctctcctcttgggctgaagtagaatttttattttggatgcgaaactaagaaaatatgttgaacgagtatcgcacaagattgaagaaagttgccgaaaatctgttgaaaatacaatgcaatgtacacatacgttttgctaaaacacacgttagtattttgtaataactgaaatatggattagatacattgctaaaacacaatgtatatattatatgttgcttaccatactacaaaccctactacaaatacactaaaagcaggggcggagctactatatattaccggggtctaatgatctggatgaaagtttctaacaccatgttaattactgttcatcacccttaagcagaggagagcaaccatatagtgtaatttgagtgaccccagtaatattttcctatagctccggcccttgctaaaagacatacttcctccatcccattttaagtgcatttgtggatttccgtatccaatgtttgaccgtccattttatttgaaaaatttataaaaaaataagccacacataaagtattattcatgttttatcatctaataacaaataaaatactaatcataaaaaaatttcaaataaaatagacggtcaaacattggacacgaaaatttacatctgcacctagagtaccatattaatgttagttgatgccttgatggtaatcatggtatcttgtgatggtacctgtccaacaacttatattagtttgataatatgatcatatgatttctgcacgtggagggtcctaaagaatgtaacaattcgatcgcatggttgcaacttcaaaacattcatatatacagacgggcaagttttgaagaagagttttcaaacagcagtgaaccaaatcaatttgccctggctcaatttacaaatatacatacattcatatataaacacgctaacacgcagacataattcctaaccaactgccaaccaccattagccaactaactaatcatcgtctacgtaggctgtctccatcaccatggaagtcgtcgtcgctcgccggggcgtcgtcgtcctgcggctgcgccacggcgagccgccgcccagcgccgccgcgcggtctggcgggcgctgctcgaggctgctcctcctgtggacgttcgccgtcggcttcgccgccgggctgttcatgttcgccagccacgtcttggccgccgtcgccgccgccgtgctcttcgccgccatgtgcctgtacacgtgcctgtgcctgaacaacgcggcgccggaggaggaagaggagcagcagcagcagccgcctgttctgctgcttcccggtcaggcgctgcgcgtcgccgtgatgccgccatcggtggggcggctgcagcagcaggaggtcaacggcggcggcggcggcggaggcctcaggcaggaggacgtcgaggccgccatcccggcgttcgagtacagtaagggttcgggcggcgcggcggaggcggagcagtgcgccgtgtgcatcggagtcgtgcggcgggggaagacggtgcggcggctgccggcgtgcgggcacgcgttccacgcggcgtgcatcgacgggtggctccgcgcgcacgccacgtgccccgtgtgccgcgccgacgtcaaggtcgccgccggcggcggcggcggagcgccggtgtagtcgtcgtcgcacacgatgtcacgaacgatgtacaagctgttccgtgacggcaagttgattaatttcttcgtagtttttccccatttttgtatacttaattagtggttgatatttttgcatcgtgccacgatgtacttctgatttggaacagaagttaaatgtaacttttttggacataaattaaccagcatagcaaatttccaacaaaattatagttgttcaatagctcggatcggaattaataaattgagataatcctgaaaatgacgttggagccatttaattaattacgcttgaaaacgaagtaataagaaggctcgctcgtgtgtggtcgttgttgctgaccaaagttgtttaatgcatgcggcatcttgtttaagactgagaggaggattatctactctctagcttcagtacgaaaagaagagaaatgtcccgtgataggaactctatcttgtggcggagtacagcacgtcaatcatagtttggttagccaagttgtaattaagccgaaccttcttcgtatttgctgctcatatataaagatatccaagttgtcatgttgtccgctacaaattgcatccagcgcacggcctatcaatgatctttagtgtgcagactatgcactaatgccaataaaagccagtaactcttttaattctaactaggaagatagcccgcgcattcgcgtgggcatgtatgattatatttgtttgaagaatttataaggccggaatatcaatcgaatgacaactgccacactttaaaagtaatatatcttttcacaaattttcttcatcggcattgcttggatatatatttttttctatctaactattagctttaagctacaacatttaattcaaagaaaatttggcactttatccaatcatattgtttgtattgattaaatctacctcttaaaaggtctagtacttaagtagcaagaaccacacgaaaaaaaaagctcgagcagtaatccttcgtacatgcatgtgttaatacatgagtgatatttctcttctattagttatgaatatttgtgggataatatatgatgaaataatctatgttgttaaatttattttttttactaattgtaagactatttggatgagaatgacatagaagaatgtaaattttggtttcatgtggtatctgtttaatcaaaatatagttaatgtatctataaattgtaaagaaaatatgagtgttgaagattcaaaaaaatcagacaatttggatgagaaagatagagctaaatatattttcatgtaatatttttaaattaatatatagttaatattatatgtaatcctatataatttacatatatttagcaggaggctggcggatattttcttgtacgtagaaacataataacgtttttattcaagatgtggtcatagcacggtggcagtggttattggcattcatgatgcacccatcaacccggtttcgagtctcttcaagtatgcttagcagaaaccattgacaccaatttcttgcttggtgtctatttctttttatttgagaattaggaagcactactataaaaaagcacataaaggttggtatattggtgccgaaatagataaacccactcatgcgatcgaatatataatcggcacctttgaacaattatatgtgtcggttttagagaaaaacaaacaccaatattatacgtacctattatttattataggtgccgattaattaaaaaaccaacaactataatataactataatatattataggcactttctttttaaaaaaggcattctacaaactgagccaagccgcacggggagggagagagtcacatctttctggagatcttatctatttgctctctctttttccctcgctcatccttatctccttctccttctgtttttttatgggagtagctatatttatggcgtcatattttacactaaaaaatagtcggcatgtatttacattgtaagtccctaaattaaatatgtaattttagtgtattgacaatgtaaataccaaaattacatatgtaagtcctaaaattacatatgtaaatcccaaaattacatcctaatacatatgtaagtggtgtgtaactgctgtgtaaatttgtaaatatataaataactacctgcagcagacacatacatataagtgtgaacgcagcaaagcagtggctagcgatggtatgagcacaatggatttaacttgacaagaatctcacagtgtatccaatggccacaaaactgactgctatggagccagaaatctggtgatagaaatatagtaaaaccgtttttttatttggtggaaggttaggtgggatgcaatcttttaatagatttaatctaatggcttagaataatgggtcccccgctttaattgaaaatattttttttagaatttctaatgttttttctaatttattagagtgctatgtggcagcgtaggaacgtttataggagtgccatgtgatggtgactataatctaataattaaaaaatgggcgcatcattttaaatgaaaattatcagcccttttttgttattttttcaagaaggcagtctacaaaccgagccaagccgccgcacgggggagggagagagtcgcatcgttctggaggtcttatttatttgctctctttttccctcgctcttccttatttccttctccttctgttttttatgggatagctatatttatagcgtcatattttactctaaaaaaatagtcggtatgtatttatattgtaagtccctaaattacatatgtaattttaatgtattgacaatataaataccagaattacgtaggtaagtcctaacattacgtatataaatcccaacattacatcctaatacatatgtaagtggtgcgtaactactgtgtaaatttgcaaatatataaataactacccgtagcagacacagacatataagtgtgaacgcagcaaagcagcggccagcgatctaaaatgccacgtgtcgatctaggagcagcatttgtaggagcgcccacatggcggcgtaggagcgtttataggaagattaatgtacttttagtatataatagataagacgtattttaattttataatatcttcagaattaagtaaactttataattaactaggaagggtgcccgc

SEQ ID NO: 11165 - DNA, 693 bp, Oryza sativa
gttggtggccccaaaggaggacaacatggagacgatcgtcgcccaggatgcgcttgtaatcacgtggaactcgtcgccagacaccgcagatcttgcccgtggcattctgatagacactgagagtgcccgccaaggtggtctccagttgatgctcctccaggattacacccgcatcatcaacgaattgaatggcacgcggacgaccgattcgcgatgaggtgtagaaggagtagtatagattcttcttgtggaacaggaaacgggcggtggccaccacattctgcggattgtaggtggtgtacatggacttcatttcctcacccttgaggaaataggaggtgcggcccgttagcaacgcagcgtaatctataaatagggatcaaatgaaaggtggagataatccaggtgttagataaatacaatagttctcttgttaattaaatgtaggagctggtgaatgggattacaatttcccgcaggatttggcggattctattgggatctgggtgggtgtccggtacttttgtacttacgtttcatgttgcgctcttcctcttcattgggcacgggcacatccaaggctacatccgtatctgaaagatggagggaatacaaatagagaataagatgatgctgggcgataaggtacgaccttaaatggaatttagatagcaacaaatgcttcaaagcaac

SEQ ID NO: 11166 - DNA, 4457 bp, Oryza sativa
tacgatctgaaaacgccgtgctgatggttacgagttcagaacttcagatcgatcaaccaatggaagagtacagtccatggcgttgattacagtaccctcatgtcaataattttcaggcatgcattatcggattatcctgcgagcaatgcacgggctagagacttcacatgcatacatgggtacggcaagattgttgtctcattgtttgtttgaaggacctaaacagaggacaacgtacttgtatttctgcgtggctctcaagcctatacacgtaggagtacctgcgacagtatcagttttctgaaaatgcaggttgatcgacaaactgacaagcctacggcagtgaccacacagcccgtgcagacaaatatgaactcgttgaaaacacacagatatatatagggggaaacatttgagatcgcttgtcagatggcaagagttgataattcccttttccaacagagcagacgttgctagcagaatggtgcgctacaaacgtctgagaacttaaatgcacaggaagatgggatcttgttttcagagaagaggatgaaactgcatggcaagtacgaccggccgtcgcttttgcatatgcttccgacatggcgtttttgtgccggactagtcgcatgcagcaccagtatggacgccacgatgagcaattgagcagaaatgcagcactagactagactagtttacaacttgcgtttggaccaaacaatctacctaagcaaggcacataagatggtcagaatgaaacattatttgcgcttgctttgcagaagagatgaaatcgatcggtgccttgtcaagctcagaagcccgtggcaaaggcaggaggcagctccccacattttaggtggaggctaccacgcgaggagctagaaaagcaggcacacgcagctaacgttttcaagtcaaaccacaccctccatgcacatcaatctgttgctgaatttgggttgaactttatttttttttataagttggaaccgaagcccaccagttgcaggtacaaagttttcccaaatataaaacctggacgcccaaccgagggtgttgtctttctacgcacgttgtacgctccaactccgaccacaactaggttgctgcaggtcggtcccgtagcagcagaagcatcggcaggtaggttacaggtacccgtagagcacttgagctcgaggttaacctagataatgcccaagaccaacaagggtttgctggtggcctttactctccgtaatataaaaaaatcaatctaaaattaaaagtgacatatcctaatataacgaatctatatagatctttattcagattcgcagtactagaatataccatattggttttttattaaacggagggagtacgtctgctgtgtcatgtgtccttgacaacttcaacagaaatttcggagaatacctgacctatttcttcagcggcggcggcggcggcggcggcgacgcagtgcgggcgggcgggcggcgcgaagagagaggaggcccagcgattttcgcggcgaggcgctaggccgtgtggcacgggacgttgggctgtttttgcagcgggggaagccgagcggccggagcctacgggccgccgaatcgggatgtccagtttgttgggccaggctgggaaagagtctcagcctgtgcacgtcctagcacgcaggccgatttgggccttgttggcagggaatcatgtatgggccactattgaggcccatccaaacgaggcctttgaaaatccaattgcaactcttgaccagcagcgggcagtgagtcatgcgaaatccttagtcagagacgaaggaagtttctctttttccatttgttttgttggtggtgttgcttgctcgatctgacgatcttactattgaggtgtcaacgaaaggggagtccaatgattgatcccaacctgggtgatgcgaagtcgtaagaacaagatcccccgccgcgaagcaaaccgtttgaaccgcgaaggttacaacgacctttgagcgcttcaaagtctccgcggccaattgctcgttcaagtgccaggcttgtactatggcgtactaacctacctaccatcttgcattcttgctcgctagtagctctacattggcccttcgctgccgtaagattggagctctgctgctgacttccctagctagtgcctgatcaggaagatcaaaagagtcaatgacaatttttttctcctatctatgtctatgactcttttggagcctgttcactttaatgccattttcaaccatactattttttagcaaagttaccagaattttggctatgtttagtttgttgtcaaattttagtaagtacatatgaaatcttaccaaaaatttggcaaccttgccaaaattttgacaactttactaaaatttggcaatgccaaaacttgataaggttgaaaatagcagcaaagtgaacaaacccttaatcttcaggtgacggttagccttgtttatgattctgcgagcatatgcgggaagaagatacgtataatcttacaattcacttttcgtcgatcgatcgttgatctaacagtgacccttgagtgaggctgaaacgaaccgttcggagcaggagcagacgactcctctcctctgactgaacacacaaacacttcgcgctcgccgactgcacgtttcgttcctggaagaggcatccatgatccatggtgtccttcgaattgctccaaaaagatctctgctctgcactgatcataccgtgatgcattgcatgcacacaacttgcgacttgcagtagcttgtatcacttgcactaaacgtacatatcatattttttggagatgggattattaatatatttccatcagatctaatacgctatgaaaaggtccaagaatcaaatgggaaccgctcctccctatcaaaagtctattctttttgtcagcagttgcatttctatattgcttcgtcagctcatcatcatacatggatttcgcattacttttagcaagctgagctatttgacttggaatgtttcttcttccgttttatatttaaatctgagctatatatgatgacgccagttcagggctaattgaggatctggatcaggcacacggctggatcggttcggtcggtctgtagcggcatcgagtaatttgttatagcgaaacggaagcagttttgcactttgcttgtgcaactgatctataatcattaacaagtgattagtactaatgtacactataatccaatgaacttttcccagttagctgtccaagcgtgattcacatctatcagagatgctcatgcctgacaaggaatcaactttgagtattgataagctgctcttgccctttacctgaattgaaaggttgagccactgtcactctgtcgcactcggtgacatcggtccgtttgagatagctgaagtatatcgatggataataggaaaagtattttctggcacctaggtgtatgcatgtagtttaaacatagtttaaacagttatgtaaaaattttataaaatttaataagatagactatgataatataagacactatacaaatatgcaagtataaattagatctacatatgaataaacaaaaatgataaattttatctgcgctataggatattattcactgtctgattttattattatttttctctagttgtagatcaaatttagtcttgcatgtttgtgtctggacttatattaacacaatcgatgctactaaattttttcaattttttctataaccatttgagtcgcatacaaatgatggtgccatggcacctagatgtagaaaatccttgtcgacggataatatgatttaactactacaaagttaaaaacagttgtttaaaataatatttcaagaaaattttatataaaaaaatttacacaaaataccttttaagtgcttaggaagtgtgtaaacgaaaatccagaatcactatcctccaaacagagaaaatccagacatgcttttaaatgagaattcattaaggccaattttgttcttggtctccctctctttaaatgtatccacattcgtggatgtatggtgtgtgcgtatagcagtgtatatgcgtttatcaaaaaaaaaattaaggagaatgggggatattttttacacacgtcgttgctcgaactttttagataagtaacgcaaccagtaaattaaataccaggtgagtgaaatcatcacggctactaaccgacattgttgacgcggaataatggcattattgctccgcccaatggaaaatttctaggttaatttatggcaattaagcaaaagtttagtcaaatctatcgatcatgacacgctgatgattgcatgattttgctttgtataatgagcatggtcctcgctctctaaagattcgccgtgtgaattatttgcggcttaatataaatccatttcgcgtgccatgaacggatcacacggccagctaccacatgtagaaagatct

SEQ ID NO: 11167 - DNA, 554 bp, Oryza sativa
  unsure (1)..(554): unsure at all n locations
ggagttcatcaacgtcgccatgagcatggaccctgagtggaagatggtaaatttctcgtcttacatgaggggaaacagctgatgttatgttatagtcccatttctgctgatcagaatgtgttgacaatttatttgtgtgcacgcagtacaatgctgatcttggtcgcatcgagaagtgggttatgaggaaggcgttcgacgacgaggagcatccttacctgccgaaggtagaaatggcagttcttttttgtttcttcagatgcaatggtaattttgtccgtgttctgaactaatacttctgaaattctccacagcacatactgtacannnnnnnnnnnnnnnnnnnnnnnnnnnnnnnnnnnnnnnnnnnnnntggcctgaaggctttcaccgagcagcaggtactaattaccgaccatttccctgtgtcctgtcctataaatcgcctaattaaattgacccccgtttactctgtcatttcttcaggtcagtgatgaaatgatgaagaacgctgccaaagtgtacccgcacaacacgcccgtcaacaaggaggc

SEQ ID NO: 11168 - DNA, 4137 bp, Oryza sativa
catcaaagttagttcgtaccgtagaaaatttggatctaaacaaatctccttcttatcattacgttgagaagaattttgtgacatattattctcgtcgtggagggggtgcaagtaagactgagttggtacgagaagacttggagggggaaggagagaagaagggacctttgcttggaaatgatttatgggaggcaggaccatcaaagagacattgcggtagtgatgatgtggatgcagcgagggagatgaaaagggagttagtacaagaggggcttgatctaagtgaacatttgtcggcgagtgttcattggtcatcgtacggagtcaaccctgaatacccgacagaagtagcaggccaatatgtgaatccagatgattactttgatgtcgaattgagtggtggtcacgattctgtctcagtagaagtcaatagagatgatgttgacgaggaggcaagtgttgagcaatatgatgttgaatttgctgaagactctgatgatgaccgtccattctctccacttactaataatgacaagttagcattagaggaatgtcgtgcgtttgagaaggtgtttgggaggaagccggacattcctgagtttagggacctaacacatgcccatggtgcactactagatggcggcatcaacctagatcagttgccagaaccattccaggtggatggtctcagaaagggtttagagttcccatccatggtcgcattgaagctatggctccaggattacgccatcgtgcaccatcatccataccgtgttgtcaattctgccgcaaataggaggtacactgttaaatgtgaaaacccacggtgcaaatggaaggtccatgcaactaagaggtctagtggcacgtggaggatatcacgggtaggtaaggaacatagttgtgctactgccgaaggttcagggagccaccggcagctgacatcaaagttcatagcaaataggttatgcaatgccataaaactgcaacctacactctctgcttctgagttagctttgtatatatttgaggttttccagtatagggtgaagtatggaaaggcttggagggcacgagaggaggctatgaagctcatttacggtgaatggggtgaagcgtatgtccgtttgcccactttgctgcaagccattaagcagaggaatcctagtatggtctaccacatcaatactcatcctgatagggttgtcaacgttgatggagtgaccaagaaaatttttatgcgtgcattctggtgctttggtccttccattgaggcttttaagcattgtaggccagtactagctatagatgcaaccttcctaactgggaaatacggtggtgccttgatgactgcattatcagctgatgcggaggaccaacttgtacctttagcttttgccttggtggagaaagagaattcacgagactggtgctggtttatcgatcttgtccgacgggttgtggttgggccgcatagggaggtttgtattatctcagatcgacatgctggtataatgaatgccatgacgactcctgttctaggattgccaccggttcaccaccgatggtgcatgaggcacttcagtgctaatttccacaaggccggtgcggacaagcaccagacaaaagagctcctaaggatatgtcagattgacgagaagtggatatttgagagggatgttgaggcactaagacagcgtattcccgaaggtcctcgtaaatggcttgaagatgagttgttggataaagataagtggtctcgtgcatacgatagaaatggccgccggtggggttacatgacaaccaacatggccgaatagttcaatagcgtgctagttggtgttcgtaagcttctagtgacggccatagtatcatttacgttcatgaagtgcaatgactactttgtgaacagacatgatgaagctttgaagcgagtccagttagggcagcgttggtccaccaaggttgatagtaagatgaaggtgcaaaaaagtaaggcgaacaaacacactgcaaggtgtttcgataagcagaaaaagacatacgaggtcacagagaggggtggtataacgcgtggtggtgttagattcggcgcaagagccttcaaagttgaaggtgaggggaactcatgttcttgccaaaggccattgctctaccatatgccttgctcacatcttatacacgtttatctgattcatgcaattgatgaggaatctcccaaccgaatgccgtatcagttctcttcaagagccgttgtgaacacatgggcaagtcgctttgagccatacctcgaccccacacagtggccaccgtacgatggtgaagaatttgttgctgacccaaatttgaagattaaaacaagaaggaagaggagatcgaaacgattcaagaatgaaatggactcgggtctgggtggttctggaaggaaaccaccttcatgcgttcaacttgatgctgcgccggtgcaaaatagatgctcattgtgtcaccaggagggtcacaagaaaactaagtgtcctaagcgtccaaaaaagaagaagtccaaaaaaaatataagtgttagggaggtaaatattttgttttcctactcatgttctcgcattcattttctgttaatatatgtcacattggtaactaacggtgaatttattactttttcatgtaggatggccgaggagagacaaccgctgacttacccagccttggaggcgtgctacgaggcccgtcatcgcggggctgcgatcgagacagggagggtatgaatcggcattgatccacttgtgcataagtatctgtagcatgtatttgacattatattaactaattgatttacaattgctaatgcagatacttcaaccgctccgagtcagagctcatgcccccccagtgttcgacgataggtacatcccgtacctaagggcggtcgggttgctcggggtggccttggtcgtgagcagaggaatgccagtgttcaacgctcctgcgttgacagcacttgtggacagatggaggcctgagacacacagcttccacctccctagtggtgagatgaccatcactctacaggatgtggctatgatcttggccctcccattacgggggcatgccgtgacgggcaggacagagactcctggatggcgtgcacaagtggagcagctgtttggcattccactgaacattgagcaggggcaaggggggaagaagaagcagaatggaatacccccgtcttggctgagtcagaacttctcacatattgacgacgacgctgagccatggcgtgttgagtgttatgcccgcgcatacatcttgcacttgttgggaggggttctgtttcctgatgctgggggtgacattgcttcgccgatatggattcctttggtcgccaaccttggtgatctaggctgtttcagttggggctcagcagtgttggcgtggacatatagacagctctgtgaggcctgttgtcgtcaggcaccatcatccaacatgagtggttgtgtgctattgattcagctgtggatgtggttaagactaccggttggaaggcctaagtggaggcaaagcttcactccttggccctacaatgagccagacatggagaagacagtggcctacctttttgagagtactgccactgcacatgctcactgggatgtggcatacaagcattatgtcaatgagatggactgcttacagcctcaacatgtaagtacttccaatatcacttctagttagacatttacttctttaattgagatactaactaacgacatctcttcaacttttgcagattgaatggttaccataccacacaaatgaggcttcaagcctgaccctgaactcgatgtgcaatcgagactctgactatttcatgtaccagtgcccattgatttgtttctgggcagttgagtaccaccttccgcaccgtgtcatgcgacagttcgggaagaaacaagactggccggttgaggacatctcaactggagttgaattacacaagtaaatatttcttatctttgtttgctttcattgtcaatgttcaattttgtaccatttaacccttgtcgatgctcactattgtttcatccccttctacttgtctaggtatgacagggtgagaacaaagaaggtgaaaga

SEQ ID NO: 11169 - DNA, 593 bp, Oryza sativa
  unsure (1)..(593): unsure at all n locations
cagcacacggttccaaattagtactagtacaagtgtagtagtactacactgtactgtacaacgcttgaatacacatcagtcacctgcgggaagagcctctcaaatatcatgcggtagtagtacgcctccttgttgacgggcgtgttgtgcgggtacactttggcagcgttcttcatcatttcatcactgacctgaagaaatgacagagtaaacgggggtcaatttaattaggcgatttataggacaggacacagggaaatggtcggtaattagtacctgctgctcggtgaaagccttcaggccannnnnnnnnnnnnnnnnnnnnnnnnnnnnnnnnnnnnnnnnnnnnntgtacagtatgtgctgtggagaatttcagaagtattagttcagaacacggacaaaattaccattgcatctgaagaaacaaaaaagaactgccatttctaccttcggcaggtaaggatgctcctcgtcgtcgaacgccttcctcataacccacttctcgatgcgaccaagatcagcattgtactgcgtgcacacaaataaattgtcaacacattctgatcagcagaaatgggactataacataa

SEQ ID NO: 11170 - DNA, 564 bp, Oryza sativa
  unsure (1)..(564): unsure at all n locations
gcccccaacaaggaagagttccacaaggagacctgccgcaaggtagcaaccgctgacactacaaccgcgactaacagaagctgttgctgaaattcctttctgatgctggcacgaaactgtctctgaattttctgactctgatgtacgtgcaacgcaggtgaaagcacttcatcannnnnnnnnnnnnnnnnnnnnnnnnnnnnnnnnnnnnnnnnnnnnnnnnnnnnnnnnnnnnnnnnnnnnnnnggagttcatcaacgtcgccatgagcatggaccctgagtggaagatggtaaatttctcgtcttacatgaggggaaacagctgatgttatgttatagtcccatttctgctgatcagaatgtgttgacaatttatttgtgtgcacgcagtacaatgctgatcttggtcgcatcgagaagtgggttatgaggaaggcgttcgacgacgaggagcatccttacctgccgaaggtagaaatggcagttcttttttgtttcttcagatgcaatggtaattttgtccgtgttctgaactaatacttctgaaattctccacagcaca

SEQ ID NO: 11171 - DNA, 1715 bp, Oryza sativa
gttgttatatgttgggacggagggtgtccagattcatagccaaaagttgttatatgttgggacggagggtgtccagattcatagccaaaagttgttatatgttgggacggaggtagtcacaatatttctatctaagaccatgttcattcagtattttttcattacactggagcaactatgcaattcttttacttgatatgtaaaataaaagcatgagaggcccatgaatttcacctatgattgtcatgtccatttctgtgtggatgttccaatgttcaatacatgcttattgcttttgcattgttcaatacagtcttatttttcaatacagtcatattttttgaagaaataaataccctttttgttagtatgatttggttaaaagctttggggttcacttccctcattggggtgatttttaagattcaggtctttatcatctaataccatagtttccactagtaaaatatctacatttgacattacagatcccttcttcaaagaaaggcaagctaagccgtggagccatgcaaaaagagcatgcattaagctgatgaaagttcttattatattacaagacaagtatccttattcatttgctcatgaaactgtgcttccagcagcagttgacttctgtttgactatgatcacaaatcctgaacaggcagatacatcttttgaggaatttcttgtccagtgcatggttttggtgaaattagtattggagtgtcaggaatacaaaccaggtcaaataggctttgaagcagttggaagttcagaacatgcaatttttgatcaaaggaagaacaacctttcagctactgccagcagcatggtgatgtctgttcttcctgctgaccgtattatgctgctatgcgatatattaataaggaggtattattctgaattgctagcaacccatatgccatatacaactgctccacagccaactgtttctgtttgcattcgtataatttcattcgtagttagcatcatgctgcagaccatctattgaagtctgtaagatagaactttggttctcttttaattagattacacaaattgttctgctatcactttactagacaagcaaatcattgggctaatcaagtaaagcaccatccattatataaacaacaataaatgttttgaagtaccattcgctgaaaaatattttattatagttacactaggtaattagtaattacaccttctttttaaaactaatgattattggtaaataattccataaatgtcttagagtggtttacaggagcaacgttcagcaacttataaagtatagacggacctatcgaatggcatgaggaaattatacacattttaattgctgtacggggaatgtgatgccgttatccatgtgtgagaggagtgtcaaattagtaaattacattggatgttgtttgggtttgatattttactataatattttatacaataccataatgtggtgtcattccctttggccttctcttctaggacccattaacgcaagttttaattcaactgcaggcacttcatttatacagcaacagatatgaatgaatggcattccaatcctgaatcctttcatcacgagcagaatctgctacaatgtacagagaaacgccgaccatgtgctgaagcacttttcattattttgtttgacaactacggagtggtatatgggcatttcatggtaattccaagtttaataa

SEQ ID NO: 11172 - DNA, 5071 bp, Oryza sativa
cgacgcgacgaggagagatcggacagggattcccatcgctaggcttcagcagattggggtctgattcgtcctcggatcgagctttctcaggggggggggggggagggggggtcaatttctggtcgggttcgcttctccggaaggaatcttcacgtgaaatttggtcgcgtttggaaggaaccggcggggggaggggaagaggaggaaggaggattttagccatggacggagccggaggccgccgtttttaaaagtggggcgtggcttcggggttcgagatggttcgggaacccggtacacgtgtcgcttgggcgcgcttccagcgaattcgaccaatgggatgcgagctttcgagcccgttgcgtggccgtcgcggtgtctgattttgaaccgtgtgccacgtaggatggcgttcgtccacgatcctcctcttccgtgtgccgtggaggtggaaaggggatataatcaggaccgtccgatctcgggccgtcaggccggatggtttagcgtttgacttcgtgtgccctcgaacagtagatccctgtaagcgtatgcgttcgtcatccgatgatcatgtgcatcagcatcagtttatcagccaagttatgtctgttctatttcaacgtaatcatttttatcggttgacggattatatagttgaatggcttgttgatgattttatgtagttgggtggttgtttcttatactccctccatttttcatattataagttatctgatacatcaagaagatgttgggtcaagtttctctttacatggagcctttgctcttagcctattgcagcccataagtttaacaaatatgagccgttgatttatatattgattaatggtggagattgtcttatcctttaaaaaacctaatctccattaagagagtacagcaagtgtccaacagttagttactactccatatacgtgttttgtgatgtctctcagttaattatattttttttatatcatgtatcaaattttacctagagattaacctaccattgattaacagtaagaacatccttcctccgtataaaaaacagcttttgggggtatgtatcaagcttttattcatgttcatctcatatccatcaaaagttgattctttttacacgaagggtttactaggtactccctctgtttcacagtgtaagactttttagcgttgcccacattcatatagatgctaatgaattagacattattatatatataaatttattagcatctatatgaatgtgaacaatgccagaaagctttacattgtgaaatggaggaagtagatgggagaaaacgaatcgagggtgcaatgataaaatggccttcatgattttcatcggtctttgtttaggcttggccttattggcttatgtgatttataagtcggtggatttaatgtcctaagtttagtggtggaattatacatctacctcaaaaaaggaaaaaaaacttctccaacataacttttggcttaatagtgttagagtggcttatggcttaaaaagaccaaacgaataaactgcttgtttgtttaggcttagacttttcgacttataagttagcttataagactaaacaaagagggtctaaggatatggtatccgcaaaagaaaccaataaccgtaaagcttgagagggccacgatgaccgaatcactaaaaaataatcagtcgcgtgcctcccctcgtggccacgtggcacgtgcggagaagagggctgcggtggccctcctgtgcggcgcatttctcgttttttttcttcgtttttttctttcaatttttcttttcggtttttctggttttttcccttgatttctttctgtttttaacatatatgtatataaattttgtattcgtacatatataaagtttgtatgtgtatgaatacaaatttttttgtatacgtggtgtttttcttggttttcggttttctaaatatgtatgtatttacgtagtatacaaacatggtatacgccatgttttttcttttttcttatttttttaatacgtatatatatatatataaactttgtatatgtcgtatataaacttttcatatatatatatatagtataaaagatatattttttatagtaatagtatagtagtagcaacagtgtaatagatagtagtagtggtagaggtagtactttaccactactacgagtgtgtttagttttttaaaaaaaagttggaagtttaaaaaaagctgagagtttgaaaaaaaaattagaagtttacgtagtatgtgtatagaaaattttttaacgtgatatgatgtgatgcaaagttgggaacaggtaataacttcacggcctactagtagtactgccgtactggtagtagtactactgatcgcgcgggggcattagcagtccccacgatgacaggtgggccctccaagtgccacgtcagcctaaaaccctgtcttcctcgccgcaaggccgcaagcatcgccaagacagaatccaagagaagaaaagttacaaaaccccattccgttattccagcattcgccgttgcgcttcagctcttctccctcccgccctctcaaatttcccccaaattctcatccaccaccacgccgagacgccgaccccgccgccgccttcttctgaagcgtctccccgcatccacctccgcttctctcctcgctgctgccgacgcgagcgcggcgcggggaggcgcaggcgcaggcccatggctctctccgccggggacgtgcagttcatctactccgtcctcgccaactcgctcagcgccgacgcggccacgcggcagccggcggaggccttgctcgcgcagtgcgaagcgcgccaggggttctgctcctgcctcctcgtgagccctcctccccttttcccctccgcttcgctactccaccccacgagccgcaggcccgctgatttcgggctaatttaggggcggttttggctttgcaggcgatcatcacgtcgagaggggaggaatccgacgacgatgtgcggctgctcgccgccgtacaccttaagaactgcgtcacccgctgctggcggaacagcgtcgattccccgtgagttctcatcctgtccaacatttaattctgtgttgatgtgtttaatttgaactaagtgcggttttagtagcgatcaatggtaacttgaaagtgcagcgacgtttcttacttggatgatctcatttgtggcgtttattcaataatgcaagcacagcaaatgcctaagttgctatatgcggaaggaagtctcagctgtaccatcacctgtacggcgtgtctagtggttttggatgatttttgtgctacataggattcttctatgtttgggcattacttgctattgctggttttggtccaacactttatgagctaaaaataagtgttcctgtttatgttttctttgttattttgtgcaataagattcacgatggtagcaaatcagcaaaacactttgtaacttggtacgatagatttttcttgtctccagtgaattgtacactagattagtttagtgggtcttatgtgtgagatttttatattagtagagtggcattaacttctgctggagccatcggcagaaatctcttgattaattcctggtgcttaaatgtccctggtggaaatctaatatcaactacgttgttatgtccaataggctgttactgactttggcctccattttttttgttctgaaacagcaagggctggattggcctacttctgtgtttttgtctatagacggcaccctgcatatttctcacttctggggcatacatatattgtctactttgattttctatgatacttttcatactgttataagccttgtgttctctctgcctttgataattaatgtttgatttctcgatgaatgagtttaaattgtattttgcagtgccatagataatgaagaaaaggtctacattcgaaaaagtcttctgctaaatatgcgagaagaaaatgggaaggtgcacatttgtaggcagtacatatttaacactgttgaataaacacagggagataataatggtagtattaactttgacaaatgatgtggtgtagattgcacttcaattggctgcactgatagccaggattgtatactttgattatccaaaggaatggtatgatatttttatcccatttcttatcaattgtcttatgttactccaactactggactcgtgactcgaaatgtttctcataattttggttattcaggtcagatgtcttctctgtgttggcacagcaacttcagacatctgatgtattcacttcatatcaagtgtctacagtcctattccgatctttgaagaaactatcaaaaaaacgtcttgctttcgatcagaggaactactctgaggtatgttcacttttcacaggacatcttcatgttcaaccgctcatcaccgctaagatatgaactactctttgatcacattgatcttctatttgatgcctactggttgtagttatcctgttgaaaaggcacacatgagcattaggttcttccctgtatatagctgacattactttgtgatgacgacatgcccaatacaggacactcacagattaatgttggcctcggccagtttgtttgataaacacatgacctttcacacttaattttaaggcttatatattttttttaaacaaattgcagatacatctgctctatttgagcctttgtctcattataagcacacagagtactttaattagcaattatgtatctcattctgcctttgtgaaaactattatgttatgcagatcactgtctacttgtttgattatatctggaacctctggaagagcaatgcacagattgtattacaaaatttttcagtgctttctcagcataattccagtttggaccaatcaaatgatctactgttaatatatgaaagatggttagtctgtttgaagatcattcgcgaattgatttgctcaggttatgcaagtgattcaacaaccatgcaggtactaataaaatatttatgttcacatatgcgcttttatcttgagctcacaacctgaggctagaagtctaacctaaatgtttc

SEQ ID NO: 11173 - DNA, 8793 bp, Oryza sativa
attccattgccaatctcttttctgaacattcgtgcatagtagtagttccggaacagtaggtggagtgaagtgatcactcagtgtaataaaatgaaaaggagaaacttaggaatcatcataattgaagaacggatgcacctcgtggcctttatacctctcttgagcatcaatgtactagaatggtgtaatacacaaaaattctttacatgtaaccctccctttttctttccccccttacatctcacatcacaccctttttttgctttctcctatccatgcatcctttatcagcaggacaagaaatgagctatagtcaacacagcccgcccacagatcctccttcaccatcctaaaccctccatttcttttttaacaaaagaatcacatgttaaacacagcacaagacagctttacgcaaccccagagaaagaaagaaaaatggtgaaaaaaagagaagaaaaaaaagtaacccaaagtaagaaaaagtgaggtggccgcggccgggcggcgggcatcgatggtgtgtcaacggtgttcttggctccttttcttgtctcgcagaacacttggaagctagccttatttggctctttttctactggtcggatgaccatggggcggaggcgatgcgggcgtagaggaactggttccaggtgtcggggaggcccgggaggcaccagtggatgcagtcggcgtacgtcttggggtcggactgctgctcgggggtgagcagcttcccctgccggagcgtgtgcaccgacgtgtgcgcatccttgcggagctccgacagcgccgtgatgtcgacgaggtgcaccggcacccggcggaacgtctggagcacctcctgcgccccggcgtacagcctccagtccgtgcccacgtccagcgacgtcgtccggttcgtgatcggcagcgtctccatcgcgcacttgatccctccgtagtttccccacgcctccggcctgccacaaaacgcgcacacgacacaagattataccaccatccgtccgtcaccacgtgatgccgtgatgggtagaattctgatgcagtactatggttaatgttccagcgaattggagccgtggtaccctagattctgtcgtgctgatgataccctgatgatgatggcactcgcatattggcgccattatcacagcatatgcacggaccgtgtaatttatgcggatactagctcgagattcttgcagggaccaaaactgatttaacttttgcttgtcgactactgcaagaatctctctgttttgagtattttgcaacagcaaagatgcaatggcaaaggctgatcatcattgtggagcacgattagtaggcttgattgctatcagtattatactactgtcttttgttgctaccttcaacttgatgtcgtttctctttcgtggggttagggctcgaggaaggaaagtgacatggagctcggggaattggattcgtatgcttcatctttggtagcgactagggtgggccatgtcgagatgcatgcctacaggtgggcctgggattttctatggtccaccaacatcagcttgtcaccgtagctcgcctctctccagctatccacatgactagttttgagcttactactctacacaaatacatactcaatttgaattattcttggttcaacaaacctcagttgtttctacacccacgtcaactagcatgttttgaagacatctcactaattaattaagctttttatagtattggctaaagaagcttagataccagtgttgaaaccgtgaaaaatgcaaatcttgaaccagtcagaacagattgtccggaccatgtcctgacgaagtacagtgacgcgttgtacgcaggtaccgtgccccacgatgccatttcacgagagacagctaccgatgagtagtacagtgctctatgatgggataccatgtgcagttgtattccgataccatgctactagtagctagttaatgtataagaggcttctcctactaatgtttctccgaaagctcaagagtcccctcaggctctcaccacctaattaaattacttgtagataaatattagtccagaaagcaagtgtgcctgctagataagtttcgtccatgcaaacgcaacacagttgctaggtacacctctagcacataattttgttttctgaacataccccaacacctaatcggaatggagttctctatgtaccatcactgtgcagcatatcttcctattgattggtagattaactccgagcgaactgtactgcgcgtgggcacgtgtgcactgtgcagcgaagtaaatcatggagaggggcaatgcaatgcagatgcaggcaaaggcataaatggcggcttacgtgatgtggttgggagacatgctcatgaagaagacggtcgtccggttggggtcaatgttgcggtcgacccacttcgcccacgtcttgagcacctccttgtacgccacgggccggtccacctccacgtactccgtcgcaccctggtcgaacgaccccttcctgtcacgtacaaccacacacatattttttcgcccagatcagcacacccacttctatatcactatatgtatgtgtgtacgctgctggggtgctaggagtacaacttacaggactttcatgtcgagggtgttgagccaccagatgtaggtgttgaagatgaggtagtcgacgccgagccagttgtgcgcgtgcttggcgatggagtgccactggatgacgcggtcggggacgctgtgcacctgcgggttgtccgagttcgactccaccaggaacggcgcccagtagaactccaccgtcgcgttgtactcctgcacgtagcacatacaccgtatcgtcagggggagatcatgtcggatcgacagcggagtacgtacgtgacgttgctgatgcctgctacgtacgtgtgcgtagaagatgttgctgttgccgccgttgacgaacttggtgagcgtcttcttgcccttggggatcacggactggaccaggcacaccatcgactcccactggttgcggttcagcgaatcccccacgaacatcagccgcttgttgcgcagccgctccagcagcagcctcgcgtcgaacctgcagtttttttttccccacaccacatcagctttcgttagacttttcctgcgttatttagcaaccagcgttgttggatcgccaactatatttgccactatcatcagactgtgccgagacacagatacagagcaagttgtagtagtatattctactcgcgtcactcacccactgtgtgactgactgggcgtcgctgcgtgcagctgttccccggttggaaaagagaataatttggcgtgcctgtgtttgatttaagtagtggctgcttcaacagcagccagatgctgagtgattagattaagcaaagcttaatccaacagggggtagcgcggctgcacagtacagtccgacgtcacagctcactaccagagtggtgtactggtgtggcatggtggtactactactctctgttccgtttcaaaaatctcgaacgttctattttaatttccctgacacgttcgtcttaattgtggcccgtaagtattcctacggttatttctgacttagcgtttcgaggtgaccgaccgatgctgatgaaaaaagaaaaagaaaagggtagaaaccggcatcaatttgggaaaccgacgatgatcgccggcgtgagtcaatgccggttacccggaatgcgtgaaacggcacgaaatgggcaagaaatggcgtgaaaaaattgtgggggaagaaatggcgtaccggggcaggtcgcagtcggtcggctgccagcgccacttctggtaggagtcgtcgcggcggccgttgcgcatgcaggtgacctgctccgtcaggaactcgcactgcgactccttgtacaccggcgcgttcacctcgtcgtacacccagttgccgcggtacaggtcgcaggtgtccggcacgctcaccacggtccgcagcgccgccgtcgccgcggcggccttcgccgaggactccttctcggcggcctcctcgtcctcccgccgcctcgcctcgtcggcgccgccttccttgacactcgggagcgtcacgtcccgctccctctcctgcccctcgtccaccttgacaccggcgtcggcggcgttggcgttggcgttggcattggccttggccacctcaatcgtgctgttgttgctgctgctgccggcggcggccgccatcgccgtggaggcgggcgcgtcgaggacacggacgatgacctcctcgccgcgcttggcgatgctgccggcggcgaggtgcgcggcgcccacggtctcctggaggacgtggaggtcgggggacttggcgcggagcgcgccggcgccgaaggggaagtcggcgatggacttgatgtcctcgttgtagaggaacgtcgcgaacacgaagagcgcgaacaccaccgccgccagcgacagcggcgcgccgttcctgcgcgccgccacgccggcccccagcgccgcctgcttcatcgcgaacggcgccgaggcgaacaccgacttccgccgctgctgcatctccggagcgcccaggaaggcctcccgctccgccgctttaaagaaaacttaccaccaccaccaccaccaagccccggcctttcccggtggcttgcaaacccgagaagtaaaaaaagcttcttgctttgcttcccctctcttcctcttcctcctcctcctcctctctatatgagtatatggaatggattaatggagcttcttgctgagctctttgcctctttgcttagctctgtgtaggctaggaggctaggagctccttggcctggctgtccttctcgactggacacctcgctctcctatatatgtgtcgatccctttacaagtttggtgacttttgctggatgtttgcccttttctttgcttccctttggtatgtttggtttggttcgcctgctttcttcttttatggttgcaagatctcttcccctccaccaacacttgtaaactcccccctgttctagctgcttaattgaatctcattccctttcattttgtatatagagagatagagggtagtactactactgaggggtgggtcaaatgagtaacatgcaaggctgcaaagcttccatggggggtttggaggttaagctgttgtacacatgtaacaacacaggcaatgtgcgtgtgtgtattctactactagtattctatttgttcgttgcatgttttaattatatgcctactatatcatacatttcgttttcattatcgggatacaggggtggagtatatggtattatggtgtatactcgtatggttgtaagtactcgttttttgtttatgcgatgtgagtgggtaggccgtggctgtctcggaagagtgcgagatggggaagcaaacaacggcgggggcggctacgtcaattgcccccctttcgcattctcggagatgatcattctgtatttggatgtaatcagcacgcagatactactacagtcatcgtctttgcgttgtgaacacactaatgatggaacgaatcgacgaatcagacaacgatacggtgcctgaatcgttccgattttcagatagtgttgcagcaggaggaaactgcagaatgtcgaattgttccgatcgacagtgttcggggggattggtctacgaaaatcattgttcaggaagtgatgttagtcatggtcagaggttgatttaataggaccaatgtttcgagcagaaaatggatattacagggggaaaatgaaagcaccgtgtacagcataggtgactgaaatttcaggtcacagaatagccttgcaaaaaaatcagagaatcggtgcatctttcagagtcggttgtcctgtttctgtagagtataacacgtttcagtttttacacagtgcttttctgcgggtgttcaatatgtttccaatcttgtcacgccaactcgtcttagctagtacgcatacgaattgatatcactgtctgttatcattttctttcaacttccagatctcaaatgatgtgcctatgtagggtcgaatattttcttttttcaaaagaatatcattgtcagatactattatttttcattgatcacttgctgtaaaaatgattcttctgttaagttgagaacattaacaatgtgtggagagtggagacatggatccgagaaatcggaagaaactgaaacatcttggacccagctcttgtttagtttgctgtaactcgtgaagtcgtgatcaggaactttccactctattattttgttgttcatcgggagaaatgctctcatccatcttccatgggtaacatcttgttacattgaggtctacagtttttattttcgagaacaactacaggtttaacagataattttctgagagacagagaaattcaattccctgttaaaaaaaaagagagagaacagcaatgtatgtataacacagtccattttccttcttcaggttattccatagctggaagcaatcagttgaatgttcagatgtccagttcttcttgagctcgctcacaagcaccgatcagtctggtggtatctttgctgtttggttacacctatgggaaccaatcctcttactagcatacagttactactatttttctggaatttttttgattttttttcatacctatttagttgacatgcaacaaataggtggatgtccacctaggcgattaaaagtgtttcccaacatgctattatagagaaaacggttgcacacaccatttccccctctgattgcaaccaccggtacaaattactccaaacttatgtcttgttcgaatactccaaacctgttgcctcgctttgttgagtgctatacggtatacttactgattctgagggaagtacagctgaaccactatcctgatccaatcttcagtccaaataggcatatgctacgtagtttaataacatcaatgttttatactccatcatggagatcccggtctgacactctgacctccatctcgtgttaagataataaagaaaacttcaataacctaaagtcacattgagctagctatgatgggttctcaacactgctggtcgatgagtgtagcgcagccggcatcgctgaagtcaactactctagctagtatgatttggttataattgagtccaggaacactggagcaggcacttgggccagctcaataaattttttccacatgaacatgacatagatgattgaatcgcatgcaacctgaacaccatgcttcttttttacctgaatctcgcccatcatccagacggacagttcagaataagcttgcatttcagccaacgtgggaaatagaggatccaagaccacgggagagatgaaaagttcctctctgcaactgctggaggaaatttcgtttttctgtagtgtttcttttgtcagaatgatgtttctctctacagtagtaggaatgtcaatatgtcattcacattttaggtgcaaatcattgatgcttttaaatcatgtcatcccagcgaacctaattctgataacagggcagtccaagtcaagtcgatgaacaatgcccaaaagtgaattgggtggttctctttttgaatcgtaggctagaaactatggcgatttttgtctattactcctaataatgtgcccctctttgtttaaccacacgagtggagcaagtactggcctatcagatatctatgcttcaacagaaccgtactatgtgatgaccaatcattcctgtgtagttactactagctcgcacttgcattagttggagtgcctatacttgtaaacatgtttggtcttctgaagaacgccactacaatacaattcatgtagggttgttttagcttttcttcctactttcggagcatatacaaatgtaagatcataacaaccatgaaagagagattaactactttatgttactaacggatccatgattccatatatgttgtgaaaatgttgcagagctagaggttgcttttgatcaaactgaaaacttcacccgacccactgtgaaatgtaaagcaccttgctgataactttgctagctaattcttttctttagcgaaagaaaagacctaaccgataatcttatcgctcaagaatatcgaatgcacactatatattcaactcagctggggtcaacaagaaggaacacttattcatggcgtttggtgtatacctcacggatggtactccggcagtttcgacatgcacccaacggtgtactagtttcggtggacagtggacacgatcatctgatcatctttcactgttgctctcaagattcagtattcaattagtactgtaccatctcgatctcctttctgctagctagtagttctactacaatactgattactgaatgatcacacataaatgaagtgacttcacttcatatagtactcagcgtaaatgaaactgttctctagcctgtgactagctgctataaattggtgcttgcaacaggtgatatgatgctgatgaatgtcactgcgtgtatgtgatgcacacatgcatgtacgatgcatcatatttcgcgggaaaaaaagaaataaaagcaagagaagaaaaaaaaatgcaggatcaaacatgcgtagtgtacggtgcagccgcaccaaccaatcttctcaggcagctaaagcggccccatcgatcagggtggtcagtcacaatgtctaaatgtcacatgtcagtggtagctagtttttgtctggtcaataaggcgatatacacatcgacggatgggagatgtaaagttgcaaatttgtaagggggcatatagcttaggctttgaacaaagtgggatggaagc

SEQ ID NO: 11174 - DNA, 31061 bp, Oryza sativa
cgccgcgccgaaatccgcgagcttcgcaccgcggccgtcgccgtcgcagccgacgagcacgttcctccccttgacgtccccgtgcaccacgccagccacgtcgtgcaggtaccgcagcgcggccgccacccgccgcacgacgccacgagccccgcgctcaccaagccctcccatggccgccgccgccgcggcgctcccgccggggaccagctccatgtgcaaattcctcgtcgtcgccgcgtccccgtcgtccccgagatactccacgacgtagggcgagctgagccgcctcaagatccttatctcgctctcgaggcacgccatcgccgccgccggcgcgccgcccttggcctccaccgacttcaccgcgaaggcccgcccggtggccctgtccaccgccacgtgcaccgcgccgaacgcccccctgccgacgcatttcccgcgcacccactccatggagaggcgcgccgcgcgagctcgatcctcctcgcgccacagagcagagcacgacgagaagccgaggagtgagtatgagaggccgaaacagagagagagggagaggggtgggtgtggaggagccgccaaaaaaggagaggagcagaaggtgtgagggatgcaagaaacgggggagtgtgctcgccgcgtatatataggtgtggggatcagttttatttttgtgggtaaggatttcgcgcggtttttccctctctcttttttccctcgctgggatttgaggattttcctcgcgattcgcgtgttgagggggcgatgggatagtgaattcgacggaatattatacgggatatatcatgagaataaattggggggtttgcgttggagagggggagtggggagggagagcttagccgtgcaacttgtgctgtgttatcttcggggtgccgctacgttgcggccacatgggcaaaaagatttgggtgagttgatggtttggatatatggttggatggcatttacttgcaaggtttggtttccattcacctttcactccgattcgctgaaattcgattatgtgttgtgagatttgttggtctgttatccagagtgtttagctcaatctattttgtcaagacagagggtggatatagaccctacttatgttgtttcaacattggcttgaagttgatttattttcatctccccagtaatccagtattttttaatgtagtttttgaaaatgagctaagccggcattcaaaaaaaaaaaaggcattaaaaaaagagctaagccaagccaaggtgaaataatctttcaatggaaattgactcattagcatgttattaatactccacggtccatacaaaaccgattatcaacttctttaagaaaacgagatttggagggaaaaacgtttctccaaatattttttaaaaaagaaattataagcgtgttggggattaaacatgggaccttgggattaaaacaatacaccccttaccaccgcacttgatagtgtatctcgagtatgcaaatttcgattgtttattggtctctcttttcttaggcttttgaaacaaactagcaaactttccaacgaaaagtgacctattatttaaacgttgaagtagatttcagttataattttaatatcgggttttcatgggtagaattgtatcttttttatatagaaaaacacagtagaaatacagacgctcacaacattcgcatactcacgccatatccctatgaatacattattcaaaagactaggacaacgtttcgtctcgctatcaatgggtgtgtcacctatcactaaaaaagataattagtcgtaaatgcgagaactcgtgccaagtctagaatttgaacctctgtgtgggtagtttctactacaagaaatctaaccggttagttacgctcactttgctaaaaactgtattttgtaccgcacaacacttaaaaagaggacaattaaatttgatatattactcttagcttgttctaattttccatatcaattgtattttgattataactacctatcaatctacattgttataatctagatctaccataacataagggtgcatccttttttcaccttttctttaattgatatgggaatttatatacgagttttaggagcgaacatttctttttaggtcgcattctttttagaggatgaatctaggttattagttgcacgcaaaacaagaaacatactacatgaatagttgagtattaattattaaaaaaattaaaaaagaaattatttgatttttaatacccttcctatgtaaaaaattttcgcacgaaacatacactatttagcctttttaaaagcatgctaatgaaaaacgaggggtagctaagctcaaatagcagtttagaacatacccttaaactatcaatcttttatatctatactaattctaattattcactccgaggaagcatcgatttgtaacagaccagttgctggttactaacatcaaccatgtatgtaagtagtaaccaaaacgccaccttaaatgaggatcatcatttttaaacgttgatatcacaatgcaagtagcagaaagaagccaaatctcgtgaaattttgttatgtcctcaagcaccggtatctctataaacatccaaaagacatatatttcggatttaggcgtccacgggtaactgcacaagcatcaaccaaaatatttcgttgtctgagatgcctccagctcaccaaaaggcagagtaaaccacactaccaaaaccctcgcaatagtagtgcacatctggagctcgatccctgctgctgatgtggcagcggagagctcaccgatggcacacgcacgcgacggtgacatggctggacactagtggcccaggggattcggctcgcggcacatagccaaccaataagaatcctactccaaaacacacacacaaaaaaaaaagagtgagactagtagtagattgggagaacgaaagttgtggcctgagacaacgaggcgtgtgcgatcggaggtggctcgtgggatccgtgggatcgcgtcgcctcgcgggcatttatcgcgcgctcccgctgctgcggcggcggacgtgcgcggcgccgagccacacaacccggaccggcaaagcgctctctcccgctggccgcaaaggccacgggaacctggccgttctaccagtactactactagtagcgcgtacttctcgccggaaatgtgtggatcaccggccgcgtcgtggcctctttccgcatttcggccgtatactaaagtttcgcgtctgcgtaggaggttgttgcgtttgacggcggagggtgtcgcgccacagaaaaagcccgaccggggttgtgcgtgcatgtaacctctgttttctcccacaaggggatcgttgacgtgcgtaagttgagaccggccgcgcctccaaatctagaatcataagtgggtacatgattgagagatcgcttctttataattgcggtttagatttgcatacattttggccatcatttgcaggtataatgccacaaaagccaacgagtaacgtggagcgatggtttccaatgattggaaggggaacattctgtgtgtgccaaaccgagggacaatccatgcgcccccacaggatatcgaaagattgtaaggcaacaatgcgagcttataaattcatttgtgccaatctcaacgttggggagtacacattggcacgataccgaggcaatgtgtggattatgaggttgttcgtgtatatctccttatctacgggtctggaagattcgggctgcgcgagataacagtttttgctagttattgccggcgtatatatccacggatggacccaaaaatattgggggctaagatgcctagggaagaaggaattcattcgcgcctgatcttgacttttctcggtatgttgcaggcttagtttttcccttagcgcaagttgcaggcttagttgatgcgatcaactccgcatgcatgcgcccatgctcacccctatgcctaggataagatcttctttgattctggttccatggtgagaaatatccaccaaaagtggcaccagatcggaccatcagattatccagctagcataattcagtccccgctgtaaaatgcgcagagaatatcactgtgacactgtcccgtatttcgctccttctcgatcgcctttgctgtacgcatacgctacctgctcaagctagataccgttccatcccaaattgggggtgcttctgctccctgataacttcataaccaactcatccatctagcattctagctagaaactgggaaagctgcctgccccacaacttgcagctctcagcatctcactatacgtctataccacctttcctggtcaaaaaccttttctgcgtcgctttcgggagggagctgcctccgttccaggacaaacccaaaccggagccggtaaactggaccttaattgattggctaaacccagggcaacaacagctgttttcccccattaaacaatccgagtgttcaccccagccagattctcagcactactcccctggtccgatccgaagatacggtgtacactgggataccggaagaaaaggggaaactatcacgacgggagaaagcagtcaggtcaaaaccctccccccacaaagtcggcacgactccagcagcatcagccgactggccaaaaagcacggggtttttttcgcgtgcgtgcgtacgtgatccccccgcgaccgggggagcagagccgcggaggttgacgtgcggtgccggtgcggggtggggagctcgtttcgcggcgtcggcgtgtgaggcagcagaggccgcgacgacgtgagctttgccctggattgccgcgggctatcgcgtgggatggcgcgacacgggagggcacgggaacgtgggtcgtggggtgggggggccggggagaccgcgcgcgggggccaggggccaagggtgtgcccgccgcgagggcgaggacgagagaaaccgccgcgcgcgggatgcgtgcgtgactgccgttttttcggttcaccgaccggtcgttttcgtgccagtttttgacgcgggtgggactgggagcgaggccaggggtcctgatgctgatgccgatacgtcatgtgtggcccggaacggctcggcgtgtgtggactgcggcgagtcgtgccgtcacgcaggcctcaaactcctcttcgtcttcttttttttctttctttttttggtcgagccaatatgtttagggaaatattgttcatttgttcgccgttaccttggcgtttacgagattagcaacgtatagggtagtattatatagcccagcaaaaagtatgcccacgttgccgtcacgtgcccatctccgcggtgaaagcaagatctctcgtgcgctgtttgtgattttggccctgtgttggagccatgttctgaaagcgatgcgtacactgtcactgtcaaatccgcgcaaaaaaaaaaaaaacattagcttgtcgactcctcacctgactcttcgagtgctgaaaaaattgtattactctagtacgtgctgctagttgattattgccgctactctccagtaaggtccacatgtctgtcaatacgatcaagggggccgtggcactgttacagacttacagtgccactgcagtaccaccctccttactgtcgcatggtgcattgtgatccaatatgacaaggatttcgccaatgaggcaatgagcaagcatgaacaacgagaaacggtcctacaggcatgctcaattcaattcaagggtgtgctcgtgtgtaggcatgccagtcccacaggtacatctggcaggttccacaggggtaaagagggaccgtcctgtaccggcaaacaaaccagctgagcagcagcccctcctctcctataccggcaaaaccgccttttctattacgcaaagccaaccgttagcgcggatcgtgccggcgcgcgcggcaacggcgcggcacacgtccatcgaatctaaccgcggcggcgcgcgcaagttgcccgttcgcggccaccggcccgtgagccagcgagacgtacgccggccgatcgatcgatccatctcgagacacggtctcgctccaacgtacgcacggtctcgggcccgacacgggacagggcaacttggtggcgaaccgaagctgttgcgcgcggctgagtgagtgcgaggtgaggtgcacggcaccggccagccgcaaagccagcctgacgctcgctgctgtcctccagaggcttgcgagagccggagaccgtttctttcctttttctttcttttttcttttttcggtagtagcctgtgacatctgcgtggtcgatcgctttgcctgataactcacggggtcacgtcgcggtgttgccgcaattaggttaggctagtggcggcgctgcttgcatgagctgggcggctgggtcccggcctcccgggcatatcctgagtatttagcctacttggtactacgatttttatggctcgaccgtgcaatggatcaggaattaggatcgctcggtatggcatccgacgtaccaggacatgctattgctagaggaatgaattccttccctttgggttattaaaagcagtaagtcggcacatttattttataatcgtcactgtcactgtaactgtcgccgtcacacgcaaagatatttatgtaccatgagatttgagatggttatcttgtttttcttttgtactaatttttttcggggaggttatcatgttagtgatgatgcagagattatatcatgcaggttatagatatcaattcgataattttgtatagtacagttccgcagttccattttcccaattggatcatcgtgatgcagagcttcgagacctttgtttttgtaggattcaactgctcatccaagttgacgaactgaattctgaagaaaaggggaaaagttgatgaagaacgggtcgctgtcgttctccaacgcacttgccgaaatgccaaacggaaaaactaacatgagctgagtgcatatataggattttatggggcagctgcaaatggggaagtgaaactggttttcagttaagatgaacagtggataattaaagcagcgaattcaaacactggcactgtttactatttattgttaagaactccggtcagaaactatattgagcacaacgagaacgtacgattattatacttgaaataatttgccaatcttttcacttatacttatgtttgttagtcaaaatttgaattttcaaccttaaatttgaaggtgattttaggtttttctcatcgaagtttattttcagcctttgtttttagatcaccaagaacatgtatatataaatcttattcacaaattacttttcatttgtaatgtaaatatgacgtttggcttattccacgaataagtgaaacgatgaggctgaacatcaggtcttctctacaaaacaaataaggaaaaagtccgaattacctctgaactattggtgagttacccctcccccgacttaatccgaagtggtttggtcttacgtgacgcgtacgtggcattccaatcagaaaaaaaaacaatgggggccacatgtcatatcttccccatcctcaattgctctcttcactcgagtccgaatggcagaggcggtggcgacgagaaggctgctgctgtggaagcaataaaaggagagatggaggaggggagcataatagagctaggccggtggccatggctatcttcttctgttgtggcggtggcggtgctttcagtagggtgcggcgggtctcggttgtggtgacggtgacgatagcgacaagctcatgaggcggctgtggaggaggagcagcctccaccgctcgccgcccctgccacttgagctcctccgcctcgtcgtacgaaccgattgatggggaggaataagagagaaaggagggggggttgagagggagagaatctgccttgcgttgccatcctcggcatccagctgtgcctactacccccataatagatcaggcattggcgttggcgtgtcgccatcctcggcttcctatccaccgcccctgagctgcctccgtccccgcccccgcccgtcgccatccttgacttctcctccgccactcggtgatagagagagatgtgaggggagggaggagagagagaggattggggaaagagataagagactgataagtggggtccgccgattttttcaaaaaaaaaaggatgattgtactgccacgtatgcgtcatgtaggtccaaaaccactccggattgagtgtgtgtgtgttgggggagggggggtcgttaggtattaatagttgagggtgaaagatatctggttttcggctccgcctccggggataattcatactcattcaatagtttagggagttatttctgactttttccatcaaataatgtgtgacttaaccttttcctttttaaagactaccaaatttggtcaggatatctgtttaatacgaaagtcaatgtctcaatgcaaccaaattgtgcctcagacttgggcagttgggctgaacacatcaggatatgcaccaggaatatcttcatcagcatgtgaactaattctatggtgtagtttatttctagtttatttcctgaagaacctaaaaacctgtcagtacagatagtgacaatgtcgcttttgttgtatggcccatgaactttagcgcctccgtcgtagtgacaatgtaatttaatatttttaccgtgtaaagtgtggaagcgacaagtacgcaatcaactttgtaagcttctttctttacttaaaaagcgatgaggcaactatgaaaaatgaagtgctcgaaacagcagccaatgcacatctgatcaccctgcacaaactctgaaaatgtagtccctatccgattcctgctgggaagataaatatgcaaaaaggtcattgaaattttctccaagtcgtgggtgattttacgcagagattcagagaaccataattctgtaccccggagggtgaatcactcacatgctggtggatgcacctcataacggttaaaagactttgcttgtgtgcatcaaattgtttgctcgagatgtggagtgtggtgtatcactctccccaactggcaaaaacgatcgatgcatgcattatcatttgcagcagagagcatgtgaccaggtgaattgttttcagtattggctgttgagcaagtggttggaaccggcaggggctaaaagaaagaatatacttactctccgataaagcattgaacgcatgaggcgagtcgatccttcgcaccggtatagacaacgactcatctgtcgatccagaccgtcgattctttggcccgatagcctccccacgatgtgtggtcgctgatggaccacgacgtatgtatgtacaatctagaaatcggcagggtcctacactcctattggccagccaatgagccaattcgacgctgtactgcagagatatgtggccgccgaaaaagatcttttatttggcttcgacgcagccccacatcccatgctgcaatgcaaccacatctgcgcgtctcactcacctgtacaaaacgccaggggcgcatgcagaattgcagacgagaacggcagcatcaggcgcggctaatgttgggcgggagatgtcgctgctggatgaagtggtgcgcgcgttggcgccttctgggtgggacggtccagcccataggccattggactccacgacgatctcgcgcaaaagtttgcaaatcctacggggaaatcttacgaaatctcgacgtttcaaacggggccggagaggcggagattgaggaaggcgtagcggtcgtgcgagcgtaattgcctggccagagaaagaacgtggcgcatggcgtcgcgggaggcggaaaacgaattgcacggagcgacagcaaccggcgcagaaagcgtgcaagcaccttggacgatcggtagttgcagaagcatgtgacattacatgagctctttttttttctttttcgcgagaggggtttttgtccccgtttttttgtgtggccagcagaagaggtagtagaagttagaaccggatccctcgagggttctttttcaccggaggatgcgagtgaaagaggatctatcacggcgtcgtcacagctcggaattggatgcgctatcctggcgcaagtagccatcacgatttcacgatgatgaggagggcgcggttgagctcaggtggtgcgcaagccagccggcgatgcttagccttgtgctcttgttgcgtcagagacagcatcttgtcccggatttggttgtcagtcagggaccccccttgtcccagctaacaagtgagatcttcagcaaaaggatccagcaatttatgtgttagtgtcagtactttccatcgcaagctgggggacatgtttgttaatcacctgtagcagctgtcctttggtttcaagttgtacttgaaattcgagggcagttgtctgtggtacatatcccagaagtttcactcatcaggctgaaagcctgaattcagaaacaatggatacaaaagcccaagtttgctactaatgggctaagcattcatcttcttactggtcgagggccgagcaataaacaagaccatcagccttccagtttcacacatgaacagttgagcattctgcatctaaaagaacagttgatcacagaagcaaaacaggccggtctacgctattgcaatttactactccatacatacattgcggtcatcagcacacttgtatcaaaatccaatagggcgtttcaccattattgattgcttagaatacatcagttcattgctccggccagtactcaactcttggctatgaacaatctaatgtctaggtaattgaacagatacttttccgatcaacgattttgagtttttgacgccttgtccctctaccaccgatccaaagtgatgaactgaacaaatttgagttcatcacttaagtacggggattacatatgagccggctgcagatatgatctctcatagaggcccatcacctgatcagccaccgcccacattatagcctgaccaggtggaatcctcataagcctcggaagcaaacctttccaaagggctctgagaccctcttcagtgtatattgtgcgtatcgcgtggaccatacccttgtacttgatgtcaccagttctcccctgggccatcagtctagtcttcacgacatcgaagggtccagtgcagatcggacctgcagttcctgcaagaaaacctgaaatcattgactgccatggctggagaaccttcccatctccttcatgcttcttccagagaacaatatcaaatgtattcttggcagtgaacattgcggcttggtttgtgccattacgcatgacggttggtaatgctccagcccacaggccaaaaagaccctcctcagtaacaatcgtcctagcacaatgtattggccccttatatctcagcaggtcagggcttagacctttttgttgctgcaacctgattttaaccacctatacccaccacaaagaaacatgacaccggtcattccagagaactgaacctttaaagaaatgctggtaaaaaagtataaactgacttccaccataaacattataataaaatgcatcaatgacgaacttgggacaaattgaaaacacactattcgctatgattaacttatttaacttcatagaacatggagttgcataaaaacaaagtgcttagaatgactcaagttttcagatcgcaccaatctaatatagggagaaattccttctattaggttttcaacagtatgaaaatatagaatttccaaaaccagagaagaataaccatctggtgttcacgctaacttttggtttgttcgttgtacttcaatttaatttctatctttgttagcttctaaaatatgtagttgaccatcccaagaaaacaatcagatgaatatcatggtacaccaaccgtttctgttaagagagccaaggagaacaaagatagactgacggccagtacacttaaaattcatatcgtactgatattgcctccacatcagaacatgtcatttccttttcttaagatcttcttgtcttttgctttgtaggtactaatactatatgttgatttccaataaacatgagttacacgatagcgatgagtgcttagatgataaaaatgaaagacgagtcattttctatagagatgaacagaagtgtaaatttaacaagattatgcttttaaaaaagaagcatacttcgaagtgcacgcaggcctttcgcatgtttggtctttttaaagcagtgggcgatttgtggtaacttcttggtcaaatactatgtttcaaagcatgaggtctttgacagagttctgatgggctaccacatccttggtaattggtttgggcatgataattatgatttgactgcaaagtgcaaagccaccatttctttaatcccagctcaaagttggcaataacacatctaaacatcattcacagacaagattaaataactggtccacccatgttcctccgttccttttctatatctaaagtagtgaatttgtacttttacatcggtgtcctatatggcagctctcgcgagttcttattccggcaagaagcacctagagatgttcctttgtaaatataatttattcgcgctggagcagtgaacacatttttattcaaattctataaactatgtcgcagtcgcagagaaaccaagaattcaagaacgattcaagatctcgcagatactccaggtaagtaaaaaaggaacagatgcaggggtgatcttgcctcgaagggggtgacgatgaggagggcctcgaggacgccggcgccgaacccggaggcgaggcggccgtgcgcggagaccttgcccgtgccggggtccttgaacgcggactgcagcacggcgttggagccgaggcggagcgcgtacttgagcgtgaggtgggtggcgaagggcgtgagccccttccagagcgcgcgcacgccctcggagcgcacgacggtggtgccgcagtgcgcgatgccccggtacgcccccgagcggtctagctgcagccgcgtcttgatgacgtcgatcggctgcaggcagcacgcctccatcacgccgccgaccgaccccgccgccgccttcacgtagggggggaccggtgccctcccgccccgccgatcctccgccggcgaagcggcctgcggtgccggcgacatcggcggcggcggcggggaagaggagggggacgcggcggcggcggccatttcggaagaagcggcggcggccttagcgggtgtggcgcacgaagcgggttttggatttgtttccgtgggttgctttccccgctgctgaatccgagaaaagtgtggtgcacgggcgctgcttatgtaggaatcgatccgagggcgcacgcttctcgcgcggccgtcgcgtcgcggctcggtccagaagaccagggcccacatggggccaacctggtccagcaggccgggtcccacacggcagtgagtgtaacttattactactggggtacacgggcacgttacgtggcggagagagattcccgggaaggtgggggccgcttagccgatctgctggtcccacttgcaagtggttgtactaccagacggcggccagttttcaggagcggcgcgctacctacccaccacaagcgtcccctcccacttctcattccttttgttcgcgaaagaaatactcccaccgctcccattccaagtgtagacatggttttcttcatccaattttaattgttcgtaatatttgaaaatatttttaaaaaattaaaaacataaaacacgaataaaatactatttatgttttatcatctcataacaacaaaaatactaattataaaaaaaattgcgaataagacggaaaatcaatgttgagcgcggaaacttatggttgcacttaaaatgggacggagggagtaagtctaggccgaatctgattcattataggatatatcgatcacatgactatttaaatccgatataatttgactccctcaaaagttttaaggacggttgtactgacgtgacgtctatattgtggtattgacctgatcttcgtccaacgtggccgttaatgtgatatttttatagcattagaattataaaatatatatgggtcccatttatcattcacacaaaaaaaatattatgggacgcactgacatatagagtccataatcatactctccttcccttcttcctcctctctctccttcccatagaggcatagagctgaagctgtgcaacggcggcaaagggtggaatggtgacggcgagcagcaaaggctcttcttgtcactcccacagagcagagcggtggattcaagccgtgttgctatgagaagagctgtagaccgtggctggtggtggtggccacgggcgagagcttggcgacgctgcctctccacctcccttctccacccccgatgatagcctcgaatggaggcgatgcttcaacaggcagcagcggaggtataggagtagctcgatgagctcggcggcggccgacgagcaagagcttgacggcgttgcgactggccctcgcccaaccaccactggcactctcgtctccgatctccttggtcacagccaccgtcaccaaccacaggacatgccaccatcgctccaaccctcacccgccaccaccgctactccgcccctttccactgttgctgctgctctagctctccccacagatgcgcgaagagggagagaaagagaaagagggaagtgagggagagaaagagaaagaggaagtgagagggaggaggaagaaggaaaggtgatgatgatcgtggacccaacatgtcagtggatcccataatattatatatatatatatatatatatatatatatatattaattctaatgttataaacgtcacgttggacgaaaactaggtcaacaccgttacgtaggcggcacgttagcgaaactatcctctaaaaccacagagggagtcaaatcataccggttctaatggttggggatcgagatatatgttatcgttcttcagggatacgaatcatattcgcccactagttaagggagacaaagtggacttattcctcgcgaaaatgcccttgggctgaattgtgaagttggattccatttcggtccattttttatgttgcgaaataaatatgttttttacactcaaaagacttaaaaaaaatccactgtttgaaataagccctcaaattcttactccccggtaccaaaatataacaatctataacattcaaattttatcttaaaaataacaatttattcatctatattccttcttcttagccaaatacaaccttccactttttaatttcttcacctacccctctactcaaccaatgacaatatttttatatttagtttcacatgctcatttctttccaaaatataataatttctatgattcaaatcatgttacttttctcattaattatttcccattcaaaattcatctcatcctactctcacctacccttacacgtctattgagggacaccaaagtcatttcttctaaactataatatctgctaaacaacctataaatgtttatattttagaatgaatgagtattttctttgatatttgtgtcaaatctgaaaacttatgtttttgacaaatggagtactacgaggtattatatttttacagggtggtatattttaaattagttggaatatggttcatattcaaaattttgaagtacattatactgcaataatcattttcaaatctctattttgagtgttgaaatcctgggaacgaagcccagtatatatcaaggcagaaaattaaagtgatagagaaaaaaaaagaactacataacaaaagcaattaaaccctttgtcccataaaaaaaattctaaagataaacccatacaaacgcttgtccatattcattcttagaagttgtctgtttttgggacagagggagtacatagcatactcttcctatatatagtccttcatgtggtaatccaaacaagcagtaggaaagtagagagagacataagcaccggtagggaagaccgcaattctaatacagtaaagaactgtatctaatagcccagttcgaatttggaggaaaattcctgggttctgaatctagagtggtccaagctcttgaattttcactttacgctagttatttttaccttggttatactctggaacaccctaacatttttgtctaaccacattcaacctctcttctggtaaaactctaaagatcttcaatttttgatcctgcattgaattggagttctgcaaacttaacaattctttttttaggagaaccaaacataataattctacatgcactgaagttacatgcctgcaatcctttcaggatgagggatgagctacgatttttttttattgagtaagcaccatgtctatggtgtgaccatgcgacagcctggggcatcatacctgttatttcgtgtgagagaaggtattaagccgtgtttagttccaaaataattattcaaacttccaatttttccatcacatcaaaactttcctactcacataaactttcaacttttccatcacatcgttccaatttcaatcaaacttttaattttggtgtgaactaaacacagccttatgcaaagctttggagatcagtttcttcacgaagaaccattttcacgaaaacatatgacgtgcaaggctttggagatcagccaaatttgtatgaaaagttttgaaaaaggtgtgtgacatatttacgaaggcattggttcttcacattttctaaaactagctgaacaatctgatttcagagggttgggattgagaaagagacaccgttgagatatcagatcttagttcaggttcagaagatcagctttgtgtattcagttcagacttcagagcttcaccaactgcgtttcctgcgagttccaatttcttctctccccagtccctttaccacttgaatgtccgataagaaactttggtcaaagtagacgaagctcgacacgttaatgacagaaacacgcatcgccgttttaatctccttttcacacaatcacacgggactaagttcacagcagaagcatgtgtttacagctactaatggcctccacgaacatttaacttgaaaagaaaaataacttgactgaaagttttcggtccgagcacacatggccatgtgcgaatcaaaattttagaaaaagaaagaaagagagaaataaacgaatcatagtcatataaaacattctttcgaaatgacgcatgccgattgacttgcaaactaaaagcggcactaataattggcacaagctagtaattgctttgtcgataatattttcagacaaagaatcgtttactcgatatatacaaatccatcgcattcaacgcggattggctgttttcttgtgttgataattgaacgcgcatttcatttggaagcagaaacaattctgggtgttgcttagcccggtggatcatggggggaagtcgcggccgttgccgtttcagtcattgcttccataatttgatttctcgtctcgcgtccaaatgcatcgcctcgtcgaaacagaaaactggttcggttaatcagtgccaatcatgtgcacacggcctgccgggtgcaacacgcctgaagattcagtctccggagcagaacagacggtagtagctgtacgtaaacgtcatactacctggtcttttcaaaattgtcattatgtttgggggctgtttagttccccaaaaacttttctcaaaaacatcacatcgaatctttagacatatatacggagcattaaatataaataaaaagaaagactaattacacaatttgcatgtaaatcgcgagacgaattatttgagcctagttagtccatgattagtcataagtgttacagtaacccacgtatgctaatgacggattaattaggctcaacagattcgtctcgcggtttacaggcgagttatgaaattagttttttcattcgtgtccgaaaactccttccgacatccagtcaaacgtccgatgtgacacccaaaaatttttatttcaccaactaaacaggccttgaaggtttcaaaaggagatgatattatcatcattcgatccactctacaacgtactaagtgcaattgtcctagcggaagattctgctacggttgggaaatggctcattttcccctatggatataagtgcaaactttttttttagataatgataagtgcaaatacattatggatcaaatgctctcaacatcttgttccttgtgatccatatacttcagtacattagcatgtgaagaatacactcgtgcaatgaccgaggaaaggttagatagttttcaatttcctttatgaattgaattatttccagttgatgctatgtgcattctaagtacagttctatcaccttaatgtacttaattgattaagtttaataaaaggctaaaagcttcccattatctttaaaaaaaattcttatagaacttgtgtgatctcagcgaagctaaagcttgcaaaatcaaatgtagattcctaatctgatattaagttcaaacttcttgaataacaaaagtggtctagcaaagcttagggtgtgtttggttgggctgtggcttttaaaaagtagctgtgggttgtagcttttcgaaaagcagatgtgaaatatgggttgtggcctttggaaaagctcgtttggttcaacagctgtgggcgtttgaaacaactagtcccgcttacaagtgggccccatatgtcacacacatattggatcttcttcctctcaccatcatgggatgcccgagcttgctggagctgctcggtcgttgcgatgcgccggccaaagcgcttgcgacgggcggaggggcggcgatgccccaaccctatggcaaagcagcgcgtgaggaacgacacattgagaagcgacggggaagaaaagaacgaaccggtatcaacatcataaccaatatcaggtgggtaaaaacttaacccaaaaacagctaaaagcagggggtggaggtgctttcaatttgtactagagcaaaagcagcttttgggtagaagcagctatggcttttgagccctttggttgcttttggcttttgcaaaaacaaaagcaagttcaaaatcccaaccaaagacacccttagttcaatgttcattcagtcaccatcagagagcactgagcaagtatgccaatcatctcaaactattcttttatgctcagagatgatgtagattccatggcgaagtaaaaaaaaaaaaaaacccttagggtatatagtatgaggtcgtatgcgaagtaatttccatactatgctttgcatttaagcttagctaggggtgtttgttcagattggagcagccttggcaaaatataaacaaagtaatcataaataatttatcggtaaaatatttatatttgtattgtttgcagtaaaatgtttatctatgtattatgtttgcggtttaaagactcaaattttgcctacaggctttcagccaacccaacaagcaacacaacacacccatactgggccaagaaatagaaacatcttaacaaagctagtgcgactcagataaatattaaaggatatcttaagctgctgtgtattgaatcaattaaaatctcagagaaactatccataccaactaaccatgtacagaggcaaatagtagccttacagtatgaggtgagtagtaactcgccttattacattagaatcaaagaatgaattgaatcagtttacagaaagaatggtgctatgaataaaaagaattgaatgttggaaccccagcaaaatagtgcaagctcctaaaattttgcttgccaagtgacatactatctgaataccctcctcttccacacttctttaccaccgctctgttagtgcgctaagctggagcgagttcagtctcccttcaacaagttaaaattatgctatctgaataccctgctcttccacacattttaccaccgctgtgctaataagctggagtgtgagttcagtctctccctccaacgacaagttaaaattatcttgagaattgctgcagctgtatgatcacaatgctgatatcgtcagtcgagcccctagtaaccgcagtttcgacgagcctcctgcaagcagtcatgcgagaagctttgtcgttgctgatgtaaagcggcctggcaatgtcaactgcctcctggttctccaccttgtcccacaaaccatcagaggcaagaatcaagaattcgcactgcgaatcaacacccagagttgtggtgtctggatcagacaccacccactgcttgaggtgtgcatcaccgatgcctcttgacactgctaaggatccctgaactcgccatgttcctcggtaattcaccacgaatccaccctgaaattgacagaagaaaagcacataagtcttcaactcatgatagctcagaactcagattaaaacactctgcaacaagccaacatcatcaaaggtctacttagctagtgcaggaaatgatgcaagaaagcgagaatggcaagtgcaggcaccacttaccagattctcaattctttccctctcatcctcgcgcgaggcccggtgatcagaggtgagcgcctctgccttcccggcgcggctgagcacggcacggcaatctccggcattagacacaacgaggccacctttctgcagcaaagcggtgacgcagcaggcgcccccgctctcctccctcttgaggaattcctcgtccgtcttcaggtagcaccgcttcactgcctgttcagtctcgccactgtcgccgccgtccaccttgcacatctcctcggccatgaacttgggcatgttctcggcgacgaactccgccgcgctcttcccgccgtggccatcgaatacaccaaaaaaggcctacacaatcgaaaataaattccagaaattttagtacagaagaagaaatctacgaagtctccccaaaaccctctcctgatcgaagagaagtgtgaacttattttacgcgaatcgaacggagaagtcgtgtggagcttaccactttggggtctccgccgagggcgaccttggccacatgccggtcctccatctccacccttctcctcccctttcccctccggcagtacaccgcgaactcctcgccgtcctcctccacctcgttcctcggatccgattccaccgcggccaccgccgcggcggcggcggcagcggccgccccgccgcacaccggaaccacgagaggggccgggcgccgccttttaagcacggaccccgcaggggcggagaccgccgcagccgcggcggccgacggctggggcgacggcgtggcctcctcgcgcaggtgggcgcgcagcgcgaaggggcggagcggcgacccggcggggggcgcggcctgcgccggcgaggacgcggcgacggatacggactccggcgaggcggacgcggacgcggccttgcaggagagcgggcggcgcgacggcgagaacaccggcgagctcgggatggcgaccgtgcaggacatcgcgactcgcgagggctctatctctctctcggagacgcggtcttcttcctcctcgccgctcgcgtgttccgcttttcctcgggttgtgtttctgttttggatgggtttggcgaattgcccgttggaacgggcgttatatatggggagggtcaaggacgcgtgcggtggggaaacggaccgataagcacgaagacttcactgccactagaaagaaatgggagaagaatagatgcttcggttttactgaaatgttctgttgcaaggtgtaaaacttttgtttaccaacaagaaattacaaatacctacagtagctttgcatagaaaatgcacagttactccattcagaaagtttttttaatatcattcagaaagtctggtctaaccagaaaattcgttggtaatttgtaaatatttttcaataatatcttcagtgctagtagaaaacatcatgtatgttagttttatttaaagaaagaaaaataagcacagatttctattaattgttgcattaatattcatgtagaataatttaaatttacatgctgtcaatacatttagccaatctgtcttaaggaaacgattacgttcatttcgatctttaaactggagacagtgaaagctaaataaagtgactaacttgcccagctatcatatcactataccagaaatacgttaatggagtagtactagtagtaaacaacaagaaggaagatgcgtgttagcgaggtaatttccgacgataaaacggataagtccaaacacggacggccacggaatagattactagtactacgtcggtcgctgcggcggattaacggaggagtgagcgcgcgggggagtcaaagatacgttaatcccgtgtgatgtgagaaaccaagagagaagcttgtgactcgcgaggacgcggtcagtggtaatttaacttttgttttgccgctccattattcaagcccccgaattaattgattggcagcgaccgtcccgtcgcgatcccgtcctcgcgggcacaacaccagacaccggatggatgcaccgggcgaagggggccgcgtggcgtggggagtctcccggtttgggcggcggttgcgtgtgtcgtggtcgtggtgctgcggccggagaagggagatcgccattcgcgaagctgcctcgaagctacaggcgttatacgagtagtagtttacacggtctagacctgttgggatttggatgcgtcgtcgacggttggggttggggaggagacgctgactgtgcctctgcaccgcagttggacctgacacggtggggacgggacgaacacttctccggggccccatgtcagtgactcgcgtgcatgtgctggcctgctgggtgagagcgagagtgtgaaaagagggaggcaatcccgacaaaaagacgggagccgggagaaaatgtagccgttggcaattgccacgctatggggtgcggcggaaaaaatgcgggacttcctccatcaaacgggttcaggctgtccgctgtcagtgcagtgagctcacgcagtgtggggtgctgagatgggtcatgggtgggtgtgtgtggactgtggaaaggtggcacgttccgttggcttggcttggcctggcctgggctggcgtgacgtgtggtccgagtcggagtgcacgcgcggctttggtcgggtccggaatgccaggtcagggtggcgcgtttacagtttcgacccatggcgacggcccgggacggtgctgactgctgagcagttcagagttcagacggtgcacgcatcctctgaagaaacaaaattacaggtacctttcttgagacacaacatacgttccagcagcacgttccatttagcatcctgaaggacgatttggccaaagtagtaaggcctggtttagttctcaattttttttcctaaaaacatcacatcgaatcttttgacacatgtatgaagcattaaatatagataaaaataaaaattaattatacagtttgcataaaaatcacgaaacgaatattttgagcctaattaatccctgattaaccataagtgttacagtaacccatgtataggggtggataacgagccagctcggctcgtttgagctcgttgtcttaacgagccagctcagctcagctcgttaatgttaacgagctaaaaagctaacttggctcggctcgcgagatggcttgttaagctcgttaggctcgttaacgagctatatctcattaatatcatattaataaattcaaatttaacattttattatgtattaacataataataaacactaactaatataatactcactgaatatgaataattttgatataattaaaagactaagcactagtcaagaaactccttaagttcgtgaagatatggtgatattttatactaacgagctaaacgagtagctcacgacctaaaaggttagctcgactcaactaattaagactacgacttcgaatcgatctgagccgagcttgctacgagccgatccaagccacgagtttcaagctttttatccacccctacccacatgtgctaatgacggcttaattaggctcaaaagattcgtctcgcggttttcggtcgagttatgaaattagttttttcattcgtgtccgaaaacccctttcgatatccagtcaaacatccgatgtgacatccaaaaattttctttacgcgaactaagggggtgtttggatccagggactaaactttagtccctgtcacatcggatgtttggacactaatttagagtattaaatatagactatttacaaaaccaattgcataagtgagcactaatttgcgagataaatttttaaagcctaattaatccataattagataatgtttaatgtagcatcgcataggctaatcatggattaattatgcttaagagattcgtctcacgaattagtccagggtttaatacctgtaaatagtatcaaaacatctgatgtgacagggattaaaaagttttagcctcatccaaagagggcctaatgcaacacaataatcaatatatcatgtttaaatactaatggtttaatttaagtgataatgattttcttgttttacatagccgtatttaatattttatcttcaatgaatttaaacggccttagcagcacatctctgacaatggcagatctaccgttggaggcttgtgcaagccccacctccaattgctactccctccatcctactccctccattccatattataaggcacaactattttttttgatgttccataatataaggcatacatatatgtctgtaattaactatgacatcttcttcattaaattactacttttttaaatcattcactctcacattctctaattctattggatgcatccattatatttattaggatgatttaaactacaagatgataataattatttcttggtctttgggttaagggtggttgtgccttatattttggaattgagggagtataatatagcaacttactccctccgtccaaaaaaaagacaaaccctagtttccgtgtccaacgtttgaccgtccgtcttatttaaaaaaattatgaaaaaaattaaaaagacaagtcagacataaaatattaatcatgttttatcatctaacaacaataaaaatacaaattatgaaaaaaatttatataagatggacagtcaaagttggacacggaaacgtagaatttgccttttttaggacggagggagtaggagtgaacgagacatttcataggatgagtaataatgagtgtaaagttgagatcccatgtcatttgttgaggggtgaccctctctagcgggaggctgtgaggcctccctttgagagttcggccgggggcagcgggtgagattcgaagatttggtgagcaaagctgtgtgatcttgagggggttcaatcctccaaaaacgatgagacaaaagaggtttatacaggttcgggccgctaagtagcgtaataccctactcctgtgcttagaaagtccctgaatccctggtatgcaagctagggttagacaagctttggctcagggatcctcagtccgatcccccctcctcgctaagcatggtcctccttttatactctaaggggatactacatgtgctgcgagtgctacctagggagaagggaaaatattctctatattaattacatgtcttgtgccttagcccagaagctatctgcacgtcggttgctgcgcggggcccatcaaatcatgcagggcgcccttgtcattcgccatttaatggatgaggacttcggggttctcgttcacaccaaaaaacgggaacctgggttagtttagaggggttggaccagctctgaccggggtaagaggctgtgaagcccctcatcattatgatgggacgggacggagcacgccgctcgtcgcctgacacactgatagggcgggggtatatagtcgccgtcccatcggtcattcaaccggtcacagaccggtcagatgcgcagcacgccgcattaaatgtggcatggcacggttgcatagaccgctttaaatgcagttaggtgggcgttaggcgcgcccacctaaccctgtacacgtgggctgatacgtggagggggtcggggcagctcgactccaagcgagggcagcctcctccctctagcttggaaggggcagccgccgcgccaccccgggctcgacccctcttggggggagccacgtgggtttgggggcggcccaaccccaagctgggagggggcagccgccgcaacaccccgggctcgacccccctcggggagagccacgtgagtttgagggcgacctcctccctctagctgggagggggtagccgccgcgccaccctgggctcgaccccccctcggggggagccacgtgggtttgggggcagcccgaccccaagctgggagggggcagccgccgcaacaccccgggctcaacccccctcggggagagccacgtgggtttgagggcgtcctcctccctctagctgggagagggtagccaccgctccaccccaggcttgatcccccctcgcggggagccacgtgggttggggggctgcccgaccccaagctgggagggggcagccgccacaacaccccgggcttgacccccctcagggagagccacgtgggtttaagggcggcctcctccctctagacgtgatactcccgggctcatatcaccgacatcgtttattgaaatgctcagtacctaaaacttagaaaaatgtaatgcaccatgtatagaccattccaatttacccatagattttttaagaaatgtgttaatatagctacaaattgaaccggagatcgatatgttttcctttatcatatgtgtatttgggtttcattggaaaaaaacaagttgctatatctctaggccgtgtttagttcctttttatttttttaatgtatacggacacacatttaaagtattaaatgtagactaataataaaacaaattacagattccgcctgtaaactgtgagacgaatctattaaacctaattaatctgtcattagcaaatgtttactatagcaccacattgtcaaatcatggcgcaattaggctcgaaagaatcgtctcgcaatttacatgcaaactgtgcaattggttttttcgtccatattaatacttcatatatgtgtccaaacatttgatgtgacggaaaagttagaagtttaaagggaactaaatatagccctagttcgttttagctccccttaatttatatcatggattggtccagtaacatgtatagccctggcagttggtggttggccagttccgttgcgtggatctcgttcgttcttgtgccacatttggaattttggattttaagcttggttcggttgcacttttgaatgcaaattgaaacgggacctttccgattaataataagtccgttgcgcaattcaattcggagaaccaaacgggccaggtcctaaccttggtccaagtttcttactacttgaattttattgcacgctgacgaagtttttataggtttacatttaggagtactagggtgtgtttagttccacgttaaaattgaaagtttgactgaaatttaaagtttgaagaaaaaagtcggaagtttatgtgtataggaaagttttgatgtgatggaaaagttgaaacttccgatttttttttcaaactttcaatttaagtcaaactttcataatattttagtgtggaactaaacacagccttagtatcccgaatattagtctgttcaaaagctgcatcagtagtcagtacgatcaacaataattcaatatgttcaacaatgcgattcttcttggatcagcacgtccaaatctcaaaaagcttatttatccaaagaaagataatttcaaaagcttcattcacaatgtctggaatggattggcgaccacattaaacctctccagtgctgaccaaattccgcccacataaatccgagcgatgacgccatggctctcgaagctggagtagtccttggttcatttaaaactttaaatgcacagcaacgaaccgttatgcaaacgaggttgaccgctagcttagctaacgtaaccacgtctaaaaacaaaactcccaacggtcgccgaagcatatgcgcgcacgtgccgcaacccgcagctgccacgtcaagcccaacacctgcgtggtacacatgcgtccagctccgctcgtaatcaacggtcaagactcgcaaatcctcgcttcttctccccaacgcaactcggtggacgacgtaattctggcgatcgcgggtggcggttgcgcgcgtactacgcgcggcggtgccgtcgtctcgcgtcttctctggacgactcgcgcgagcatcgcgtggtccgcgcgcgtgccatgtgcgcaccgccgcggccgctagctctggcgtcaccgcgcggtcgaacgaattgcacgggatggacagcctggactaccgctggagcgaggaattcagctgatcggtgcatagatgctcgacgcgtgtctgtcgtcaagccggggatgcgcgacacgtacgtacgggtgccatggctgggcggtttgacttgctcgcctctgctagctcctacaaatgtgtccgctctgtactcgtgcacgaaattaactatatagttcctgtttgcgctgacttggaccagtgattgcttttttttagataatggaccagtgattgctaatgtcttgttttaattagtcttgttctttgacagccagtcaagctccgtgatccattgcatcatgggagtcatggctggacaagtagctgctaccgatatcgccttttaagttgacgacgagaccgtgtgcgtttcggggtaggcagctcttgcttttgcgtccgtgtgtgtttagggtaaaggattgcagggaaagaaacgtggatccgatcaacctccgagccgctgttcggccacgtgttaaacaggccgatatggccactgttttctgtaaacgggccttcagccacagcccacagagataggccgaccaggtctaaacttatgagatcaggttgcgaaaatgcttaggatcagacgttagacgcaaccaacaaaaattggacgcctctcactgtggctttgctgcatgcagcctcgtatccttttgtcagatactctcttttcacacctgttagatatgctcacttacttagtattggcatgcatgaagaagagaggacacgagattatttgcatgtacataacacccttttagcaaacttgaaaatgatttttcttccagactactcatccaatctacgatctgtttacaccattgtattcgttacaattaaatctttacaacaagatctcacatgactatattataataaaaaacacacatatgtttcaaccaattaaatttaatgtttcacatgtgagaatcagatgtttcaactaaaattctattatgttgcacatatttaattattgtcgtaatgtatatatctttctttaatgtatcacatggtgctatttgtatgtttcagtaagtagtttattatgtttcactagtattttgtaaatgttgcatatgtgttgattgagtgtttcgataagtattcattagttaattaaaaatgttgtatacaatatcattcatatgtttcagcaaatattatatgatgtttcaatagttaataccttgtgattaaattataaaaataatcatgtgagatcttgttgtaaatatttaattgtaattatcggtgttgcacttagtatttcttgaatgttgcatttctctgaaatatttttatagactgagttggaatatttgagcaagatttttatgtctcactcattgagagccaatgttttataccgatattatcggtgttgcatttagtattacttgaatgttgcatttctctgaaacattttttagagtgagttggaacattttgactagcggtgaaacattttttttataagtggtgaaacaacgttcgatttttctcattaaaatataaccgtgtgatatcttgttgtgaagatttaattgcatggagtttaatggtgaaatcgaatcataaatcggataattaatttagaaggaaatttaatttaaagaaataaaaagtagggttgagataagtgttgaaccatgcagtcatgcatgcgcaagcatatatactttttacatgtgctaatcaactagagtagacggtagagattgtgcatgcatgtgtaggcgcgcggcagtgaaaggtcaggcgtccgatatttacgaactattggacgtccgacgcgtagcatcctccatcaggttaattacgctacaccagcagagtttgactgtcaccctcaccatccaccagctcctccattagttttcctctactgagcctgaacttcaagcattgcctgcagaccttatgcagtatcataggcttgccttgcagttgctgtgtctgaatattgtcactttgtcagtgataagccgtatcatactccgtatagttataacttagtacaatccaacgtactaaaaggtaaaacgaattcattatgcgcgtgatccaatcatccaaacatacggtgcagctgctttgctgccgaagttttatgagcacagcggcacaggcagcaagctgcacatccatatggacagatccttgggctcccggcctgtaccgatctgaattgaggggacaccggactgggcccaaaggggccgcgcagagggcagccactacaacggcagcctgcaggctttattacggcacatcggctttgtacttgggaatcactggaagcctggtaggcgacaagcgcaaagattcagagatgcaagagggcgtggaggggtcctgtcctccactcgagagtgtaacatcagttagatgcatctttgttacatttcagatcgcagctctctggaaagagtgtgcgctttttttttttgtcattcatgtggcctctcttacgagtgaaattgaattttggttacggaattgctaaccatatgttgacagaaaaatctatctctaaatcttgcagattttatgtgcttcgcaattcgtgctccagctgcttcttctccaactcctatgcccctgtcagtgacaacccaaactctggcggagggccaatgaattaggctcttggggtggggtgaggtgggatgggagggggagggggagggg

SEQ ID NO: 11175 - DNA, 6820 bp, Oryza sativa
ccagataagggagctggatcccattagaaaagcatcgcttgtcgacatgctaagagagaatttgaaagaatgtgcagctctgcatggtgatgcagtcttcaatgcagctatcagcaggatcgatcctttagtaattgcgcagttgtggcaggccctggagattgggataatatgtgcaccatggcgattctcttcgccgttgtcccttctccgaacaaacacttcatcacaactcacaagccatacaatttgcatggacacatgtggctactacatcgtttttactgacattgaagtgtgctgttcgatagttacgacaccatggcaccttcaaaaaaacactgacgtccaaaatttagcatacataaaacactgactatctgacgtctcaaggatattcctttcgtagtgaatgtaacaagtatggggtagcatattcagggatagccgttttcttgataggatatactcccaaagtcccaatactcctagatcagatattgacatgttataggaaaccatttgaaaagagaacatatgaaaatgtatagaatcgatatcctttgcttttttttacttcaaaaacgaaacatttgttgtttgcaacaaccatttacattctgctcatgtgcttcatccccccttttttaacctgtatctctactggacgtatggtccaagttctcagtgagcatggtatacgtcttttgatcgtgtaactgacccaccgatttgccgaaataatttagcagaaatctgattgagttgtgaacgcgcacccgttgggtatggtcgattcatgtacgctgatcctaggcacgtccactgttgcatctgtaactgacccaaagatggccatgctctgacaaagcacctattccccttgaacagaaacatttcctatgaacaactcaaaacaaaaataactggggaggttctgaattttgagaattatgtggtggtactgagaatgctcgacatgtaatctttacctgccccttagcaaggattagatgcccctggatgaaattttgtccccctcttcgttggatcagtttttttccaccttgcttcctgattcttatacagaagagtgttttgttactagccgcaggagttagcaattttggctcactagaaatgacatgatttttaaacctaaggtggggggcactcctcaaactgtgatctgtcgctggatctctcttctgtggcagtggaggattttgacgaagccgaaggacacactaaaggcctgtttggtacagctccaactcctaaatttaactccaggagttgagtctggagtggagttgtggagctgcctaaacccagctccgcaactctagttcattttgtgagagagctccacccagctccactcccagttttggtggagctgaaactgtttgactgaacttcatctccaggaggggtggagctggagctggagctgtgccaaacaggccctaagactggagctcatgatatcttgttgtttgaggctgctggctccctgcaggtgcgggagggtgtgagctgattgtgtgggatgtaccagtgacctggggagggttgttgccccgagtggttttggcagctgctgtgtgcacttgtgggttttttctgcgtgccctggtcacctggtggctaaaactgtagccggtcaccggcaaaaaccatctattgctttctatcaaagcagggttctctgcctttgttttccaaaaataaaaaaaaaaataacattggcatctgggccaaaggagcaccggtagaaccagccaaccaggccaaggcccatcccaaccacgacggcctgtgtccacccgtcgcttgccagttcaccccaacatcccagaaattcaaaacccatctcaggccgtaacgcaggtacgcaaccctacgagagacgcccccactttcccaaagccgagagccctttcggctgcccacgtccccactcctcccaccttttttaacctttctcctctctctctctctctctctcccccctcaccatcgcggcggccgccaccactacgcgcagcaaccggcagcagcagcagaggaggaggccagggcaacccgcaaccccaaaccctactcccgccgcgccaccgccatggccgacccagcggagcaccgtgaggaggagcaggaggccgcggcggcggcggcgggcgaggacgaggacaccggcgcccaggtcgcgcccatcgtcaagctcgaggaggtcgccgtcaccaccggcgaggaggacaaggaggtcctcctcgacatgtaagccgcctccccctccctcgatccagccccgatccgatctcccccggctttgatctgagcctgacgacctcgttttttttggatttcccgcaggaagtcgaagctgtacccgcttcgacaaggaggggaaccaatggaaggagagaggcaccggcacggtgaagctgctgaagcacaaggagaccggcaaggtccgtctcgtcatgcgccaggctaagacgctcaagatctgcgccaatcccctcggtatccaatctttgcggggatcttttgttgttggtttcgatctggattccagatggatggggttcgacttgactgggtgatgtttgtgtgtgcagtggcgacgaccacgaagatgcaggagcacgccggcagcgacaagtcgtgcgtgtggcacgcgctggacttcgccgacggcgagctcaaggaggaaatgttcgccatacgctttggatccgtcgagagtaagcactaaacaccccaagaattatgtagttgctccttttgtttcttaaccaaaatattatactgctagtagtagcatgtgcttggatgggctttgagcaatcagattgttattgggtgtccgagaattgaattggtgatggttttctgcttggtcgaggttcatcactcaaatgagttcgtagacagaccatagttttatgaattgtgtgatcataaataaagtttgatctgcactgtgagttttatttcgttagacggaccatagtttcctgaattgtgtgatcacaaataaagtttgatctgcaccatgggtttgattcacattcactttgctgtattgttttcatctagtttactatcatccacctttggtgtttggatctaaacgccttaactataatctggtgcacagtgttattggacgactagcagtcattggcgtgggactgtttttgtgcgaatgatgtacatgatttaaccatctaattgcatcaatttgcagttgctagccttcacatttgttttatcacacaccttgcttttggaagtctgcgcttagaaattgttctgtgattctagcatgttttttttggtgaattgcagactattttctgcttttcaagttctcgtcataatttgggaggacatggaatttgtgtcctgtctaaagcaaaattttgaaatagcaagagatctttaactttctggatggatttaagttcgaaattagtcctatttctttttgcatcaaaaccaagaagcaagtaactcactcaccatgtggcaaaaccaatgaacatgcaaccaataagtactagaatgacttcttggtttccgatccacaatttaatttagcacatagtgactacaaataggacttagatttttggaaaaaccaaaaaatgaaataagcctcagatttttggaaggagggagtactttctaggccattttttatcttttgaaatagcaatagtgccaaggtgacagcagccagcacactaaagagatggacaagatatgtactataatccttatactgctccatgttttatcaatccaaatattattttacttaagattttgattcatctggtatgtactttaagctaattaaaggcataaccacattgtgacgtggattattttgtgaaaatgatctatattagttttcattaacagttaggatctgctggtgcaattctttctcattaaggtactttgtccagtgattaaatgcatgttcgaattgtatgatgcatttaaaattattctacaattgtatgattgtgtcaatagttatgtactgtttcgtctgttcctgaggtttgacaacatgtaaattgaaatgaactgtcttgctatgaaatttgctgctgtgactatttgagacatcaatatgtagttctttgtgagagactgctatatttgtattgacctacctaagctctgtttcatctgcatttctttcggacttttttgtctgactgttgtccatgaattttgtttcagactgcaagaagttcagggagatggtagaagagattgctgagcagcaaggaaagaacgaggagaaagaaaatgaggaagtctcctctactgcagggttggttgagaagctttcagtgaccgagacaaaaaaggaggaaaatgcagagaaagaggagactcctgcagaagaggataagaaggacgctaaagagtgaaagcacccgcaacctctaggcagctttgatatgcctgaagcgagtgaagtgttaaatgagcgtcatttcattcattttgtggtcaaagttcttcctttcacaaattttcattgtgttttcttttggatgaatgtttgtgctaggcaaaatttgagttgtatcagtcgggttcttggttactacactgttacttaaaccttgagttgtttatccgagatggggtggcggagtgggggcacagcatgtttgtacaattatttgaagttgcttttggaatgggcacggtttgggttgtccaaaatttggacggtgatgccctgtcactcacaattcttatctctgtcttgcaattatatgcgatgtgaagctcttcgcctcttcggtgacgagttgtcgagttgtatgtgtgcatttttactgctgcaacctgcaaaggtgacgcactgcagagcatgacgcatatcattatcatataggagtagatccatgtgtattgccgggcaaacgcatttagtgtgaatcatgtagtacatatcacagcacgcggagcatatgtcgtctcataagctcgtaaaatcgcagcaatgaatgttggtaccaagtacttgttgctgtagtgctgtgcttgtaccgcccccatgttatcgtgaaaagcttctgtgcttgtacacaccccatgttatcgtgaatgcctgtcgcccatggcgtctaaaaggcatttctcacggtgtgtaaaccgttgcatcccatggcatatactacggcatctcgtgtgcatcattttgctttatcatcttcagtcaggtgatctgtagccagtagactttacttgctacgtctgtaacctgcaaaacactaccatcctgcacccatcgatccgcaatactaccatgctgtctgtacccatgttccgtggatctgggttcacccccagcatggaggcgtatgcactgcgcagatcgtgatacgcccccattgatctgcattaaaaaccgatgatttcccgggagccacataacctgcgtatcttcccgatcgccggaattgcgatgtactcgtactcgttgctgcttgtttgctcatgatgattgcccgtggtactgacacagtgacaagtcgacacgtcctgggagcgtactacggatgcgcgatcggaaggatctcccgatgcagaaattgcagatggacgcgcactactacagcttcagtacgacaagttcggcggcaaatgcatgtgacgtgagtgtgtgaaacacgcgcttccccctcgcatttcttttgtttctcaaacgaaagaacgtgcacgatgaatttgttcatggaattctttcccgccgtgagcccgtgcactgccccgtgagccttttcggccatttctcctactataccctgttctgaaagactgaaatctggcgcgaagtgtttgttacctggtcggcttagtttcagaatttgaaactgagagacaagaaacaggaccagttctcgcttccaacctggctttccaggacactggtcgtgtatgtgtcagagtttactactccattgccattagcctgcttgtggtttctcgatctgatcattcagacgaccatgtaagtaaattgttcccaggtacagtaccgtttctagataattagtaccacgaaactgtccccgcggtcgggttacggttaggcttcgctctcaagcctcgcgccgatacggtaaacgcatttaacgagacatttttccgccaagtgaatgggccaaaacaccagcacgccgcggtttccaactaggcaacaactaacctcgttggctggctgtctcacactctcatgatctcatccgaccagcagaggcagcagcagcgcgcattaccgaaagtcatatgcaacggaaaaaaaaaagaattggaccaaaatattgcagagaaaacggcggcttgaattgaacccaaaatatgattgaatcaatgagataactgtacatgacagcagccacggacgcaacagccaaccgagctcgcctagtgcgagctagctcgcatttatagtgcccatgctggctgtcacagcgatcacggccggcgccggcggtggcgacggcgaggacgctgtcacggccgccagcgatcacggcgggtggcccaccggcgtcggcgaccgcggcggggttggacgggacgggtgcattcgtcgctgtcgtgtccggactggacggtggggcccaggtgtcggccgcctcccaggtgggccccgcgccccactcgcgcccccagcttgcgtttgacgccaactcgacgagccttcccttggcgcgcgccatcatctcgtgctcgctgcgcgcctccgcgccgcccgagtcgtcggagt

SEQ ID NO: 11176 - DNA, 1362 bp, Oryza sativa
ccactgatgcttcagaatcagcttttagtgctgggggacgtgttcttgatctatttcgtactaaacttaaacccaaaatggtagaagcactagtttgtaccaaggattggattgctggatgtagaagaggtgatcaattgtgtcatttctcatttatatttttgtaaaaggcattcttggttttttattaatagtctaatatagctttcttctaaattttttagatcctaataaaatgggagttggttctattcttaatgatcttgaggttgcggagaccttggttgctagtatgacacttgacgagattgatgatatggtatgacattttattgcatatatttggttgcatacattttgtagtcctattgtcaaaagaattgtatattgattgctcataattataggaaaagcaacagagcagtgatgatggagaatgagaattgagaagttatcaagtgaagtgtgaagggcatgttggtgtgtggctgtgtgcagtgctcactgctgtgtgttttgtgctgtacgcctgtactactactgctgcatgccagtatgcagtatgctgcgtgtagcactgcagcgtgctctactgctctatgcttgctgtatgcctgtatggcttgtctcatgccgatgacttttatttttatattttaagcaacgcagtgaccagtgaactattaaactgaacacttatattatatttttatggatcatggatgtaccttggattattttaactagtgaactattcaactgaacacttatagttatactattactattgaactgaacgcaatgaactaataatgttttgctatcgtattggggctaattgtactgccgccctcttattgtatggattgaatacaaacttgacatccgacaactttttgtctgtttctgaaccgagtccgcaccgactccacaccgaatccgacgtccgaaataatccgctccgcatccgcatccgcacgtcatccgcacccgctccgcatccgcttataaaaatatggtttaggatatggtatagctattatccgtctaaatccacttcgttttcacccctaagtgctagtgggtggtggaggctcatgccatcgtcatcctgtggcaccaactccagatctacgcccgccggtgtctcccacctcctcaaatctcacgtagtctgccgccacaagcatcattgctacctgtgagctcgaaagttgccatgagcacagacctggtccaagcttccacgccacctccgttggctcctctaaagcatatttttacaaaaaaaaaataatgttttaacacgagcatcacagaattgtctggtttccaaaatatcgagtaaaaaagaaaggaagg

SEQ ID NO: 11177 - DNA, 30528 bp, Oryza sativa
  unsure (1)..(30528): unsure at all n locations
tttgacacacacctagcattgaactttgcataccatgagccatcattttgttgtttgttctcaatgaacattacagcattcttaatacaactttcaatttctacaccacggtaccctgggtataactctgtaaatgatattagaccttgaattgctgatgatgtgcactcgacatgtctgcatattggccttatctttgtagttagattccaaggtaaaggcaaatggaattattataagatatttgacacttacggataatcaacgacaatgttccgaaaactctctgaagggttcagaatctgtgttatcaattacattcatgttagtacatacatagtcatagtatgctaaaatcgaaggactctaagataattttgaaatcaaaattacttgaagtatatacatatgaaggatgagcaaggataacatgatcatgatatcatagtcgagaaacgcatttgaccaatccgtggaatttatggtttgctggtttaacattgcattttgacaacataataggagtgttgatagatgcagaaactccaatagctagttatgaagaatacaatcatggatttgcaattaacagtggtaacttgaagtaacggtcatttgaatctattttgctagaccttaagttcatgtttgtctatcttatatgttggtgcatgtcaatgtcaagacattgaaatttgaaactatatttaatggtctgaacatcaaaatccagttttattcgttacaaccaaatagtgtttgaaatctgaaactgcagaatgaaagatcctttgaaacaactagtgtttgattgattacaacctctgtaatttttttgtgtttttcctttctttgtaaacaacccttttgatatataaaagttacacggctaggcaaattccaagaagtaattcacctaaaaaagagtctagtttcatacatagatatttgtctcttacataagtttgcacaatatgatatttaaaattacagtagttaagctagtacgatgagcctgtacttattgtgtatttgacaagtaataccttggtccattagtggaaacgatgcccattttattgtatatgttaattgaattagtcccatattgagagttaggtatgttggacaacatataaacacaagcattccaaacataatacccctgggttaatcatttttcacaccaagagatcaatgatgaaagtgtaagtggacttttatacatatgttggtgctggggtgttagcggtagtggagctagaaagatttttatatattgtcaatttgcttatcaatactaaaatttaatggagttctcgcagcagagccccgcgcgagggggtgggggggctgggtgttagtgtgttacgcatattgtgattgttaatgacgtaaagacacattttgctttcctaatgttataaaatgttttttggtgcatcatttgctttcatgtgtgttgagtattcttcatttttatctcacggaaacaatggaatgttaatttataataatttaggcaattgttcaaaatgtaagccaaagatgtgcacctctgtccacgaagctgttcttgtgcattcatacgaggagaaggtaccatctttgttctttgtgaaacacaaagaaaagaaattattcaaaagagcatgaaaacatcagtcaaaaagaaacattatattgctaagataataacttcacgtgaaattaacaaaatttaacatcatatttacacaactgttattttgtttgagaaagataacaaataacgaaatatattgacaacttcaacaactactacttttgaagaagtaattacctatccttttttattttatcttgattgaattgttctaatttctggttcttctcgaatagtaaggatacatcattgaactggcaacatatattataatgtgcacttaataaagttataatagaggatcactatcggtgatgtactataatttattacatgggaacaatgattattattcaatatatatgttcaataattttatattggtccatcaatctctcctacaagctagaatcttggtatgacttaaacataattgagctgttcaatatcatcgaatcttcttatgttcttttttactttatttcatttatgctttctctcaaggaattacaatacttagtattagtgctctagctattactacagcgttacctttttcatgatttttccactatcaaaaaatactttgtcactgagaggcctatactcaagaagagctatctgttcagaattaatgaacacagttcgttgtgcatcaacaaattctcattgaaatttagataagagaacacatacattagctaatactatcacacacgtaagctgtaaatttcttttattgtcttaagtctcttttaattatagatgaccacaatattaataaactgaaaaaccacatttcatttaacatgaataaaacaggaagaatactccaattgtatagtcataccgaaaaagacagcaggcagtccaccgcgtcatacaaacttttttcttttattggatcaccaacaagtttaggagaaatctttgacagccctagtaatgcctataataggatataatataaaatgtcaagaacagacaaaataataattaattaatgattattaggaaactatttgaacaacggattgcgctttggcaataaattttcttcaacgtaactgatggcgtatcgatattccaagatcatggcatataatgctcttaaaatgaaactcgacccatgggagagagagatcttcaaggcatttcgttgatggttgagtaaaagctccaaaagcctacacctatctatatgggaacactgttgtggtaggcagagtcttaatgcgtactttaggggaacacacaatgaggattcgtttttctttaagaaccagagtttgaggctgataactggaggacttacaaccacgctaaacacgttctcctcataatgctatttttttatgcttagatgttggactaaatatttcttgcttctaatattataagcaactgattgacatgttagaactagaaattgtacgaacagaagatattttagttaaaatctctccaagaaggccaaaaattgaagtaaaagagataatttaactgttttcaccactaagaaccatatccttttatagagtcagaataaggaggatgataacaaacttgtatgacctgaagtgtttctcctgtacaatcaggaactgaccaaccattgtctgctgtagaaagagtccatgaaccttttgatctatggcgatagaaacttttgccattagggaggtcatgaagaaccttcaagtaagaaaacaattttgagatttgtttctgaaagtgttcataactttccagttgcaaaaagttcaagaataatgaacctgcgaatttttcaggaaaccataggctttctcaagagttgtactgaactcatctactaagcccgtagagcaaatggcttgaactataaatgctgtctcccatgtctgacagccatcatatacctacgtacaatcaacacaataacaagatatgtctgtcattacacaatgcttgatcctcttttgtcttgaaaattaacttttgtacatactcatgcatgcagttgctaccaaggagcaatataaactttgtcaaaatgagattcactatacaaaacgccacagcatacatgtatgtcgatatcatactagaaaattgacgtgcccgttgggtttaaaatacatgatgaacaaaacaataagtgcatagtagatctattggtttataacaaaaacatactatataagaatacataaagatttttacatgaatacattcaattcctctgaaatatttacaaaaaccatacattccgcagaactcttcaatgtttgttttttttttttttacttttgtgtatgtaaaatggttgcaccgagtagtactatatgcttgctagcgtttatcgggttaataagtaaatggttttttaatgaaatttgcacattttgtatttgagcacttgaaatcttttttttttttgaaaatgcacattgtttttcttttcagggagaaatacatataccaatataaattcattttaggattgcgttttgtaagaacacctaataacaatgaacaacactcgcgagagcgaattgtaaggcatatatatgctaacctttaccatatgctcaagatatagtactgtgaattttgatgtattatctaattaaaaattacatttgtatgtgctatgaattacttatatacatttaaattcactacttaatcttaaaattatttttagtttatttttattatttttgggcacttttttgacaaaacatatgaagttaaatactacttaaatatgtttaactatttgccacccatacattaatgacatatgggccctcacgtgtctatgacatgtgggtctagtggcaacaattgattacaacatctaaaagtgaaaaaaaagtaagaagatgtaaggctgtgtttagatccaggggtgtaaagttttagcgtgtcacatcggatatacggacacatatttgaagtattaaacatagattaataataaaacaaattacagaatccgcctgtaaactgcaagacaaatttatgaagcctaattaatctgtcattagaaaatgtttactgtagcaccaaattgtcagatcatggagcaattaggcttaaaagatttgtctagcaatttacacacaatctatgtaattagttattttttcgtttatatttaatactccatgcatgagtccaaacagtcgatgtgactaggtgaaaaaatggagtgaacttattttgggacaaatggagtgaaaaaatgattttattccgggagggggtagtactcactatttttaagaggccctgtcaaatatagcattttcaatgaaatctaatataaattaaataaaattggttaaaacctataatgagaaataggctaattagctggtgtgcgcctatttctagtcgaatttgctatatatttgtcgacaaattttccaccaaaaatttgacagatgtaattatagtacaatcgtagtgtcattacactgtaacttgcatgtaattacactgtaactataatgtaacatgtatgtaactttcaaaaatctctccataacatttatttcggtaaaatggaggttgtgagaacaaattctttcacatatgtgtgtgatgtggttgtttttcttcctcaccagaacaaattttgtaatagatctaacgattcaaaattacgtgaaacttatatacaagttacactgtagttatatgcaagttacagtgtaattacactacgattgtactataattatatctgtcaaattttcggtggaaaatttgtcgacgaatgtataggtggtcccatttctagtctattctcactactctgttttctttcatcccacatgggcctggctagcccgttcaattaaatatggtgcctggcccatgatgttgccgagtcatgcaagcaaccgtgtgtatgcgtgaagctcgttcagggcttcgtcgaagcttcgtcgaatcagcgtgtgtgtacacgagtcaaaaaaggattgagcacctggaccaatttgcagctggcagaacaggcaacgtgaaaataatagatagatgggcttgtatgcagatcgaatgttcagagaatcatggtcataaatgtcagatgcaaaggatttgtttatgtgactagattcttaatcctaaacaaaacataacaacatgagaaaatgatgtagtatgttgaggaccatattttaaatgctgtgaaaggtgaaagtattatcatagcatactgtacttttaagtgtcatctatgctatttacaccgaagctaacttaatatggttcaaacattgatattaattgaaatagaagccaacagggggcacccaagtagcctagcgattacagtactcaaggaacatctctagatccttggttctactccccacaggagcgaattttaggcctagttaaaaaaagtcattcgctagctcctcataaatgcacgtgttaggaaatgatatatggagagcgagctctcgtgtagaggacaggaacctcaaagcaagcgttaaggaccaatccataagaggtgactcctctcgtgggttttctcggctggtttggttgaggcttcttcttcgtgaaaaaccgtgagggtggttattctcctactggtcgagtttttttttaataggggcacccaaaatttttaaattttgtttcaataatataaactctacaagctacatgactgcaagataatttgattttctataaaaagtgctcattctgaaatttcatacaggtaataatttcatacagctcatctaggatcgtgatgttgacaacctgtgcgactagccagaaatgataaagcaatgccagcatgcagcaatgcagcatatttcttaaggttacaaaaactttagctgcaaccattttctgacattgatatctgctagagattgatttataacagtggtttattgacatctacagtttaacttttatcttcactcatataattcaaagaaatatagatctgacattactcacttcttccaggacatgttggcttgcccacgcaaaaataggaagcgagttaataccaattaggagctgtttggttgcgtcgttttggcccgtatcagttcccaccatgaatagatcatgttacactcgtttgttacagatggaccgtaatcggatagcccgcaaatgaattccggcccaatacaaatctgattacgctccaagacgggcggaatgcgatatcgatacggagaggagagcgcgacctagctcctccaaatcgagcaccgctgccactactccctcgcagcgcacgcgttgccggcgccgccccctctccccacagactctgctgctccctcgtcttgtgcgctcctccaaccaccgcttggccaggctggcgcatcgatgctccccacctccaggagttccgcctccagagtccctcctcccccgtccaacgtgcactgccacctccccagagttccacctccttggcgattggatattgacgggaagaactccatggagactggatcttgacgggaagggcgaggacgtgcagcaggaggctagtcggagattctgctgctatcaactacatccgtcttttgtcgttgccgccgtggaatgaacaccttgccggtgagaaccctccccctactgaaaccacctttttttatgatgatatacttgtgatgctggtgagtggtgatcttgtgatagtcttctaaaaaatcatgtagtagtttatactagtgaatcacatgtgttcctgcctcatatatgtttgcttcataagttctgatgggttatgtagaatatattttcctcaattgcaagaaagttgaacatcagtacatggttttttttttagtgtagggaagttggaccaactcatattactatctagattttgagaattttgattttcattactgccaggtgatatattattttgcacaatatcagatcggggaaaaaagttttgcatattgcctgtttgacagaatatgttccagtaaaacagcacatacatgtaaatatgctccttgaatggatgcttgatatggtgttctggtgaattacttatgtttagcaacaaaaataatttgcaccgtcttttgtttgaatggtagcttgatgtattatgtgtgctagcaggatatattctgaacatagggttaatgcttttgttttatatatttgtagagtgctatggctcgccttcccttaagtaccaaaacgcggagaagaaatttagggcttagaaatatgatgattgctgttatacttatgtattattatgttgctgtactgttcttgatttcatataagagaaaatgttggaaaatagagaggaggatcagaattagagaacttaggagtgaaagaccattccagcttattcgtgagagtgatattgcttgtataagcgagctccgaatggataggaggacatttcacattctatgtgacatgcttagagacgttggaggtattgaggatacaagaaatatgtcgttggaggtatcagtagcttcattcttatatatactatctcaccatttaacgaatagaacaatagggaccttttattgccttatatactatttgtctgaaaccatgcaccagtataatgcatgtatgggtccagctgtccagctcaatgccataggaattaacctacgggagcataagtagtaatatcatattcactccaaactactcctagctggagtatgtgcctacgcctttcttgcttgcttgcacctataaaaaaggggttcatgaaaacagagcttttctacaaattccttgtgcagcccctttcctaaagggctatggttttttagtccagagattaaaaaatgctacctttttcttaatttggtatgatgctgagcattatatattctttcttgtaatgtttctttcactaatttctgaattttttttgttaccaaatgaggcaaagaaaaactgatgtgctggatgttaggcatttgatctacaagatgttcactatctatgtttgaaacccagaattccatatatgcacaagtcttggggattggagaccatatattttcactatatatttcctatgtgctaaagatgtttatttccaatacttcagcttttatttgcttgaaccatgatgatgtacatattctgtgatcaaagtgctaccctattcaacgtcctagaccttttgtttggttgtggaagacaaaatgtgtaatgaaaatcaaagtctttgcctggttaccattcactgacagattaaatactagagataagctagacagaagacactgtgcaaaagaggatgatgatttatcttgcgttctatgtaatggaggccacagagaaaccaggttacaccttttcttcacttgccctttcagcattgaatgttggcagcatttcttgggatttcgtgggatgctacactggagtttttctaaatgatagtgcttgcaagggttaactttggtaggaagggtttcttggaaatctgcttcattgctctgtggcatatctggaaaaaaggaatgggctgatttttcaaaatgttccaccatcttttcagtcctggagaagcctattcaagaatgagattcttctgcatatgtgcaaaatgaaggaccctatgaaacaaatagtttttgattggttacaaactgtataattttacttgtctttgtttcctctccctgtaaatttgtacttatattctaaataaatgaaaaacactactaggcaaagccctggtagtacttccagtaaaaaaaagtgttgtcctatttttgagacaaaagtactaccctagcttatttgttaactaatctggtagtttcactaatgtcaattgttcatccaatcctttattgattgaattttgaaggtgtgccattgattatattttgcaaaatattatctctcgtcttgaattcttgctgtcaaaatttgcatccaaatagaagtctccatattaagtattttcccgttgtgtatcaattttagaatttgaattctcagccgacacatgttttgcttgcacctgctagtctgttacctagctgcctaaccaaacagcgggaatgaattggtatccgttacaacaactatccaaacaaagcacgtaatcggtgtaatcggttaccggcagaagcattcccaattacgtttacgttaacgtgattgaacctaactccaccttaatgtcatagaggtagagcaatgataactatgggtggtcgacattacgttctctagtgtagcaaacttagaatttaagggtggttattggtaatgagtaaaatgattacgatggttggaacaacattgcaagggccacggagcttggaactccatggcgcagatgtggcatgcatggcaatggcagtgatattttctgttctgaggattttgatcaatatgtgtgggggaggtggctgcggtgatgtcaggtatggtggcaaggatgacaggagtaatgataaaatacagtccagagaagatgggaggcactggggaaaataatcctgctaatgtggacaacatggacataatcctactgataacatggacataatgacattgttggcttgcagaaaagtatgtgggtgaaagcagatgggttacgaaggtcagtggtgttgaattccatttagccagtatgcgctgatgaacattgcttcttgatgtcttcggtactggctgccaatctgcgtgatagatgtcgtcaccaggttcggtttcttgttcctgattctcatttactctcatgattatctaagaatataactaccatcagcaaaatctagttattgggtaggacatttagttgaattcacttgaggatcagtctgattttttgtttaaacaatctcaacatggttgttagactgagttgttttaatttcttggtttcactccaaatgcagagtcttttagtttcttccaattaaggtgatttaaatttcaggttatgattagtcctaaaatcgaattcaagaactttgaattaattataatccaaaactcagccaagcaggaaacatgtgattgtttcagctattcaatgaaagttcagcaaggaaatactagctttccatgcatgcaatgtttaatttccaccagagcagtatatatatgtattacgaagtccactaaaaagaagtatatatgaaaaacataaaatgagcaatgcatacacccaactaagaacaagtggtcatcacttagtctttccaaggaaaaaatatattcatgtgatgaccaattatgattaagtgaaagcaagcaagatttggttgttagcgacatgtgcaaaaaatgtgatattacctcattcatgatctgaaatggagctgaccaggacaaaaatgtgattttatattgatttaggcatgaccaatttacagataaagaatgatttaaaatttgttgagtacttacataagtttcgggatacgtgcaaaattctcaaagttcagggagtaagtaacagccccatggaaatttagtgagacataaattaaataaataaaagttcaattagaacagttttacaacagatgcaagcagccaaaatagtacctgagccttcatgccatcttcagcaagccatagaaagtcataaatccttggaagatgcctcttgaatgcatctgaatttgggtcttctatccaacagcaaatcatatttaatgcctaatattaaagcaaatcggtcaaagcatagtgctgaattgtgaattaataatgctaaatcaacaaagttagtaaaggatgataattaatttattagagctagaaactttctaggttctactacattcaacaagttttgcggagtattttaaacttgttataatcatcatgcttctgttattcttgcctatttattgtgtaaatgtccaatatttcactactctccacacgttgtaatgattatcagattatttataatatttgtccaatgagaaagtctaagattgtagtcacggttgcttttccgtcttctatgcctatatattattatattacggtacaaatgcatgaaaggtattgtgtgggttcaatacgtcatttattaggtcatcaaccttggtccaatttttccagccgttgctatatgtctatattttgggccctcttgtcaagtaggatggtttatgttttaaaagtttgatagaatctattcataaaagtcaactactatctgctctgtttttacttgtcattttagatagtgacatagtcttcgttgcatatgtttcatcactactttttctatataaaagctattaaattataactatttgaaagtgtttttcatgaaaaatatatgtatgattggagggtctagttgtagatgcaagatttcagaaacatcattatattacaggcagtaacttccccgaggaaatatgtatcaactcaacaactaaaaccaaatgttgtgaaacaaactgaaaatttactcacaagaatgcagctggaaagttcaccatatgctttttagtcgcacatgctaacatgtgggccccagctctgtaaattctcatttcattccagaaccctacccccctccccctccctcgtaatcaaacagagtctactataatacttcctgtattaattttagattctagaagaatcagtagaagaaatgtatgaaatttacttttaaactgtcgattaaatggactatcgggatgtgtcgaggtcatcgagttgtgcgaggttttcatttggtttccttgagatgcatcatggtagtatatgttatttttagcaggtgttaatgtgtcataatttcttattggggatgctcataaaaatttgaccatagggtgattttgttagaatttctattgaatctcattgaatctcagactcggtatttttatatgtgggtgtgtagctttcgaggtctaagtatagatgttatatcagaacctatagtaggccaccgcacttgtgagccaagtgactacataatcgaaacatagagagtaataccaaaacacttcctttgaagagacaaaaatagttctgatcaaattaccttgtttattgggcacaaacaaatgtatttggtattttcatcctcgtagtagatatgtttcataaggttgcgcagcgatatctccctcagcttattaaatggccagacattaaacattggatccacatacttgtttaaatatgtccacacaatatcttgtatccatgaacaaggatatcgaagatcttcctgtaccaacaaaagaaacatgttaatttcctggttatttaatatttctttatgtaatatagaaaatgtttggtgttttcttaggtcaaaaaagttgtatataattttgtttttgaccgttctgatactatgtcaccggctcactgcactatttatgccagagaaagcataaataaatgaaaccacttcataatttgctaggtaacatcacaacgtaaatataccacctcaagaaaattgggttaggaaatgccatgatatagaaatttgacttgcaagttaaatacaaaatgacctctgtgctctcctcttatgcttctctttatttctgttttatcatggtggccgtatggcctacctgtaatcatcagttcgtcctcctctactgctttgtcttctccaatgtcaagccatgaagatccttagctgatctcccccatcactaactaaccttctaagttccaagcactacatgttccaacatcctcctcaatgtactcttccattccccccaatcccccaccttcaccgatccaatcaacacatcgttttttgggctatagcaagtgttcaatggcaactccagcaatatcatcaaagcagaaaaccctacaaagattgtggctatgcatattcaaacaaaagaggtttcttttgtatttcttctgttcatctgtagtgccggaaccacagagtcgtgctatcggttctcatctactcttccttgcctccagacttcactgaccagatttgcggacgccaatcttgagatatcaaatggctcgcttagagctggcaaaccgcactgttttgcaactgtattcataagatgccttatttggaacattgtttttaacttgcgaacattttcttttgataccaggcaaatttgctgttcaactggaatagaaatatgtggcaagtatatagtacagtagtattgctaattaaatgaattaaatctcaatcttcagtgaaaaaattctctactcaaccaaaattctttataatgtactcattcaactatgaaggaagtaacaaaccttggcacagcaatctctagccttcttccagtcaatctcactgtatggtatgttgtacaactcctctcttatttccaatatagttggagtgattgggccgacaaactttttcccataaagatatgccatggacatgtaaatcatacggacaaagcaccaaaatcttgctgtggaaaaagaaggctcgcttcttaggatcaaattaaaaacgagaactttattactccctctgtatatgagtcatattgcaggctcttataccagggaaaacttgttttttaactaaaatatcaataactaatttagtactacttcttgttgcacgcatttaaaacctacaaaagtagagatactaagcgcaaaaaacatttcaaaaggtgaaaaatatgtgtgctttacattcttttacaaacacttgaataaatatggcttacattttttttatatggagggaatattgatctaatgctattctattttttttgacatcaagcaaaaccactcggcggaaacgaaaaagcaggacccttgggcagaagccttagccactcgagtgcgctgacgctccctacctcctctaccttgccgccgcttgagtgcgccgccggaaaacagcacgggtgcaaagatggcggcgtggggtgatagaggcgatggtgccagctgcgttgttctcctgatccaataatcgacttatcagattcgatgtctccagggactagctccggaaggatgggtatctgcgaaggttgatggcaactctgtggttgcggccgagtgaaaaaaggatcgtggcccggtgatcaaggtgcagccaaggaactggtggtggcggggatgtctgggtttagagcagatccggttccttgacgtgcaggtgcagtggtgtcacagtgaggctatgctactcatatgtcgtccctgcagcactggtgatcgccaccatcatccctcatgctgcagcatgccatgtggagccttactaaggggaggttcgctcgtggcaacaacggtggctggggtggctgaccattacaggaccttgctggaccgttgtctcaggcggtgagtatggcggtatgtccatccttattcgttgcaatagaagggagtagcagctttgagttatgctggcatcgaggctcggtgagctggccgctggccggtgacagtcgacgcctcattggtgtgccttatcggcagagcggttttcttttctagaatttgtcgacagccaccttcttcccacccctcgaataatgattgtctctccagcagctacttctcgcaacgatgttttcttcatcataagacagggacatctagatctgcttgtagaccaatgtaagcttggcttcaattcaaggtaccggttacatcaacatctctttcatctctagatcgaccctatggattttgggtgtgtgacttttggcttttcacaactttatctttgtatggtatcgtgtctacagaaggttgcaggaagtgatgttcgtggctgattgcaattgtgctaagtttggaaggtatggtggcactgtcttggaatgaggggagcaacaacactaggggcctcgtttaggtggtgcttgttgctaattgggttgaatccctaggtctggccttagctggttgtatctggcaatggtggttttgcatccttcttgatgacattatctagagttcatagagttttcataggcgaaaacctaaagtctggtcttacttgtttagagcataacaatggcagcacgtgcacgcgtcgtcctctttttggaggcattgttttatgggagcctttgtggtcgtccaagtgtttctttggtagagtacggagatgaagtttacttgtagttgtagacttatgcatcacaatttttgtagttgtgtcgccctttttcttttcttttgtaataatgataggctatcctagctttgcagaggccgagggtggtgttagaattactgtatcctcctgacgtaatacctaagatcatgtgaaggtaaatgctattattagaccatccaccatcatttaaaaaacattcatcttaatttttgccagtaaaatcaaaataaaaggaaataaaagaattgtgagaaattcaattggaactttagattaatgcaagaagctaatgaattatgtacctggatgtattggaagaaaatgcggcaccatccataattcaggaattattgctttgtttcctgaccaatcgtatacaccaatgacctttgattacattgaagattagcttgtattactaggcccgtatatttgttcatagatcttaaaaatgtttatttggtcattctgaatatttcaattaagtagtaaatatatgtttttaagcatatgctggaaatttaaaatagggtgatcattcactaattggaaccaaggtaacaattttgattcacctctatcaaagacagctaaaaataatattttttacattatttcattgcataccgagagccatatctttgcccattgaggtgccgccgttgcgcttccatgagataaaatccacatacgcccttgggctaatgcatcgttattatgtagggcctcaccaaggagctttaatgtagcatagttcaagcatgagccaaacatggtactctggccaagaacctgtgtcccccagccgccatcttcattctataaacatgtattatacatataaacaaaattcaatttacatatttaatttaaaattctatttttattgaaattaaattgttatcaaataataacatgcctgatgattgtaaatgtatcgacatatctctcgtttatgttccaatgacaagacgacatcgagcgttcccgtaacatgcatggagaatatctgaaaaattacatcaattcacaggatgtatgaataacattttgaggattataaataggacttaggtgccatccttattcaaaatccaacaatgttcttcatggattccaaagaaagcagccacctattcaaacccaggtcaatttctttgtccaggggtgttctagttgtccttcttatttctatctctgaaacagctgaaaataatgaaatattgcaaatattgcagatagtgttctgtggcaaagaatcaatttttttatccacgggcaaacctactttttagaagtcctccagcaaataccacattttagagtgttgtgtagcaatttttccttcaacgacagatcaatatatacctttattttcaactaagaagctagcccacgtattcgcgcgggcatgtgttatgggttgcgtttaaaaaacttacatagacaaaatatcaattggatgacaccttcaatgttttataagaactatttctccaaatgtttcttcatcaacattgcttaaataacttttccaaattatttgatagcttttaaaatatataatatttaataaatccctataaaataattatctatgatctcttcattgtggagttagatttagtttgtttaaaaaacgtgtctaacaaattatgtatatattaaaaggtgttttgtcttgtttaattaaatgtttaatggtttctttaaacaaatcctaaagaactatgaaatagtatgttttatttgtaccatgaagttagccctccgtttagttggtttagattgttgcaagttgttacatataaattaacaaagacatatcgtacacctcgcttcctttttatatacatgatttatactactttttaacaagaaagtacctagttaaaatgaatccaattaaaaaatgctttttaatagtgacaaatataacttttcaaccaactacatactactattactggggtttatatatgcaataatatgtggtaaaacttataatgctatggtatatgacggatgtaagtccattaatatctaaccatttaaaaactgttataaaaatagaacatgtaatggttggtccaattttagtgaaaagtaagaaccgatttattttcaaactcattacattttttttccaaatagttcaatttagttccgattgaaattttctattttctgttttattttataccagttaaaactatagacgttatggatctttaaattgttggtgtaattatgaatacaacaatagttagaatagaaatcagatgtgtagcttgaaaattatgcattttattttttttttattatttctcgctatataaaatgtggagtagagtggagagcttcaagtcgagaggcaagtggacacgtagtgttatgttctgcgcatgtgtgggggagcaaagcggaggatttaagtgaaaaaccaatgatcccatttttgtcctcggaatttataataacctcttttttaatttttatgttgtaacgcgtggtggcttaagattttactaaagtatttcaattggttaaaaataattgatccacctatttaagtggaaactaatagtcatatgtttttcttataatttctaagcttttatttttatttaagacgtaaaacatgatgtcttaagtgtgctagagaagatatacaatgactaaggtgatataatacttattttcattttttatagtgttttgttctttttgctatctggttaccatgtaatggattgacatctatgttcaaatgatgtatttttatttttataccgtaaaataggggtaatatggatattgatttatttattcaattataaataaaaaatcaaaaatactaaaatatatataactaaaaattataatcatttagctttataattatttattatttttattaattagttataaaatttaaaagatgaattaactgaatgcaagaggagtgaaatacagagttgaagggcagagagtatgcacatattataatattttttataggttatagtgttttagttgctattactttattaactaaaaatacaataaattctttattgatttattaaaatctaacctttttactcatcctttcgtataatatattcatagtagatatttaaaatttgaacagtataaatataataatgctattttgatttattatagtgttagaacgggggagtatttttctttaacattactcagagtttaggttcatttaactttaatcattatagatctaatttaattattatcaagttatatgcgatgataaaatatatatctttgtttttatataattttataattgtttgaatcacacgcaaaattcagaaaacatagcccaaagtgacatatttcattttaaagctgaattacagtggatataaaataatccaaacatataagtggatcaaatattagtatataatttagatgttatgttgcttaattgcttaacgcaattccttttgtttttctaactaataaacattaaaatagaagaaaaaataggtgaaaaagaaaggaaagaattgagggaatagggggacgtacgtaacgtacgtatatacttgcctacaggtctaggtgcgcccagtatttgggagatgatatttttagaagataaatctaatggttataaatagtgggtccgcgaaattaaataaaaatcaacggtaagatgttttgcctttttttagaaattttaagaatttttttatttttatgccacgtggcggcttagaaacgtttgtaaatgctatgtggtggtttaggagtgtttatagtaagtttaatggacttttagtatataatagatagatagataacagatagatagatagatgaatagaataaagtgcataccaggagtggcataatgaacaagattccactgtagtcaccaggccaatgcccatcatgtgcttgcaaagtcgaatattgattaagagctcgtcgcaatgaagacaatatagtttcttcggtaacattttgattatcttcaactatgacagccgaaagatctggttgtagatgccctaatttggcatactgcagagaagagataccagttaacaaaaaggatcaactgtctgaaaagacttattagttttgtaacaaattatgcttccacgacctcagtaattcctaggccctttatatagactgaagatttttttcttataaaaactcggaccttattgggccaaaactaagaggtcataagataagacactatcaatcccatgcatttgagtactctatcgatatttatatggactatctatatttatgtcgccgtatttttcatgaaaaaatagtcaacacactactagaaaacatcaaataggtgtcgacacttatnnnnnnnnnnnnnnnnnnnnnnnnnacctacatataggcactgagtccctattctgcagtagtgtatttacgatgtaaatatcaacaggtctgatacttgagtgcatgcaatgagaagaaaaaaatatcaacaaattaagttctgcagtagaccactaatccactgacctagggatgaaaacggagcagatacggacggataacgctcataccatattcgtttttatatttttttaccagatacgaaaatgaatacggatagctcgaatacagaaacaaatacggattatctcgattacgaataagaatcgaatatgatcggacacgaatacggaaacaattttttctcggaacacgaaaaccaactcagcttctaatagaaacaaatatcaacatatataattagctcattttatataaaatgaagtataatttataaatattttttacaatttaaataatattaatacggtaaatctaattggagaggcctctccagttagtcttaaccagagacacccacgtgctagtacttttaggagttttggttgctattagtatatccaatagtgcatatcttagttttcttcttatagaattttgtcttaaactagttatccaatctacaatctgattataccattacgttcgttgcaattaaatctttacaacaagatcttacatgattgtattacgataaaaaaatatttatatttataaattacttttattatatacgtaagttacttttatcatatatatataagttacttttagatttgactaaattacttctatacattcataatactctaagttgattatttttattattgtttttagttaattctatattttgtggactttataaatcttctatacactttacttgcgaatttactctacatagtttcttatttcagctcactcacaatttaattatttgggcccctaattatttctactacagagagtaaaattactccctccgtttcataacgtaagtcattctagcattgcccacattcatatagatgttaatgaatctagacatagaaaagttacattatgaaacggaggaagtacttctattgcataactaagttacttctgttgcatataattacttctactacagaaagttatttctattacatagctaagttacttctattgtatagctaagttacttctacaatttaaatacattacttttaaattaataaaatatttgaatatatccaatatggatcttgcattgtcacatattttatgtagagtataacgatgcaaatatatcttgaaaataatacatgatttaaaatatataagttattaaagagcttaaatctaaaattaatttatatatatgataaaactaacttacatatataatagaagtaacttacatataataaaatttacaacatacatatattttttatcagaatataatcatataagatcttgttgtaaagatttaattgcaacgaacacaacagtataatcagattataaatcggataagtaatttaagagaaacttctctaagaggaaaaaaaatacatagatattgagtgtactagtagcttttttttttttgaaagaagggtgtctctctttagcactatccagctagcactctcagtgtagttgtgtccattttaatagtatagactaatgttaagagataaactactattaaaatctataaaggtatattgaaggaaacctcgataccataaccatattcgtatccgtatccgaactatccgagaattatccagtccaagaggtatctgttttcgtttttgtccggagcggacggaaactatatggtccgttttcatccctacactgacctataacttgtagttacgcgtaatataattaattataatagcacgaatcctatgaccgatccaacggcacaaaaactgactgtaaccaaccagaaaatgtgtcaccaaaaatttagcaaaaccgtatttatatttaccacaaaaaattttataaaaaagaataccactaaaagcgctacaacggaacacctttaatttggagcccacacttctctgccggttgacaaaagtttactccgtatcgatcactgccggttcaatatgctacagtttagaccttggtttatgaagggataatttaaatacaacattattttctgcctgatggaaatccaaataaatcactatatttttttttactgggatctatgtttaccttctgaccaaccgatccgacactacctaaaaaagcatttttctatctggccaaaccctatttttccatgtggttgggacgcctgtatgccccaaaaggtctccaaaaattgcgatttttccatgcagttaccacatctgcatacgaaaatccgggtgctcatgtgtgccacgtgaaaaaataaaattccccaaagaaaaaaacacctcaaaattgaaaaacagaaaccctagctagcctggtgccggccactaccttcccgccgtggccactcctgaggtcgtgggtggtggatccgcccgcccctgcagctcgccgctaccgccaccgctccttcggtcaaagggcatggatctgctcgccgccattgctcccgttgttgggggagggggtacggtggatctgcccgctcccattgtcctgaggttacccatcaccgagcacccgagatagccgccgttgtcgctgcctaccaccaaggccatcaaggggctgagcccaaggaagccgaagccgcccgctgcctgccaccggccacacccactgcccaccggccgctagccactgagagagagggagaggaggtgagacagagaggagaggaggactgagaagataaggttggacttagaagaaaatgtaatgtgttgagaaggaaagtggaggcaagttaggcggatccataagagatccgtctacgaaaatatattattgcatgtggcacttaagaggtccgcctgtaaaaataggctaactttcgcatgcagctacttaagtggttcgtatgtgaaaactaatttttgcatctggacatcttaaggagccgtatgtgaaaatggaggtcgattttatagacgcggctacttatggtccatctgcatccaaattaacgaaggtctcgtccagaaaaattattttttaagtagtgcaagataatttttttattacacatttactgttcttgacatatatctgtctgcagaaaatgtttttattagaaacatacatattcagttagatatatcatttgtagtaatatctaggaatgtacaaatttcttaattgtactattaggggggaagaggagttccaaaacccggctcagatcggctagcttgaggccttgttaagtttgcgaaaaaaaaattttaggtgtcacatcatcggacatttgaccatatgtcggaagtggttttcggagacgaatgaaaaaactaatttcataactcggctggaaaccaagagacgaatctttggagtctaattaatccgtcactagcacatgtgggttactgtaacacttatggctaatcatagactaattaggctcaaaagattcgtctcgcgattttcatgcaaactgtgcaattaatttttcttgttatctatattcaatgctttatgtatgtttctagagattcgatgtgatgtttttgtaaaaaaaaattaggagctaaaccgggccttaacaagccaagacgagacagctattttgctcgttgagctacgagccgatcctgatcctgagccagttcacgagctacttgttaggctcgttatactcgttatttcagtttcatgtcagtttcgcatttgccactcccgcatcccaatcagatggcccagcccagtacagtaggccagtagaaagctccccatcgtcctcaataggtctgttgaaaaagctcgagacctattaggctactttaagagcatctccaatagtctctctatcggtctctccaagtcaaattttaaccatttaagtaaaaaaagagatccaacagactggccaaccgaatggccaagccatccagctgaccaaactcgctcgctggctggctagatttggctagtcaaaacgcctgccaacacatcgatcggtcggcgcggctggtgtactcctcgcgaggtcggagtgggcgccgtcgtcgtcgtcggggtcgtcatctaggtcgtcgtcggggtcgttgtcgaggtcgtcgggggcgccgtcgtcgtcatcagggtcatcgtcgaggtcatcttcgaggtcgttgtcggggtcatcctcgaggtcgttgccacgagccaccaccgccatcgcaatccccgccctgtgctccgccgcctcccgcctccccatgccgccgccgccatctccatccccgccccaagctccgtcgcctcccacctccccgcgccacctcccgcctccctccagcgtggtcgtcgcctcgaccggaaggaaggaatggggaaaaaggaaagagaaagaagaagggggagagggagagagaagaagaggggagagtggctgatatgtgggtccgattttattttggagagaattaatagagagtctgttggagtaaatatctagtttaactagccaaatcagatgaagagttggctatattagcgtttgaagagttcgatttagagaggctgttggagatgctctaacttggctcctattaggctaagcttgagctggatttgaacttcaaatgagccaagctcgagcttatcttctgactcactccatcaaaccacatggtcacacgtgtcttcatttgttgtttcacactagctagcctactgcaattaacaatccagcacaagcacaatatcgaataaatatttggtgttcttttcttattaagatataaaattttcatcgatttctgttagcacgctttttaatttactaaacggtatgtttcgtgcgaaaactttttatatacaagttattctaaaataccaaataaacccatttttcaaattttcaataattaaaaataaattaatcaagttaatagctttctcgttttacgtaccctttcttcatcttcattagatcccaactaaatgttttataagcaaatcttcattagcaaagtagactttgcccaatggcaatcactttttccctgaaggagtcaggagtgcatggcatgcatagttgacttgtagtaggaggagtacagtagcaaaccttgagaaaaactcaaagctcgaacgggctgagtcggagcccaacataaagctcaagatttgatgaggcccgagtcgagtccatacaaagctcgagcctggctgggcaggctcgatcaagttgataatcctactccctattccctaacagtacacaaccttagtcgcacgtacgcacgcaagaagctagggcccacgagacacgtcacgtcggtcgtgcgagtgggagaacgccacgtttcgcgccccagctctcctgtgccgccggccactactcccagagtctcgctgtcccctgatagactgccccgtcgcctcccagtcccatgcgcccctactcctcccgtaggggctcttctgcagggtcgcgccactgaccatgcaagtgaatatagtctcgtcacccgtataaaaaatatgtttgttagtttattttaaactcccttcatactcataaagaaagttgtttagcacaatgtttaaatcaaacattgggaataaatcataaataactcttaagttattgggtttgaaaatataaaaataatataaatagatttatcttgaaaaatacttttataaaagtatacatatatcacttttaaataaatatttttacagaaacatatatcacttttcaataaatatttttatagaaataacaagttaaagttgtgttttggagaccgtatcgctgtcgactttctttacgagtacggagggagtatatagcagtacaaaatttagaagaaaaagttaattagaaataggacaagtagacaaacaaagcccgcttgtctcgtcccgcttgcatccctacgcgccacttccatgcgccgcctcagcactgcaggctaacgctgccctttatgccctcaggcccttagcaccacactgcatggtttggaatgccggttggcatgcgtgaagtccaagaaccgcagcaaggggaagaactcgtcagcgacatctctaaggctttgtttggtaaatgagattggaaaataatatcccaccctccaaagagcaatattgcatcatatctattcattcctcacaccttatttaatcctacccattaatccatttccctttttcaatcccacctcccatatcccatttgccaaacacactctaaattctaagtgcttagtgctctctatatcctaagtggttgcactgactggatgagtggactataacatagtgctttctagattcttatgatgtttgatcctatctcattgctttattccttctaacatcattactagctactgcggcatgatgtattcttggtgtggatgtagtggatcatattaattaattaacaggattgcacaagggttcaaaggagtcaattcgatcgttaactagctaattaaataagctcaactagccagttcactgagctgagccaagttggcatttcacctcgttatatatactcttaatgagccgagccggctcgttataacgatttagaccgagccgagcttattcagacaagctatcctatctagtacaggaatgatttttctggatggcaggcattttaaattgtagacggatcgtaagtggtcgcgtctgtagaaatcgtgctccattatcccgtgcggctctctaaaatgaccgcaccgaaaaattaattttcacaaccgggcatatattatgatgtggaccttgttaatgacccgcacatgaaaataccacccacattttaatctcgacatctgcgccccacacccacactctccctctcagatcccgtctcctcccgtctcactctcgcacgactcctccctctccctatccctctcctcgtcccactccttcctctccctatccctctcctcgtcccactcctcccatctcccggcgatggcctcggctagggcggcggaggtagcggcatcggttagagcggccgaggcggcatcggccagtgtggcaagcgggaggccgaatccgtcgcctgctaccgcggggatgccggatccgtcgccggccactacggggactactgcagcgggcctcaggcaaggcggcgatgatgacggtggtgacggcaacgacgaagtctagattagggttccaggaggcttttgatttttttttcgattttttattttcccgtgcgggcggtttaagcgcccgcatgcgagattttcgtagacacctcgttctagacgggtggaagatctgcacacaaaaatcaattccaaccgcacggaaaaatcgttattgtactagtgccatccttatctatatcattaatattttatatcatgactgaattactttcataaataataagaaaattatagaaacattttaatagataattaccaagttgaatatgataagttgtcgtagcaatcaaacattcctgtttaatattttatattggtagtcttgacaatatataactcatggattcttcatccggtcagtcttttactggattccgtaatattagaattagatattaggtggtcatgcttaggataatagttgatatcaagatcagtcccataaaaaaaagaggttgatatcaagagattacaaagctcacacttacgactgtaccaccacagcacaccagtagtattaaggaagtaaaacggaccaaagcgttaaaaacaaaatttgttaattaataactaacgtgcctgcatccgcatgaggaggtcctgtgactccttcctctggaagcggtggcgggtgaagtcgcggcgcagcctcgccacctcggcgcgctcctccggcgtgccggcgtcgggatcgaactcccacactgccctgcctaggaagccgttgcccgtgtgcagcagcgggctgctgccgctgccgccgccgctctccgccgcgatcttcagccgccacatgcttgcctacttgcttttgctttattttaccagtggtactgcttggtgaacaaattaaggagcttgcacttgctagggtacgatgtctatcttatatagtagaagccgaacgagtgcaggccacaccatccacctaccttaccattttttttctcagtagggtagtgtcgtgggtgtttatgtgaacatgtacgatcatttattgtactctacatttgaaaactggaacggaatatatatcttgtgactggtaaagtcaccataagcgaggcctatgaacacaaacatacacacctaactatataagcaccgtactaactatataagtaccatacatctgaagattgagccatcatatcttgagagttatagtagatgccttgctaatagcggtacaccgattcactgaaaaaaaataaataaccttaaatacgagcatttgtgccaagtatagaatttgaatcagcatgaatagttttcaccagcagaaatctagctaaccagttaagccacactgatcacttcgcaacctttattttaaatagcacctatcttaattcattgcttcgatgaatagtacgatggtgtggtctctgaaacgtgctacccactaggcgtttgtatgtactattgatggtagatgataacaacaagccgaattgatgttgatttaaggaaataggataaacctggtctctacgtggttcgatgtagacgggcaactgatgaattgtagttgaaggctctcttcatgttctaccaaatttattgcgtttatattttgatttcgactaaggcctgtttagttcccaaaacaaaatttttcatgctgacacatcgaatatttggacacatacatggagtattaaatgtagaaaaaaaaccaattacacagactgcatgtaaattgtgagatgaatctttataaactaattgtgccatgattcgataatgtggtgctacagtaaatatttgctaatgacggattaattaggcttaataaatttgtctcgcagttttctggcggattctataatttgttttgttattggactacgtttaatactttaaatgtgtttccgtatatccgatgtgacaaccaaacccaaaacttttccccaactaaacgggcctgatctcacctaaaaattgttaccatgtcaaatcaaacgtctaaacacctacatgaagtattaaatataggctaaaaaataactaattatataaattacgactaatttgtgagacgaatcttttaagcctatttgctccatgatttgacaatgtgttatgtgctacagtgtatatttgctaatgacagattaattaggcttaataaatttgtctcttggtttactgatggattatgtaattaatttttttattagtgtccgaacactcccatgcgacaccctatataatactcgatttgacatgctaaaacttacacccctggatctaaacaccgcctatgtactgatgaattgtagttgaaggatctcttcatgttctaccaagtttgcattccaaggcatatgtctcacgtgtacaacaatactccccttctattccaaaggcatgcaattgcgtacttacacacatctatatggattgtctacagattaccataagtgcgaggaaagttaagagactcgggaatggcttctataatcaacgttggcaccgcgccttgccgtaggttatgtagttttatcgtcatgtttcaaatggttagatgcaactacaaaatatatgataatatggctttatataaacccaatgttattacaatgcaattcatgctttatttttcaaagtgttattatgtattgttataatatgtgaatattatattgatgtgcaatatgggtatcttgcaactagatagtttgcatctatatctacttctctcaggcttgctctgaaaatggtttcaagtaacgatacataattgttacatgctatttaatcacgtataataaaccaaaactaacattttaaacaataatttgagttgtatttagaaaaaaagttaagcattattttggaagagaaaaaacatgacgctctgtgtaaaataggaatgtgaatgtacgactaatatatgattaatttagatggataggtagctgcttgaactaacggttgttatctttatacaaatatgatctaatggcttaaaactatatatcgatgatgtggatttttacatgtcttgctttataagagtaaatgtattttagtgggtatcaactatacgggct

SEQ ID NO: 11178 - DNA, 671 bp, Oryza sativa
cccgcgcccactccgcccgtaccgcacgcccacgtcgccgccctctccccgcatctcacggcccgtgcgcgcgctcgagagggcgggattcgatttgaatactctccccctctctctcctcctccacctctccacgtcgtcgccgcggaaccgccgctcccggccacgtccggcctccccacctctatataaccgaccaccgcgcctctctccacctttttccctcttttgccgtccgctcccgagctccctatcgccctagcaccgtgcgcccacccgccgccgccatctccaccgctccggccgcctctagcagccgctagggtcgccgccgcaccccgccatcggcaccgccgcgtccgccatcccgaggtccacctcgtccgctgttctcccgtccaattccatcgccggagctcgcatctcctcgcactccggtgagcttccaccattgccgccgccttcgatcggttatgtcgtgcgccatggaccacctccctctctctaacccctcccaaccttttctctaggtcctcccggagcccgtcgccgtcatcctcccgtctctcgtcgttgccgttcgccgtcgctcctccctcgcgccggccgagcccctcggtgaggatcggtctccccctctcttcctctctctccctttgccgcgccgcccg

SEQ ID NO: 11179 - DNA, 689 bp, Oryza sativa
gtggatccatcaaatgtggaatcagttacaaagtggaccccaccaaagatagtttctcagatccggagttttcttggacttgcgggctattaccgtcggttcatcgaaaatttctccaagattgccaggcccatgacacagttgctaaagaaagatgaaaaattcaagtggtcagctgagtgcaaccaaagttttgaagaactcaagaagaggttagtctctgcaccagttataattctgccagatcagacaaaagacttccaagtctactgtgatgcatctcgccaaggattgggatgtgtgttgatgcaagaaggcagagtggtcgcatatgcttcgcgacagttgcgtccacatgagaccaattatcccactcatgaccttgagttggcagcagtggttcatgctctgaaaatctggcggcactatcttattggcaaccgctgtgaagtttacactgatcataagagcctgaagtacatcttcacccagcccgacttaaatctccggcaacgaagatggctggagttgattaaagattatgacatggggatacactatcatccaggcaaagcaaatgtggtagcagatgctctgagcagaaagagctattgcaatgcagtatgtaccgaaggcatgtgtgacaaattgcagcaagatcttgagcacctaaatttgggcatcgtaga

SEQ ID NO: 11180 - DNA, 810 bp, Oryza sativa
gtttgtgttctacgcagtagactagaatacctgaacaaaaagaattattggcatgcgtggtgctgaagaaagagaatttcagactacgaacaatagagacagattctctagcagcacatgagatgcccatacatgacatcctttgcgattccattttatgtaccaaatactaattaaaaattgaatgctaattagtcttttagacttttcattgaatcaatttttatagttaacaaggaaaatcttaccaagccaccagagaagaacaagactgaaaagtccgaggtagccaaacagtttttggacatcaaccttttctccttcctctccagcaaacttttttagaagcactaaaataatgttgaaacaattagcagttgaatcaagacagatcaactaaaggaagcaaagaactaaccagtgaataaaccatatgacatagctgacagaagaccaaacatgtcacctagaagagttctctgagtggcactgcattcataaagtttacagattagctgcagaacttgtggccaacaaagtgagtgctgtctcaaagttacaaaatcatcttcaacatgatcttcagttacaaggccatcttaaaaatggaataaatagcgcttttatgtttttttatgcacttatatttatatgaaaagcaattcagttgcagcaaccaatctactacaagcaagcaaatgcaagggctttatgagcatagcaaattaatcacaaacaattttatatgtcctgaggcatcagtgcagaactgtgatgtttatttaagggtaaaacgcactaacccagaat

SEQ ID NO: 11181 - DNA, 704 bp, Oryza sativa
gtgggccttccaccctgatcgtctgtcagcaccgtccctatcacccgagtaacttcgacaacgactacaacggtggcagtcacaacaacagtaagcagcacaaccacaactcgactccacccccactaatggcaccagctcagtcagatccgccagctgtgtcagttcagtcagaacaacccaagaagggggctgtaggaaagccaggaccctgcttcaactgtggcaagcacggccattttgctggcaagtgtccgaagctgaatcgcactggacccaggttcatccaggcccgcgccaatcatgtgtctgcagaggaagcacaggcagcaccagaggtcgtgttgggcacgtttccagtgaactcatatccagcaacagttctctttgattcaggtgcctcgcattctttcatttccaaaagatttgctgggacacatggattatcgatagtagaacttaaaataccgatgcaggttcatacccctggaaatgatatgaggacagcacactactgcccctcggtgactatagagatcaaaagatcaccgtttctatccaacctcatccttctcgaatctaaagacctggatgtcattcttggaatggattggttgaccagaaacaagggagtgattgactgcgcaagccgcaccatcaccctaaccaacgacaaggggagaagaacaccttccgttcccagc

SEQ ID NO: 11182 - DNA, 1507 bp, Oryza sativa
ttgccgtcgtttcctcccgcgccggccgaaccccggtgagaactccctctctcttcctcccgcgcgcgccgccgctccccgcatgcgtgtcgccgcgatgcaccgtcgcccgcgtcgccggccgctgttgtcttctcgccggccgccgccgtcggaggccgcttgccgccgccgccctcgccataaccggccggccggcttgaagccgagccgagccaggccgctttcccccccccccttgtgacgctgcccggtgggtcccgcctgccagccgcccctctccctctctcctgtgcctctgtcccgtgggtcccgcatgtcggcgccgccccaccccttgctgacgtcagccctgggatgaattattgcgcaataaattgattaagggtttttcttttatagtaataaacacagtgaatcttctaaaattcataactaattcatccgagctccgattaatcccattcaagtctcagtaaattcataaaaatgtgtagaatccattaaaaatggttttgcttcctgtttcagtagtcttatagcatgttttgcttgtgtgctttgtttgtcgcgtagatttcgcccgtttcgtcgattcgtggtttcgcgaagacgttgctgtggttccatcagtgcgagagcaaggcaagtcatacattgcaattgatcatattgtacctaatttacaaatgtcccgcatttctattaaatattgcattgttttacaatatcatgtgggatgggtcctattactcagctatatgttgtttcccatatgccattgataacttgggtattaaaatgactagatgttggtttaggagatgcttagccatgcttagttcaactagtgcacaaaaggggaccacattaaagcatagacttgattattggcaatagctttggattagtgccaccgcaatggtgttggctaattaaaatacactacatggtgggctgtgggtgcatggttttgctagacgtgcccatggcgattaaggaccggttcgcgggatgccctggaagaacttatcgtacttaccacaagccagcgtgggcaacggctgggcttgtagtgtagcttttctctagccgacgtacccaggcgagggtgggcgtgatggagttgggtcggccggggtgtccggttgatcggctgccggattcaccgcggcacgaaaggggggctgcccgttgcctgctggggacgggggcgaaccctaaggtgtggtgcgatcggttagagggggttatacgaagggtcctgtcacggcctctttccggtatgtcgtggtggcatgtcggcgcacgggaacgtgtcgtggggctgtgtcttgtgggtacagttgtacacctctgatcagagtaaaactattcgaatagccgtgcccgcggttatgggcggtcgaccagattcaccgtgattagtttcaccctagttagcttttggaactgattagtttaggtggtggtttgggcctgttgcaacgtggtgtaacgttggaca

SEQ ID NO: 11183 - DNA, 744 bp, Oryza sativa
aaaaccataatctctagcctgcttcttgattgctaataagggtttcatcggggtttcagctggtgagttatctggacgttgcatcggctcataaggattgcatatacatataagttggatttagccgatgacaacaaaggcttcactgtttaatctaatcttgtggatttcatgacatcggacctccatccgatgtgtgctttgaccttcggatcgatgcttatttatcatatcattatttgctgattggtttatactggattatattgttattttattacatcgtcgtcagccgattgcctttatatcattatctacattggacatatagccgattgcttaaaccctatcggcatcggctgctatcagcatcggctattatcggcatcggctggaactactccatcggcttgtcagccgatcggttgttttgatctactatttgcatatcttgtcagttacaggatcaaactgactggcacgctcgtatctcaccaatctttagacctgcactggagttaagcagatctctcaggctggtgtgttcgatttttttcatcagtatctagcatcgatccacatcagggccatcctagttacatctacatgattcatttaataacctccttaattgatgctaccataatggttttattttggtactaatcaaaacacacttttgaacaaacttgagaggataagcgttggaatcggtacaatatttagagtatatttgccacagct

SEQ ID NO: 11184 - DNA, 793 bp, Oryza sativa
ccatccatctatatctatctggcccagctacgtacggtacatgcaatgcaaagccatgaagcatcttttctccctgatcgatcgtccactggtccatcaggtattcaggtgaattgcaggtatatacttatgaacacacgatacggccgacgggttgctacggtgtcccttctttccatctcttcagggttcagactacttcagaaattagctcttcaggtttttaagcagctgggacgtcgtcagtactgcagtacagtgacaatgtgtacagattggttggtcgatcacttaattggttgcttagcttaaatgatgtgctcagatcatcagcaggggtactgtacaattgcatatcgccttgcagaaggaaataaattagtaaacgtcaagatgcattaatatataccttgatatcagcatatatatttattatgtcatgttagtgtcaatcagcgagtaattaacgcgttaagcgtacaatactggtgtacatggcgtgtgcgatagcacacatacgtagccatcaaactcactcaccattaagagtaatcgagcagtagtaattacaagtatacgtactgctaattaatcgctcagagcaggcaaacgatgttgatacgtgtggccgccggccgacgcgtttgcagaagatccggggcggatcagacgcttgcgtgggggaaacaagaaggtgttttgcttgcttggggttcggatcatctgcgccgcgtcgaacgccggacgcgccgtgcggccacacgcggcggcggctgtcgtcgccgtcgccggg

SEQ ID NO: 11185 - DNA, 773 bp, Oryza sativa
cctcgcgtcctgcgtccaccaccaccacctccgtggcgccaccgtcctcgagctcggcgccggcacgggcctcccgggcatcgccgccgtcgcctgcctcggcgccgcgcgctgcgtgctcaccgacgtgcgcccgctcctccccggcctcagggccaacgccgacgccaacgggctcaccgccgagcaggcggacgtgcgtgagctccggtggggtgggcacctcgagcccgaggtccaggtggacgtggtgctcatgtccgacgtgttctacgacccggacgacatgccggcgatggcggacacgctgcatgggctatggcgagacggcgacagcgacagcgacggcggcggcacggtggggtgggcggcgagcgaggcgcgcgacggcgtgcaggactgtatcgacgtgctgcgagagcaaggcttcgaggtggtcgaggtagacagggtcactaggccgctgctgcgcgaccccgagcaggccgccgacttcgccgtctatcgtctttttcgccggacaacttcgccgtccatcgtctccaatccaacgccgataactacagccgggtgttgactttcactctgtaacagtaaagccaagcttgtaacggcaccagaatcacctttgaccttttattttccaaaaggccattttgtacgtactttcttctcggttgcaggacttgtaaatgttccacaatgagtcaaggggacaaagacatagcaataatatatgcaagtctactgtaggaagctacagtagtatacat

SEQ ID NO: 11186 - DNA, 520 bp, Oryza sativa
tttgggtgccatcatcgatactatcgtcgacaccttggtgaatgatgttgacattgcacgcttggtttgagtggtcactaatggggcatggagcatggttgttggtggtatcatcatcattagtattgctaatgttgttgtctgcattgtgtccatcttcttggggcggaaactcttgatgtgcaacagaagatccgatgatctgaagtggctcagtgcgctgtctttggttaccacatgaagatactgggatgctgacaatcctcctcttacagttcttcatccgattatgctcactttcgagttgtatggctttgtccacaagtttctcaaaatcttcatattcctctaggagtagttgcactgcgatctcatcttttaacgcctggagaaacttctcttgtttgtcttcatcattttccacatcttccggtgcatagtgagccaaacgatggaactcgtgcaggtactctgtgacggtcaaatcttcttgattcaggtagcggaactctcgttttct

SEQ ID NO: 11187 - DNA, 21832 bp, Oryza sativa
  unsure (1)..(21832): unsure at all n locations
agatgaagaccgagtcaaattagccacgtaggcgccacgtcagccaaaaccgccatctaaaccgccgagggatctcatctgcaccggttttgatagttgagggatctgttttttctgttgaaggataaaaatcggattcgttgataagggaccttagatgaacttattctggctgtcaaacgcggaggtgtccctagcacgcgctgcctccgacgaacgcgcgccacctgttcgacgaattgctgctccgagacagccacggcctcgacccccgtgggcaccctcaacacgctcctcgccgtcgagctgttgaagcggatggacagaagggcgagggcctgtccacagactgttgctcccaccatctacacctacagcatcctcgtcgactgcttaccgtcgcgccgcgcgtacccccaccccccgacctaaatcaaagtttactaggatatttagacttttccattttttatggctttgtttcaaattctctttcccttgcgggactactttcacataaataatcgccatgggtatctaactaccagggtttctccccttaacatccaaacaacctgtaatatactcaacgccccttatgcatatgcatatccgaatcccctattatcaacctaaaaatgagcaaaacttttacgtatgtgtccttagcaattcaaatccaaatgttgtaaaataaactacaatgaacaaaactacaaaatcaactccaaaattaaaatttaaaattcaaaagttaccttataagtataaacataagcaaaatgatgcagctgctagtctaaaacaacaaaatttgaatggagtaaaatgattcccacaaaatcttcgtgttaatatttcccttgaaaatttcacatgaaaaatgaggagattaatgaaacaacctttgctagaaagtacagagcaaaagcagcacgttcagttcacccgaccttgctggcaagtggcatcacaagagtgcacatctcatgattcatgatggcattccaacttagcttaaggtgtcaactgtcaacaacccattgcataaagctgttctacaatatataactgctacattttagtcaacctatactacagaagtatcagagtgagacatcagctgctgattatgtacacgtttcaggcatccagtacaacagtagcctgatttccagtaccagtgcagtctagatataaaaggtttgtgtgcaaaagaactcctaggttatacagaacattatccaccattcatcctgcacttgatgtctggtagcgttctccaatactgattcaaagattggggcagtactgcagccaaagtaccccacgattcaggcagaatgctcaagatctcttcctcttttcgctctttcgcagacgtcctcttcttcctgtcaagagtgtgtttttccatgtaagtttctcatttcaagaagaaacaaagtctcacacatttttttcctaaactgaaaatgtgtttccagattccttttctttcccctcaaaacagacacatcaggaaccagaagatgaattgacgaagacaaaaggtgtttccaggtttcatttttgtcgaaatggttacatcagagcattgaactcccaagtacaaagacagataacgatcttttatggagtaattgtaactaagatgccaggcaacaaattagacaaagcattcaactaacctttacggggcgtatcatgtatttgcagcttagcagcagcagtcacagcaactgagccaacctacaatgggtgacaacgtacatggtttagtaaagatgcagtagaaggtaaaaaaaaaaaagaccctcaacaaagcggcgtgtttggtttagaacattgaaccctggacgttcatggccaaaactaaaagtccataggtgcttactaaaagctgggcatgttacgggctactatgctaatgcatcctcattagaatatttagtaacatggaagtccacataagagatcctagaaaataagcttcaatattttgtccagaacgaaaggaatcaaatagccaccaattgatatgatctacagatagcctttttaaagtaactaaaacgactatttagttatattacatggatctataggatatgtaataacatgtggcttatctacatatattatttaagcagcagcatttcatcagtcaaattgcatcatgatcattgtagacatacattgcacaacgtattgtggtgaaaagtggaattaaagcttaaatgatttgcatttaattagctatttctattttttcttcaaggagcaaaactcaacatacattttcctgagaaataaggcctgtgggacatgtgacatttttatttggtataacgttctcagagaatgtattgtcttgcatcctcgccctcttgtagaccttttttgttgaagcactagttgaaattacgatcactttgccattccgtaatcgcctgactgtactgccttctgagccttgaggaacaccaaactgtggattcatcccttcatttgtttctaatgcatccttagtacccaggtgtgttaaggatttgccacattttggtgttgcacaatctcctaagacagaggatacatgacttgtactatcattatctaatacagcatcccgtttagcgttactcttcgcatattataggcagaactacagatggtcctacacttgatgttccatgctgaactttattcccattctcacatgtattcatgagcatacataaatgctggttattttcttgatcattaccacatgtttcactaggggttgcacgaggttcttcaggcatgtccattctgccagtgcaaaactcctcagaagtggccaatgtgcccatgaaattaacattacaatctgtatttgcagtaggatcctcaacagtaggtcttccattagaagaattagaaagcctctcgctaggaaatctgtctgcatcacttctagacccctgatatatgttgagaccatcccaagagaaaagtcccattgaatattttaagtttccccgcaaaaacttttctatataatattcagtagattttagtggagattgcggctgcttgttcatctctgccatgtttgcattaataatattctcccattgaaccggaaagccaagtgagaagtgtttggacacctgcatgaatttgatgagatagatcatatattcatatatgctgaactcactgagccatcagtttaggatctcttccagatattagattggcagagtatacaaggcatgtcaagcaaaactgtctaaattatgcagcagaaacaagaacaaaatcactcaattgttttaacagcagataatgttacaaaacactggtcattgaagacagaggcagaactagaaacaccttttttttttttaggtggggtgcccacgaaatgattagtaatttctactacataattttctaaagctacagtcatttgaatggaatttgtatgctgttgggggaggtgaagcccctgctccctccccacccctatccagcactgatcaaggaccgataaataaagacagaaactaaatacctcgtcaggaaatccattcagatgcattttagaaatgttcggtggacgtgcaatcattatgatgataccatcttcagtctcaaggtcaccactagcatgccgtgttttaatggaagcagaagtgaatcttctaccagctcgactcctgttggaagagtgaccaatttgtcaataaaaaatgtttgttcatccataaaaggtctgcaaatggtttaatattgtatttacagaagataatactgttgtcacaagttgcaaaccaaaagatgagaaataatacccaagctaagataaatgctatgccagaacctgcagatatttagcaaaagaaatccagagacaatattataacataaattagagaaatgaagtcaccagtttctagaatgaaatttaaaagagtcacataattagtctcttcatatttattttggagttataggttagaagcatttttgtttgtaataaaatagaaaaatcatactagatttagtaaatacatttcccctaagtaacaagatagtatcaaattccagcacagcacagcagccacaaaagacaagcatttttgtttgtaataaaatagaaaaatcatactagatttagtaaatacatttcccctaagtaacgagatagtatcaaattacagcacagcacagcagccacaaaccattcctaaaccaagcacctctaatcttcgaatcccactgactagtttttcacatagtccgtatgttactactaagacgccatttcagacatcctaattatctctggtacacacctctatatgtacaaaacaaaatgttaaaaatgtaaatgaccctgaggtgctttcaatgatgaatctaccggtaacattggcatgtgtatatcagtggacaaagctcaatttgcacacaagcggagtaaaacacctaaaattcacaaatatgctaaaccttcagtaacggcggttaacaatagctactcagcaaaagtgaactctatgaaggtaggtaaccaccaccatcttacagatttttttttttttggtttttggaaattgaagcatagcgagcatcattacactaaaaacacacagatgctatgaatgattaaacaaaaaaaatcgacaggaggatacagtaacaggaacaagaagggaagggaagagagcggcttattacgtcgtggtgttggagccgacgacgcggaccttgccttcctcgccttcaaccctctccagccaccagtcgtcgagctcgacctagatgaacacacacacggaaagagaagcgggatgagatccagagcccaccaacgccccccgcgccgacgcgcttacgacgatagagggaggggcggatcttacgcaggcctgcaagtaggacacggcgggggcctccttcgccgccgccgccgccgccgcgccgtcgccggctcggggttgggtcgccatctccggcggtggagaggggaacgagttttccccgctttttctttttaaacctttttttttaggagtcggagggttttggaagggttcggaatttgctgggaagacttgtcggcccaattgggccttttcagctggagtagattgtatgggctgggccttagttgatgattggcactattttaacttggaataagttcattttaggtctcttaacttgacagcgagttcgattttcgttctttaacccaaataccatatacaacatgaccccaacttacaaaatcagtgcaaacgagatctctcgtagtattttccctggttttggttgatgtggtgcctatgtggcttcattgactaggtcttcgttctacatggcattgatgtgacgcttacaaggcggtttgataaaaaaagctgtggggcccatgtgtcacttacataaaaaaataataataacatggtgggacccatatgtcaaccggcttccttcccttcttcaccatcgcggccacgccctcttccaggtgccactccctgctgcagtgctgcagccgcccccactcgttgtcatcgacacgagtgctaaccagtccagcagcgtcaccagcagcttcccctctaatcgcacatcgacgtggcgcaacaactcgttcgtggtgctgcagagctccgggtcaaacatggagaggccgagcatggggcgaccgagatggcaatcccgacggcaatgtcaggtggcctcggcggcggctatacctcaaggcatcgctatcggcgaagaagaggagtggcttcatcttcccaccatggtcggggtgcggggggctgttcagggtgctcaccggcctccccgcccccccctcaccgtcctccccgcctcctccctctctgtgcggtggaggtggtgtctccaacggcggatttggacttgggaggagcttgtcggcctccccacctcgtccctctccacacgcgcgggtgtccgccgcacctccgctgattcgacctctactgcgcctctgctcttgctcactggcttcctcgcctcaacctcttgtcatctgcagcttaagtccaccagagccacctcctcgccgattgcccacagtagccaccgctggcgactaccaccaccagagcaatgccaaccgcatctgggaaagcttaaggggaggaggggagaaggagaatggaaagagatagagaagagaggatgaggtaaagaagtggggctcactgatatatgggtctccactatttttaatcttattatttgactgacatgtgggcccacatattttgttttattttttaaattgttaaagtttgctttatgtgccacgtcaaataaagaccgagtcaaattaaccatgtaggtgccacgtcagctgaaaccaccgtccaaactgccatgggacctatatagcaccggttttgacagttgagggacccattgtatctggtattacggttcaaggatgaaaatcgaactcgctatcaatataagcgacctcagatgaacttatttcattaaactttgacaactatatactaatatatatatatatatatatatatatatatatatatatatatatatatatatatatatatatagttcattccaaattaactccccactaaggcttcgtttgttcctttcatactggatttttggcgcacgtgaaatgagaaaactcattagtacactattaattaagtattaactattataaatttaataaatggatttatttctttttaaaacaacttctctattcaaaattattttcaaaacacaccatttaacagtttgaaaaagtgctaacgaaaaatgaggaagttgaagtttgaagaggagggaaagaacggggcctaagtatagtttatgttatttctcaattctctcgtgaagccatatcattccaattatttttagcatttggatgatagatctatggtacaaaatatctcttctatcttctctcataaaatcatgcaatttcagttattctaggttcaaaattcataagtaaaaattacataaaatatattcaccttgcactatatttttgaccatctgtaaattatacatagaacataggaagtcatttttttttaaaaaaatatatattgcggcttatttgtacaaattatgcaatgtaattttccgcagcaacacaacggcgtattcatctagtaataactctgaaatggttacattgcaatggacgaaagtttaatgcatatatttaggaggctaacacattaataacatatggtatccttttaagcactttgggcatgttcaaaggtagagactggtttgggctcttagtctagttagaatgttagatactatcctcctacaacaattgggacgacaaaagactctaacaattagtacaccaaaacggttttttattatctttctttcctgttctctatcctcatgcagcaaagttttctttaagaaatgctaagagtcaatgttaaatcattgtcatgcataacaatgatctttctctcttccatatcaacaaacttacctaagaccctgttattaattaccattatacatgcccttatactatttctctacaaaactatgttaaggtttaaatataaatggtgtctggtgtcatttgttactaaaaatgcatctaggacctctaatttattttggtgttaatgacaacacaaatacgaatgttctattgttttttgttgagatggttgcaagggtcaaagtggtgttgaagttgaataaatattagcgtcattttgaatgtggtaattccttgtaaatcttgtttaattgtgtttaggatgtcatactattaagagggataccacgtgcatataattggttgaatactagtgctcaaaatcatttgttttaagtgttcctgttgtttaaatcagactatccgatgtgacagacaatccgaaatttcaccgaaagtcactttgtctctggactgagtgttggcttaaaatcatcggactatctatattcccaactatatgaattttcatgaaacttcactctgtcttaaattgaaaattcttcttgagtaatgtaatttttctaagtgtaaaacgaagcgtcctattatggaacagacagttcgatgacacggagactccgaaatttcatgaaatttgagtctctgtttgaggatgaaattttgctcctaaaatatcagactatctgagataaaatcggactatccaaaatttctaagaacttggttctctatctctcacttctttgggggctaaaaatgtcggtttgtccgatgttacatcagactgtctgacgtgggctgaaagattccccttcaaggaccacattttggggatctatttatacgctccacctaacccttctctagggtcacccattctcattcactttgggttgaggttggtgctaaggcgctttggatctttgagctctttctccctctctcaaatccctctttgctctttgtatatttcactcaatcctaagcactaggatttgtctaacggttggatggtgtttggtactcctagatgttgaggactcctagacagctaggcgttgctcttgagccaccgatcttcttgtggttggccaagggaagtttgtaaaggccacatctcaccctcgcaaggaaagacataccaccagtgggaggagtgcatttatgcaacttcaagagaaaagggttggaaaagatcctgttctttgtgagctcctcaatggagaatagaatcccctcaaggatttgaactccgggaaatacattgacgaaaaatcttggtgatattctctctctgtctctctctctctctctctttacttacttgttgcataatccatttgccaagtttgtaataattaaaacttaattagtcatgtgctaatgactttctcattgtacatacgttaacttaactctatcgtacgttgctactgatactgtctcatgtctgcatgcctatggctctactggtagtagaatgtaatctgaactgttgatcttatttgatcgaagagtttagatttatttatactaccacttcagttagtggtagtagaaacgtggagtggcattattgtaaaaaaaaggtgcggagaggtataatcatcatttagtagtaactaaacatttttttttcttttttggatccttttatggaatatgagtgatgccagcacaatggatgattatggatcgatttaaccggtattatagtaaattactaatttaccctaataatattggtagtataatactactagtagagagtaccggagcatcacttgaccaattaaggcctaagcatgacaattaagtattaatctaccatctagtggtgcatggagcagggcaattgcccacactagccaggccttggcacagccactgagttaccttgtccttgccggagcaggacaagtgcttgggttctctgttgcgcgcccatccctactgttgttgttgctagatttcatgctagtgtggcgactgatgagagagaagcccaagtagggtaaggccattcgcagcgcaagacaacatatgaggaaactcgaagtgccaaataggatggagcactttgaaacaactctctctacaatgcaagcaacttatgatgggacccacctaccctccatagtccccacctcagtccctctcccctccccctctcctttcatagtctcacgtctctgaattttgcagatgagtggttcccttcaactgtagctttgcaggccaagcaccagggtctctaggaagactcgatcttcctcacaaggatggatatgagccctacctccacatcagtagctatcatacatggagggagaaggaaacttgccacataggagcattgtgaagggcctaagtgcatgggttttctaccggtgaatccaaggtcggacaagcaggacaagtgcatgggttctctgtagcgctcgtccccattgttgtcgttgctagtggtcattaaaaacaaggaatattggaaaataaatctagagtctatataggaatataacatagaaataactaaaaattaggatttaaaaataagaaatattgaaatacgggtttagagaccaggtttcagttaagttggcaaaaagaaaaccacacttcattcactactagaaaaatgatttttagcaatgttagccttttatttttccaggtggatatgaccattggagccaaatggctgcctacaaaaatgcaaacccggttgaaactcgctgtccacctgcgaaggcgaaccacttaagcggtccgcctgcaaaaatacctttatttttgcaggcggaccgcttaagcggtccgcctgcgcagatgggcatggatataaatagacaccaccacacatggattttttataagtgtcatagctctcctctcccttaggcctcaccactcctctcagctctcctctcccacagcttcctcagcaccggtgatgggagcggcggaaaccgacgacggcgaggcgctgaggcggcggggtcggcggcgacaatgacaaggcggtggggtcgacggcggcaacggcgaggcagcggggtcggcgcggctcccctcccctctctcccagatccggccgaaggggggaggggggcgagaggtggcggcggcggcgcttcccctccctcccagattcggccggagggaggctggggaagggcggcagcggcggcggtgacagtccccctccctcccagatccagccggagggagaccgggggagggcggcgacagcggcgacagtccccctccctcccagatccgaccggagggaggccagggaagggcgacagcggtggcgacagttcccatccctcctagatccggccggagggaggccgggggagagcggcagcggtggtagttcccctccctcccagatctggtcggagggagggggagggcggcggtggcggcggatgtgggtagaggcgcgggtggggtgcggcgaattttttttgttcgtcaagatgattttcacaggcgggtgactgggtcgcaggcgatggcatacagacggatcattcatccgcatgagaggttcctttttggccacctgaaaaaactatttttctagtagtgagtgtaacgatgtttactcagatgacactccggaaaatactctgtcggtgcctaagtgtacttattatagtaactccaaattccaattaatcatgagaggccgcagctagcttatcgatcggtggtttactcgtccgaacgatgctactcttttcctatgcacgtaaacctaactaattacgttcttggcttcacagatttgctttgtcatcgtcccattttaccattttgatgcaggggaattgagtggtgaggagccaaacttaactgctaaaacctgtactatcttaccacagtccacaagtgttggtctgaaaactgtgatgagctgaagtgatgccgggacttcgataaaagaggttggaggtggcaactagttctcttttaatattgtcgatttaacgagtaacgttggaattttgcaaaactgttgcgcaaaatttttaacaaggaactgtcaagcttatcagtttatcctgtgagcagtggtgcgggtgtcaccctggaattagcccgggcgattgatcgaataaaagtacgtgtgattaatggtaaaaaaaaccgcacgtgtgaatgcgatccaacaacacctggttccaccacacatgcagttagttaaactgataatcggaagaccgattccattcaaaagagatcaggtagttaaatatttcagttgatcattgctaaaacattatgtcatacatgggtgaaaaaagatcactaatagaaatatgaaccatgccaccctatatttacaaaatttgagatatgccacccgtatctcaaagacatgtaggaaccacatgagtcaatgacatgtgggtcagggtggcatatcacaaattttgtaaaatttgtgtggcatggttcaaattgtccctagaaagatttaattttttttgaagcatgtcgctatagtgtatgaaacattaagtttaacggtttgaaacatatattttctttcatcagaatataatcgtatgatatcttgctataaagatttaattacgacgaatacaatgatgtaatcgaatcatagatcggataaataatttgggagaaaaattattttaaatgtcactacatgcatgcatgcaggaatggaatgcagagagagaaaatagtttgggtagagagagtaagagcaggtgcttgtgtaagttttgtgaaacattatgaaaacacacgctaaagcatatcgctatagcttatgaaacacagagttttaatggttcgaaatatatgtttttctttcaatggaatataatcatgcgatatctactttgtaaagatttaattacaatgaatatattgatgcaatcggattataaatcagataaatagtttatgagaattttttttaaaaaaattgataatatatatgtgtgatagagtgaagagagaagcatgtatagttggttgggaaattggaacgttcgatatttttttttatcatgtaccgataggtgtataacaaaagtggccacgcctattgaatgggcagcgtaatacgtgtacacaaatatgcccgtacagatggaaattgcgacaacgacgagcggcgcatcgcgcgcgccgtggatgggatgagagctcgcgatctcgcaccgtcacacgctcgtggaaccaccacgcgtgcgcgacgctccacgaccaatccactggtcggcgtaaggggtagtactcctcagtttcaaaatatctgacgtcgttgactttttagcacatgtttgaccgtttgtcttatttaaaaaatttaagtaattattaattcttttcctatcatttgatttattgttaagtatattttgatgtaggcatataattttacatattttataaaagtttttgaataagacgaagtgtcaaacatgtactaaacagtcaatggtgtcaaatattttgaaacggagagagtagtagctgggcgtcaacaccacactgcttacgctttcagcacaccacactgctgctgtttgcgctttcgcctgccacgatttgtttccggccggctggccttggtgctctcgcggcctcgcctacacagtttgctggcttgtcggttttctaggccggcccggttgttgacttgcacccatttgggcccatttgcctttagcctgagcctgtggaggtcccgcgcctcgagcggcctgagccgctcgccgtggaccacaggagtcaggacgtacgagtatgcaaagccgtacgacaacgggtatttgacactccgtgaaaggcaggatgccaccatccttgctcctaaccaatattgcacccatgtcggcacgtcggtatggccacatcacgcatcatatactacttatgttttttagaagattagaaaaggtgtccttgcattgcaatggaaaaactaaatcgtgacacattttatgtgcagcatttgagtgttatgaattgtgaaattgtctctcatgtgactggttattgcattgcgatcgcttcacccctgattacggaaatctcacaaaaaaaagaatagaaatattccaaattcggagatgatagaaataactggaagatgcacatgactatatgggtgtttatgcaacaggctttaaaaaaagagaatcccttatatgccattataaattggccaattctcttatatgccactcaaaattggcttctcccttatatgccactggttcaaaattttccacccttttataccactcatagtactatagtgttagttgactgttagccaaacgttagttttttcgtaaatgaccaatataccctctcaactaaaaaaatgtgtaaacttcaaaaaaatcataactaatttattttaattcctttttgagtgaacaaaattttgtcagaaccagtgaaaaatgctatttgtattaaaaatactgttggaaaactgcatgtttcatacttttattgaaaatttatttgtgatggtaatggctaaaattgcatgtgatgaaaaaaaaatcaattttcatatgttgtatccagtagctataagtagtgaaatacttatttattggttgtatatcaactctcaaggacaaatgcgtctttttactatgaagttaacggtcaactgatagtgaagtgacgacaatggcataaaagggaggataaacttgaactggtggcatataagggagaagccaatttaaagtgacatataagggaaccggttaatttagagtggtatataagggattctctcttgaaaaatagccaagacgtatcatctcgtccatatctcaatcggatcaggattacattgcagttgacctatagttagatattataaaatttttatatgtataaatctaatttggtcatgcatgctaaaaagtaatatatgtatcatatccatcccgttgaattgttatataatttttcatgactttggaaggatgtcttcaactttatggtacaattggcatttagccaaaattaatacaggaggatctcatgcctttggtctatgcaatctcgaagaagaaaggaaagtccctgcttcaagtaaaggaaaacgatgcttggatcgacaacttataccttgaagccaacccctcaatctcagtggaccttattggtcagctagtcgccttatggactactgtgcgggacatccaactaaactaggagaagcctaatcaaattatctggaagttcacaaaccatgggcaatattcaacgtcgtcggtttatcaggcacaataccttagggcaccaaacactatatgtgattcgctcatttggagagcttgggcgtcaggaaaatgcaaattccacgcatggctaatgattcaaaatagggtctggatctctgaccgactcgcgacctgaggatggaaaaataatgggctttgccccctctgccatagagaagacgaaacagctctatgtctccttgccagctgtagatacacaaaaaaaaatatggagcctggtagccacctggtggcttaccagcagcttgatcttggataatgggaggccacccagaccgtaaaagcatagtggaaagctctagcaaacataatagggattcccaaaaggggattgcgcactctcatcctccttatcgtttggtcttcgtacacattttatatacgaattttatctatacaaagtttaaatacactaatagaaagtttctatatactaatgaaaagtttatacacctatatgtatatacatatgtatctacccgtatgtgtgtgtctatatatatatatatatgtatatatacatatgtatatatgtatatatgtatatatacatatgtatatatacatatgtacatgtatacatgtatgtacatatgtacatgtatatatatacatatatgtgtgcgcgtgcgcgcacacaaaagtatatacatgagtatgtcatgtattgaactgagcgcacgcgaccagtgtccctacgatgacggaccatttttttggatgacgattgaatatgatacgaatttgaagtcggacaacgtatcgtactcgaatcgaacaatgtatcaaacaatcgataaaaatatttttattttttataatagtagagataatattgttgacttttgtacacatatttgactatttattttatataaaaactacgtaattatcatttattttgttataagttgttttatcactaaatattttaagtatgatttatatcttatgcaattacataaaaaagctaaaataaaacgactgatcaaaatctatattccaatatcaacggtgctatctacgaagtatttttttaaaaaaagaatacctgataacccacggtgttcgctggtgccgtggaggacccgcgcggccgtgccgctggagccattgtgctactgtcgtgctggattggtagctcatgacccatgagcccatttatcgtagagcccggccggccggccaatttaacgcctacgcggccactggcgtgcgtggtctccggccagcccgtgcaagcgggtcgagcgagcttgcgaccgtggacaacaacaacacgtgacaaatcaaggtgcaggtgcatagtactcgtacgtagtactatctccgtctcaaaataagtgcagccataattttcagcgcccaactttaaccattcattttatttgaatttttttaagaaaattaaaaacataagtaacgagtaaagtattatttatgttttatcatcttataacaacaaaaatgttaattataaaaaaatttcaaataaaacggacgatcaaagttggacgcgaaaactcatgactgtattattttgggacggaggtagtagtaggcagcagctgacacagatgaattattttactagcacgtgccggcagcttcaggagtacgtgttggtacgtcttttcacaatttcactgcaccagcgctgcgcacttgtacgtccaccaccgcgtaccggcgtactcctacgtacgtaataaaagtgatggtgttagtgttgaattgactcatcagttcgtccaatgaaaacatactcaacctagtaccaccgatacgatatgttctattattataaatctaaatatatatctattcagatttattttactagaatatatcatatttaatatattcggtttttatggagcggatcggatggagtaactatgagcagggtgctacggcactgagcaacagtacgtgatgccggtcgttaccctgatctgtggcacccaatcacgaaaacgttttacatattcgccggtactgaacagccgtggtacagagtatacgtacccaagtgactcaaaagttttcccttaaaaaatgactgattcttgtattatagtatatttattgttctgttgcgataatttatagggattggttttagggaagcacagtgtaagactccaccatcagtcacacaggtggtgttcatttctaatgaatgaagataaatttaaggtatgaaaaataaaagtaatcattagcgcatgatttttttaagttttaattattacaaacttgttaatttttaaagtaacttttatattgaaaatttttgtataaatacaccgtttatcagtttaaaaacatgttcatggacaccgaggtaaaatctttatcttaattagaaaagaaggaaccatttagtggtttgctggtggcttccaggcctccaacgggttggttgtacggccatccaagtccaatcttatccgctagaatctcttttgagggaaaatgcttgtaaatatacattgtcgtcggtctcgttggctttgctactacgcattgatataagtttttgttaagttcacagattttacacgagaagaatatgtactatgatcataaactaggcatcatgtacgcgactaactcaaactgacaacgtggtgcgcaaccactatggtttatggatagtataaaggacgctggccactgcaaaaggcatatagaaaaaagggtgcacagtcccatccttctcatggtatgagatatttggaagaaagaaattaaatagtatttcaacacaagaaactcatggcaatagctctgaacgcaaagacaaaaaaaaaatgtactttggcaggagcaaaacatctttctaagcttttagcttaaccctctgtgtaaagtatttttcttcttatttacctgcacattaactattttactcctactctattcaatttaaattgacatatctcgaaagggctgaatatatgtgtgtagttttttttaattttttttagagaaaataattttactcagcctctaaatctaatcggatatatgcagcctttttaaattagaaacttagtctcaaacagggaacttcgccatcaaataacccaatctaatattcgctcgtatgaagatttgaactcagaacttggggtgctattcagatcactgcaaccactagactagtgctttttcatgcgtgcatatcttctttaattccacgaagttggaaaataaaaccaatagcttttctccacatgtatatttgacgtttaggcagcattttgtgctctgatctatgacaaatccaagaacattaagaagcacaaaattacagttttaaccgtacgtttcgttgattaccacggcgagcaaaaatgcactctgtgcgcccacagacagagaggactgacggcccaaaaacagccgcgcacgcggccggggtttgcctggtgcctagctaacgacggtggtgcggattgccctagtgcggtaccacactagttaatgaaacgcgacagcagtacgtgctgctactccgtttactccaggcaggtcattacagtacatgaatatgaatgttgatcgatctgatcacaaaagcctgaatacggaacacgacagtctgacagcgcctgtgcattaatgcgagctgtaactgcctcagataatttacagtgaactttgtattctctctgtcctaaaatataaaaatattagcacttaaaatttgtattaaaatataacaacttattcactaatattctcttctcaatcaattacgggcctcatcttttcacttatactttatcaaatcaataattgaatatattttcaaaataaatttatcttgggttaaaaatattacaaatttttttttacaaatttagtcaaacttaaaattgtttgactttgaccaaagtcaaaacatcttataacttaaaacggagggagtacatgatagttcaaaacaatcgatcacaaagggtgtataattaacaaaatttatacacgaattaacttataacttaaacaagtatgtagacacgttaagcgtgtgttgttgggatacgcgtaggctacgatagcataaattaaaattttctatcgcttaaaccaggaaccatgcaagtactagagcatagatcgttaccactcgacgcgctgcgcagcggaagaagacgctgagaagtcgaaggaattctcgtgaagtagcgcgcgtcgatgtagaggaagtagtcgatcgcaccggctcgaccttctcctccttgtgcgttctcctcgccgtactcccacgccgattagcaccgcaaaccagcgttgcctctaccggtatccatacgtacagggacggaacgccacgcgcagatgtgctagcacccgcgcgcggctagggttttgctcggggagggaagtgacggctagggtttctcacgtgatgcaatgcctccgccggtcacacccctcacgaatatataggatccatcactcgggtctccaaggcccgtaggactcctattcggatccctatccgaattaagctcatattggatctctatccaatccccttattccggcccattaagcgtgcgaccctataggttcatatatactcggctgtaacccgaaaactcctttttggtccacgcgtcaacagcggcccctagcagaacgtattgacccaccgggcatacataaagatcatatcggctgaacctctagtgtatccttgtatgaatccctttgcctcacgatatcgattaagctcaaggctagatatgtgccatcctctaatagctcaatcattcactcgaatctgttgatagattatataacttatgattgactcctcaatcacctttggcatggccatgcacttctataatctacaacatcgaggggcccagagatatctctccataggaggggcaaatctcatcttgattattcatatcccactacatgtttcatagcatacccgaaatctacttttataactacctaattacggagtagcgtttagtagtccctaagtaagctactacacatgttgagaactatgataatctcatgtctaagtattcaacaccaacactcaatgagatcactgatgacacaacacatatggctcttgcagtgtctcatgttgggtctatccaacaacatgttcaccaacatgtgtccacattattaatttggtatctctataccatgatccatgagacatgatcatcaattaatacatgtgctgatcatataaacatatttgttccacacatgatatttgatcagggatcctttagaaatagtaacaaacaacataaagagtctcatgaaagaatcacatattcattaactaataaggagttatctatttcaaggaataatgtcggaaaaatatgtaaacatagtatgtgatacaatcatctctatgattgcctctagggcatatcactaacagtctcccacttgcactagagtcaatcatgaatgtatcttacaccctgccctagtgtgtgcctcatgcttaggctgagggagtggctttgtcacggattctgcaccattcaatccggtatgtatnntgcatatcttcacatctcttctacccactttctcgcgaatgaggtgataccgtcgtaaaatgtgtttggacttttgatgcgatctaggctccttggcttgcgcaatggcaccactattatcgcaatagaggtccatagggctagaggcactagtcatcacacctagttgagaaacgaatttctttatccaaacagtctcctttgctgcttcagaagcggcaatgtatttggcttctgttgtagaatcagccactgtatcttgcttgggactcttccaactcacagcgcctccattcaggcagaacacaaatccagactgcgatctaaaatcatctttgtcggtttggaagcttgcgtcagtgtaccatttacaacgagctcttcctgtcctccatagactaggaacatatctttagttcttctcaagtactttaggatattctttatagctatccagtgactctcacctggatctgattggtatcggcttgttgcactaagtgcatatgaaacatctggacgtgtacatagcatagcatacataatggatccgattgccgaggcatatggaatcacactcatcttgtttcgctcattagtcgtttgaggacactgattcttgccaagattaatgccatgtgacatcggtaagaaacctttcttagaatcttgcatgttgaacctcttcaacaccttgttaatgtatgtactctggcttaatccaattagcctctttgatctatctctatagatccttatgcccagaatatatgctgcttcccctaagtccttcattgaaaaactatttttcaacgatgtcttaacggattcaagcataggaatatcattcccaatcaataatatgtcatctacatataggattagaaacaccaatgcgctcccactaatcttcttgtatacacaaggctcttcttcgtttttgacaaagcccaacgccttgactactttgtcaaaacgaatattctaactccgagatgcttgcttcaacccataaatggatttctgcaatttgcatatacttttagctgattgtggatcaacaaatcccttgggttgtgtcatgtacacatcctcatcgagatttccattaaggaaagctgttttgacatccatttgccatatctcataatcgaaataggcagcaatcgctaaaacaatccgaatagattgtagcatggtgactggcgagaaagtttcatcataatcaacaccttgaatttgtctaaaacctttcgccaccaatcgtgccttgtagatgtgaacatttccatctacatctgtctttttcttaaagacccatttgcactcaatggcttttacaccatcaggtggatcaaccaagttccaaacttgattgacatgtatggattctattt

SEQ ID NO: 11188 - DNA, 2707 bp, Oryza sativa
acatttttgctggatccccaccaatgtaaggtacaaaagaaattattgcatagatgattattacatgtacttgtgtgcttcaacttgtttccttttactcagagcttaataaccaatcaaacatcattgtacatataattttagtgtcgtcactaactcaagtccactgaactcatccgatatggaatacaaaattcttatatacaaacattcttcagagaaagccgaatctctttcaggaaaaaagtggactacaaactagcccatagagctacaattcgaaaaaaaaggaacaggatttccccatttaatgtgttactgaaagaaaatattttgccttaaaaaatatgacatgcaaatcgcaagctacatttatatatatcagatagaatcttgcattgtactagaggataaccgcaagaataaaattcagttctcaaaaacagggtacgagagatacaacattttttagtaaagataagtttgcatttaattttggctgaaagattttcattgtttgagttcaagggctccttgtgatcatgccaccttggggcttgggcagataaacacaggcacatggtatgtggccattgagttgtgaacgacaacctgatcgttctaactatatacaatgtactttagcactaacccggtccaccgtgcccctactattgtgtaagctaacctatggaaactcaagaaatcaaacaaaaaatgacgctctaacaaaagacgatgacagcaacaaaaggtagcctttttcaagaaattggttacgggttaaacatactccggcgggtacgcttcttgtagaggatgcgatagccacattcacggcactggatcacatctcctggcttcagtgtgttctcagctccgcaatctgaagacaaagaaaatcacatttgatatcaaaatttgacaactgaaccgaattcaactagccataatccaatccaaccgatggagagagaaaccatcaccccaaaataaaaactgggaacagaaaaaaaacatcccatcccatcgtgcgatggagctccaagcttcgacggcgttttaactgctgagtcgtaagccaccccccccccccttccccctgatccggtgcacggaggggctacagccatcttcaatcatcaattacatcatggaacaagaaacttgcgttctccctccgacgcccgtgtttctaattctccaacacaaatcttctccccgggccaaaaaaaaagaaagaaaaaaccactgcggcaaatcggccaaaccctaaccggcgatgcgagaggtgaaggatagaaggaatgacctccacagagatagctgacgggctcaggttgttgcggatccatcggacgcagcggcgctggtggagcgcggcggtcggccggaggcggcgcgaggcaagacgacggctgcaggcgccgggcgggagaggaggcggcggcgcgcgcggctagggtttcgacgacgacgacgactcttgtcaagcgagacgaggttggtggtggtggagaataaatcgattctattgcctttattttgggccgagccatgtcaagaccggcctaactgggcccgttaggcccgttatatgggccggcctaacgccgcaagcagcgtgcgagacaggcgacaggctgtcaaaggaataagttcatccgaggtcccttacttgtcaacatatccgattttcgtccttcaaccggaaaaccagatacaatgggtctctcaactatcaaaaccagtgcagatgaggtcccttggcgatttagatagcaattttggctgacatggcacatacgtggctaatttgacacggtcttcatctggcgtggtgcttacgtggcaattcaatccggaaaaataatataacctgtgggacccacatatcagtttcacacacaaaaataaaaaaaaaagtgggacccatgtgggctccacatgtcatcctcccagccatcctcttcttcctcctctctccatctctctcaccctctcctctctactcgctggcggacataacgacggcctggagaggcgtgacctcctccactcccgccccccgggcctatcgccaacggccactgggaaagaagcggcgcgcgagcgtcagccaaagggaggagaggagcggcgcgtgcgctcggccaacggaaggagaggagctgcgggcggaggccgaggggagcgggagaaatccgcgatgcgctccgcatccacatgctctctcacggtgccccgtgcccccccgcttcacaacctaccttgtcacgtgcgtcaaccaccgtctcccgcactcgccaccaacgcctcctcatcctcgagggtgatggtggggtcgagaggctcctcgacctcctcgacgcggctgacaccggcctcgatgcacatgctgcacttgagcacgagaacaatgtgggtcgttgaggccgtagagatggacgcggagcgcggcggtggcggcggagaggggacgcgcggcgctggtgtggcggaggcagggcgcgaggaaggaggagaggctgcagtccgcggcagcatcgaggatgcggagcttgatctcgacctccatcacgggggtggggaggataggggaggctaggatttggggttgcgattgggattggtagggaggccgatgcagtgggacttggagtgcgcggcaccaggcagtgggtggagaagggggttggagttggag

SEQ ID NO: 11189 - DNA, 4838 bp, Oryza sativa
ccagactaatgtttaaagctcacgtgacaaaaatggcgtactatatcttcttcatgatgattcgttttgttcacgcttttgtgcaatatcaccaagcacatccttaagctgacccttctgaagaaaattacacaaataaggaatcaattactgagttaagaattaagaaagtagatggatacacatggttatgaaaaccggggacaataagctcacttgcctgatgcatatctaatatgatatcagatcccccaacaaactctcctttgataaatatttgtggaaatgtaggccagttgctgcacaagcaaagtagaataagtagtgaatttatcgaagaataaacagttgcctgtttctgagaaccagctgaagggcacatgacaacccatgtgttgtatgatacacaatacttaaagtcaataaaaaacgaaaccttctaacagtaaacatgacaagtggagctccattatattgtatatagaacacaggctggtgcctctaataatatgttgtcgaagagaatgatgtaaagcatcaaaggacaaactatgccaatctaaactcatcttgcttgggctgtcattagcttaagattctttttaattgtaaccatttcttcaagatgctttcataacctaaagttaaaaggtcaaaacaattgccttaaacctttatgatataatatcatacaatattcatgccatgaataatttaacctaccagtctagtttgttcccctgttgaaaaacaagtactctatctacataacacaagattatgaaggaatgaccaggagccacttacgtgtgggctttgacactctctttgagcttgaggtctcccaaaatatccctagcactgatagggacatctgcaatagattatgatatagtttaagaatctttggagtgtattatcaaccatatttcaaacaaatcagaactcagtgataatttaccatattgcttgaggactctaactgccaacgcactgaacccacacctaggagcatcaggataacccttcatgtagatcaggactgggttctccttgatatcctgcccaacaattatgaggcagcattaacaaatggcagaaatacatcatgaaactttaagacatgcctagctttgccacaaaataagttcttcaatttaaatgtccaaaaagctcatttagaaatgttaatacctgagaaacaatgtcatcaaaagacatgttggaacttttggttgtaggctggaaatcttgatgtgtatcaggatcagcagcaactcgtgttgaacttgagtccccagttgcagtagaatcgccaccaagtcctgatgagtagttcctaaactgatggatagttggttgggccacagcctatctcccggttatcatggaaaacaagtatgccgcagaaacatgagatcaacagggatatattacctgagcataatataagactgatagaacatggctaacaataaacgcttgtatgggaaaaattatgaccccgtatcagataattgcataacaggtaaagctatacaatttgcttacaaaactttagcagtgcaagattggtcacttctctaatacattggaagtgtaagaaaacctgatacttgcataacccaaggatagaaggttaacaacataggcaagagcgccataagcgctgcaccaaatttaagcattaattcacaagagagcaacatatgcagaagcatcataagcattgcaccaaatttaaacattaaaaggagaaaccgtgggaagaatagcacaggtactatgtggaaactaaacagaagttagtagttttgcaagtatcgtgtttattagatacttcctccgtgcacagtataagtcattctagcattgtccacattcatatagatgttaatgaatctaggcacacatacatgtctagattcattaacatcaatatgaatgtgagaaatgctagaatgacttacattgtgaaacggagggagtagaagccatccacatatacagaatacagttactaaataaagctaatgacgcacaaaaggtcaggtcacagtaatccatatttcaaaccctaggcctagatagagggttctcataaaggaaaaaaaaatggtgggcacaaaatctatcgaatatttcgtaacagaatcactttgatgacaagcaaaggcggataaaatgaacaaaacttcacttcgatgacaagcgaaggcggataaaatgaacaaaactatcaaggagagggacggcaagagagccttacagctacggtcggcgagcagctcgatctcacgagacccctgatgagggcggacgacatcaatctcgccatgactaccctgcagcgacggcgaagaaatcattcatcaaacgccaagagcccccagcgatctaccaaacagaaggtcgcagcaactgctaacccgcgcctacggcctgaaggccgcagcaagtacctgggaggcggcgggacggagccctgcggtggtcggaggcgccgccggcgacagaggagaaggagcggctagctagggagagcgccgccgccgaccttggagcagagttcttgatgtggttttcctttttttttttttccagaaaactccagatgatgttttacccactgggctaggccttacgttgggccttctcaaagccaacttgacgcccaagtgcattcctagggactggggcccatttgtagcccacattgagcccgtttcaaggcctggtaaaactactcagatttggtttgggcaggaagaccagccgagactgcgtgcaagtaccgagctattcgtggtttgcctcgcaggtacagaatatgtattatgtgctgaccgaaaaaaaaaattcttcgtcttgcgtgtgtatacttctccaacgattaaatggtgagtctttttaaaaattaatagataaaaaggttgttttaaaaaattataataatctatttatcaagtctaaaataatgaatactcaattaatcatccggttcaccttgtcctgcatgtcttctctcttcccctgcttccaaacacactctttagtgttgccaaattacttatacaacctgaacctggtgcagtggtgcgcacaaagcacatagcaatgtagattagatagggagagacactacagtttttttatagcgtgattagttatttttgtaatatctggttgctgtaactgggatttcttatgtggtttccagatgagaccgtttgtaaagaccatgtaagtttcacttgttaagatagtaaagaaggtaaatcattagcacattattggttaagaattattgttttaaacttgaaaatagaataatataatattttaaaacaatttttctatagagattttttagaaaaaatgtcatttagcagtttaggaagcgtccatgtgaaaacaagaatattttcttctcttttagcttttttttcaaacggacatgctttttttttccatttgcctcatgcgtggctctgcaacctttgtttctcgtctattgttattcgttctttttggaaggaactgtaggggtacctgttttctccaaacatatcgttcatctaactaatgaattgtttcatcatggttcaactccatattgcaacagtaagccaatctttacgcaacaaatttcaaaaaaaaagaaaaagaaaagaaaacatcggatgaaacaaaacgatgagaacaaaaaatctcactggagagatatgacaacaaaataagaactgtacaacatccattttacaagaggacgcaacattttgcgacacatgttgcagggagttgataatcgtattaaattcaaaagaactacaaatttaatacgactatcaacttcctgcaacattttgcgacacatttgagatggctacaaaatttgaaataatcgtaaaacaatgagaacaaaaatctcactggagagatatgacaacaaaataagaacaatgagaactaaaatctcactggagagatatgacaacaaaataagaactgcaaattggcaagagaagactaaatttaaaagaaccgcaaatttaatacgactatctacttccggcaacattttacgacacatttcagatggttacaaaatttgaaattatcgtaaaaccgcatctccatttgatcgccgggcacttgacacaaagaataattgaacaaatagcagatcaataaccaattgaggcagcacgttgctgctcgttggcaactgcaataaaactatgcatttgatttcaagatctcaggcaatataagcgtggcatcaccttaaatttctcaaatctcaaaacacagctcggatttaaccacttctatcgaaagtccaatggccatacgggcctacaactgaataccatacagttccactaacatacttttgaggggtcactcattacattgctttagaaagactgatgccttcccttatcttcagcgtgcttcatattgaacaactgcaaacacaagacacttgatcaaaaaattgctcatactatccaagacaagcaatctgtggtggtgacggatgacgttgaacttggtttagctatagcattttcaatttgagcatagcgtactttgcttgtcagaccatatgagaacacaaacaagatgccaagctgataatcagttttcagttttcaaattgacggcaacaattaaatgcagttggtgtgatgaacatttcactaattataagcattactttctaaatgcaacaggaccacaaccagctataaaacaaagcacagagcagtgttataagcacaaaatgcttcatttttagtgttataagcacaatcatttcaaaatgaaaagga

SEQ ID NO: 11190 - DNA, 2298 bp, Oryza sativa
tgaaacagagaaagtatatgttagctaaacttctttcagaagaagaaatcaaatagaagcgataataacacaaaatactacatatgatggctaatagtaaacactgggaaaaacttatgattcgggaaaaatcgaaggcaataatacgctcaaatcctacatcaccaacttttataactttttggactacatgaggatacttctgttactctagttgaatttagggctgaggacatatcccacgagacaaacgcacagggctggtcctgactttttaggtgtcgatgcgaaactaaacatagaggcctttatcatactatataataataatcgatagatacatatactttatacatatgaattattgtcgtaaatatttaaattgcatttagaaataatatttatatagaaaacattgtacatgttacctcaaaaaaatttctaacatttctagatgcgaagtcattgataatggtaccaatattaatttcatccaataatttcttctcaatgcataaagctgccaaaccatttgacctttttttttgtacaatgaatatctcaaatagttcttcaataatttcaacttcgaaaagcttctttcagtagatgccacagtcacgagcacagtaaataagatccgataagcaatagaaatattagggtaacaatttgcatctctgacaaactcaaatatctccatggcagacatatggctatctggcaaagtcaactgcataacacttaactcagaaattagatcattttaactcaacatcagatgaaccccctagagagattattatttttattatttttttgcaaatttagtgcaactgtcttttagttcagcaccatctaatgacttcaagaccgtggaactcataaaatccccaatatacttttgaattcttgaagttcttcaaatctagctttcaatgaagtgattgccataccaaccataaaaaaaagtaatcaactttgaaagccctctcagcttgcaaatttacttcatcactcacaattgcatcaaactgtctctttctggttgcatgacactttactggaaatgatgcatttacacccaattgagatgcaatatctttggctttgatcaaactagaagcaaacccctcatttctatacttgtgaaagtaagtcattatgccttctatttgctgtaaggtggacttaatgcacaagatggtgactgcaacttcttactcacagtgtttacaacaaataaaatgtcacgccaaataatcataccaagtataaactaagtaccaactacctcaaataatttcttttgcatcactcctatctttgggttcgataccattagattcccttaactgtaacaaaactaatcttagcttatgagcttgatatctagttgctttaatacttttgatttgactctcccatcgagtattgcacaatggtttcactgttaaacttggaacatgttcaagcaaaactttccatctttttgttgaaccggaaactaacacatatatctgttgcacaattccaaaaaatgaaatagctttagcacaagatttagccatatcagagagagtaagattaagactatggcaaacacatggcatatacaaagctcttggattaatatcaagcaattgtctttgcacccccttttattttcctttcatgttagagccattatcatagccttgacctctaatatcatcaatactaagaccaaaggacttgatggaatcaaccaatacattgaaaagctctgaatcagatgtatcatccaccttcaaaaaacccataaaatactcctctaattttattttgccataggacatattaacacatcggaccaacaaagtcatttgttcttgatgactcacatttggggtggaatcaatgataatagaaaatattttgcctctatgatagattttgtgatattagaagccaagagagaaaaccaactcattctgtattttgtgactaagataataatgataatgtatctcgttgttctgaatacgtctaagatgatcttgcatcaccaagtcaaactctgcaaccatctcagcactagctaagaaattgccattctgatcattgtaaagttgctcattggatcctttaaaagccaaattatgtttactaagaaatttgacaatagcaattattcttataaaacttatcgtatacgttttttctccttagcaattaatgttgcaaatctttgtcaattgtttcatttttttatcaatctagctcttaattcatccaagaggtcatgttggtgatatg

SEQ ID NO: 11191 - DNA, 4894 bp, Oryza sativa
tcgttgtccaaggagacgaggcaggtcgggagcatggcggtgcggtggcgcagctcggcgaagaagaagcgcggagcagcctgatcatcggcgccggcggcggccctggcgaagaagttgacgtggtagtagaaggcgtcccagcagtccatgaagtcgctcgccgtggcggtggcggtggcggcgacgagctcgtacttgacctcgttggcggcgtcgccgttgtagtgctgcagcgcgcactccgcgagggactccgcctgctgcagcaccaccagcgggtccgggcgattctccggctcatctggctgctcctcatccatggcgtcggcgtcgtcgtccaagtagaagtagtccccgacgttggcgctcgtgatggtgtagctgtacgcgccgccggcgctcgtgaaggtgcagctgttcgtggtgtgatcggcatggtcgtcgtggtaggcgggagacgtgggcggcggcggcgactgtgccggagagtaaggcggcgacagtggcggaggacaataaggctcctcatcctcgaggtcgtggctcctgtcgtccgcttcttcgaacggcacgtagtacctcaccggcggtagcagcggcatgacggcggcgggcagtcgatcgacgatgagagtgagacggatcgattcgattgtctcggaggaagagaggaaatcgatcggtttgcgctataacgaatgcagcaagcggcgcacgcaccgtccgccgcctgattttatcgatgggcacgcctgtgattcgactccgactcggagtaacagctgtatcggccaatgcgcggtacacggatacgcctgacgtacgtacgtggtgccggcctcgactctccgctacgcatacgatgttttttttacgatttttgtacgatcaaacgaagacggctcttggcatcgtaacgctacgtggtgcacgcgcatgttgcagcccaagagctcatggatctgaagcccatacacgtatactcattattttcctttgcctttttttctctgtatccaaataaatacaaaccatgccaaacattggctcatacatgaagtttgctgcatcttatcctgatttgtgccattggaaatttagaatagttccaactaggggtgatgctaccagggtccgaggtgcaaggaacatatgtgtatgggtaatttacttaaactaggttcacatcaaaataatttacttaacttaagctgggtcacatgataagtgttgagcgacagcacgagtatataagattgattaggaaaaataaattactctggttagctgtgccaggaagcttaattataagatgtcgggacgatgatgtgattagcttgggtttttggatatgggctcaacgctagaaaaggtccagtgtgggaccagaacttacaatgttatgagcctagaagagaaacgtttgattgtacaactatcgtaacaaattagtcgtacgtatagcaacgccgtcgttataatgagtgggaataattcaactcggaataggaacgaatgtaataatgtgtgctaatccaaatatggttgggctagctagctaatcccattacatcctctaaaccccaagaccctaaaccccaagcaacttgcatgtttcacttatggcgccatactttttactaagaaaagttacacatttgaatgcccagcatcggtcgactgggggaggtgggaaaatcggtcgctcccccggcccttcccccatgtgcgcacctgtttgggcccacccacttctccctcccctttttcataaaagatgttttacctagtgtatttacaatattttactatttatagatctaatgttgcagtgtattaaaatattcttttgtaaaaaaaaacccaaactctctattaagggaatttggtttattttttgttctaccaaaaaatatttcaccttcacaatgtttcactatatatagatctaatgttgcaatgaacgaaacatttcattgcaacaaaaaacccacatattttggaaaccccatattaagggaatttggtttattttttgttccaccgaaaaatgtttcacgtagtgtactcacaatgtttcactatatatagatctaatgttgcagtgaactgaaacattctttcgctatttgctgaaacattgtttttatataaggtgaaacaacatccgatttaaacgagtgaaacattttcgatctatttagtgaaacaattccgatatacctagtgaaacatcgtgtaacatttaaaaataattcaataataagctaattttttttcgacgaaatatatccatgtgtggtcttctttgaagatttaattgcaacgaatttaatggtgcaatcggatcttgatttggataagtaatttaagagaaaaatctatttaaagtagttttgcacgtaaatcgggcgctaacgtcatgctgacatcagcgcccgattttaatctcctcccatcgaacgcccgagcgggagtcacgtccttattacattataaattatctatacttacatagtaattgctcgtaactttcaatatttacgttgtaatatttctaatacacaatgtataaaaataattaagattaaaagtaatttattatctatttaaaagatgatacgtgagagataagagcaatcatatagagaaaatagtgactaaaatctatacttcctataaagttataacccactagcaatatgcaaccgtgtcacatcatcacccactagcaataattacatattgaatcttatacgagcatagtgacatacaacattatctataatttatttaattacatataaatcaacatgcaaacttatccgatcatcaccctcatatcatttgcaatattttaacaaatatattatcatttttataatatttaacacatagttatcaatatgttgcacattaaagcgtgagtattatttgtttatttcatgataagtactaataaacactaatgttctattatttttttctttctattcctatttcctagcttgattgtcgaaaaatatatattgagagttctcgtagcaaattgcggggaatcacatagttaaaacaattactcttgccatttgttacttggtgtggtagaaatatttcgatatcaaccgatagtgtttctcgttggcaacattgtaaccgacccactgccaatagggaaacctacagtgataggccctacgaattggcagtgtagctggttctaggacggtgagaggtgacatcatggagttgaatatcgacctggagtggagatccaggcaatgatagtaagggagctggtggtgggctggccgacgaagaagaggcgagacacatgttggtatttgatacgatcacagataaatccataagcggaaggatagctgtagcacttcaccacagagtatttcaagggtatcgaatcacatggaacatgtgtgtataatacaagaataggattagaatagaaagaatttctatggattaataaacttgaccagggaggcatcgctctccctggtctaccatttgagtccgctctacggctttataatgtatccgaacatgaaggattacaaaggtcagacatagttgtcaccacttgccacctatctctacaacccatggaccacacatcaaacaaaaataacttctaacctagacacaacctttatgttattgattactactctagcctcgcacatgaactttcatttttatctagagttctagtactaaaacacttaatagaaatactaagcgataaacccgcaacgatgaaaatatatcttacttaataagaaaattaaataccaaaaggaaatctcgatcgaatactcactttattaaagaagcatttgccgaggtacacgagagaagggagtgccgacaactccgatacttctctagaactttccctcactctcactctattttctaatactctactagagagtagccttgaatgaaagtgagttgtactcaacttgagttgtgtgttgcaaatgaaatgaccccctggtttcatagtgtcaaatagcggttacagaggtcagtacacccacaaccatcattatcagccaatgggagattgccacatggaaaacgatggggcagagcgccacccctagcttggccgagaaaatggacatttagccactttcaaaaagcggtttcactggaatgccatcccgaaaacgcgtttcgctaaaatgccaatatgaagcgtgcactcacatccactttgccattttggctattttgtgtatttttgaaatcattttcactagaatgtcgggtgatgagacggaattacccctgttgggtgaggacgaagggaaggaggagaagccgctggtgtcggtggagcccgtgctcgccggcatcagggaaggcaagggagagaccacagcctccgttggcattggtgcccgtggtcgtcaccgcttgcttcggcgaggtgaagaatgagaaggcccctagagaggcaccaagaacgacaaggtgctgctgccgctagacccgtgggcgttgtcggtgtcctcgcctcgtcctccaagaacgcaaacatgttcccaccctcaccgcctccgccgcggccaccgcccttgtcccgccaaccaccggagcagaaggaggcatcttcttgtgcgggaacgagggcaggaggaagcatcgccgccgggtgcggcgcagcgcgtggagaaggcgaccgcggagtgcgcgtgctttatgcggagctcggcgaggtggtggcacgacgtcgccagcggcttatcgtgctctcttcaggcgctcgctgtccccgccgaccaccttatccttgccaccgtcgaggatcgtcatgccgcccctgccccagccgcatcaatcccctttcacccggctgccg

SEQ ID NO: 11192 - DNA, 3376 bp, Oryza sativa
cgcgtccgccggagcatgcttcgccctcggcggcggcggcggctttccgcggccgcgacagcgagtcggcagatgcagcagggctatctgagccaaccacgggtggaatgcggtattccctgataaacccacgaatctgattaccagactaggttttgttgttgttagtgtagtttgcgatctatttgaggggcgatgatttctttctaagttgggatatactgaggtgaaataggcgttattcgtgctttcagaatgggcaggattgggatcaggtggtcacttggttgaaattgccttgatagttttcccttcatttcgattcgatttgggtatatgctagtaatactgtaaatctgtaatagtaagctacgacggcatgtaggcgacttattcttgtcaataatcagttctattttcaaaaatgtgtcagtaataaggttgataggatatgaatcagtagccaacaagacattccaatcacaatcatagtagttgtatcgacgaacagaatcaatcaatcacaatgtattttcagagttgcagcgtatagggcagaggtgaaattatcggtgcttgttttgtcatgtaaatgttttttcaacgtcttaacctctgaattaaggtgctctttctttttttctcaggtgattttgaattttgtctaccttggcattggagcaggatttgtttcaactcttcgtaagtggctttccaatgcaacgaaattaggacatcttaatatccactgttggacggaaaccatctctttttggattacgaatttgatgaataataggtgtagtaatgtacttgtgtttctgtattgatactacagtagtgatgttcatatcgttttaaggctactactagaaacaaaatttcctgatatattggctatgttttggtagaggtatcatgttggacaatcactggagaaaggcaggctgcacgaatcagggcattgtatctcaaggcaatacttagacaggacattgccttttttgacaaggaaatgagcactggacaagtggttgagaggatgtcaggggacacattcctcattcaagatgccattggagaaaaggtagtttgttttatctagtgtaaagagtgtgctttggattgagagaacacaaatacaactccctttctgcaatgcattgctagatacttaccagtaagtgcatcattagatgcaacagatctctatggttcatatggaaaatcttgctccaaatgattcttttgttgcacccacccacccacctgaacacaaactcaaagccagctctaaaaaataagaggtaactgaaaaaagaggacatgggggttcaaactcacagaaaaacaatttactttatttaaatttatctaattcattgcatacatggtttgaggtaataactcagtttagtagtcaatgttagctacatgaatacacccatacatcataccccacagtacagaaatatgagtttgagctccattctaatgtatgatatatttaattatttaatccttggctgtatgcaagtttgacagttattgagtcacactgtattcacatggatcaatatcaataatgtatgtaccatatttcttgtgaaataccttttcattgaagttagcagatcataaatggagattgattcaatcaatacgaattgtggatctataacatggactcatcctcagattttgcaaaatataatgaactatcgattttaaataataaataaatatgtactcctttttgtatagtataagcatctagcaaaatctaactagcactacatattcgtttaacacatcctttttacttagagtggcaagtgtatacaactcctttctaccttctttggaggcttcattattgcatttgtgagaggatggctcttggcacttgtgctgctctcatgcattcctccaattgcggtggccggtgcttttgtgtcaaggttgatgacaagaatctcaacccgcatgcaagaaaagtatggtgatgctggaaacattgctgaacagactattggggccattagaaccgtgagtgctagcagtacagtagataattaatatctgagtcagctatttcctgttcctaccaagttaatcagtttgttttttcttaattggcacattctatgaaggttgcttcattcaatggcgagaagcaagctataaacacatataacaaattcataagaaaagcttatgaatctactctacaagaaggtgttgttaatggccttggattaggtaccgtaatggcaatcttgttttgcagttatggtttggcagtttggtatggatcgaaactgatagtcaaccgtggatacaatggtggcatagttataaatgttctaatgtctgtcatgatgggtgcaatgtaagtttcatatattaaccctgctcccatgaatagttaagataagattaaaacttgttacagaatttacttgttagtgtagattatgggaaggtgggtacatgtcaggtggttattacgagcattgtaggcttgcatttacattttgtaaggagtttacaggtagatggaccattttgtttcttgagtttacataacactatacatgctaaaatatacaccggaaaagaacagaacatctgataaaacttaaaggttaatgaataattagccatatttctctgtcaatgtacctctctgtgtatcccatttgttgaaatgcaaaatatgttctttactactcccaggacaacatgggccatgacttactgagttattacagcaatcagagtttccaatagcagtgaaactagtcatattaacatgtgaaataaattatttccatgtcactgtcatttttcaggtcatctggttcctgatttggcttatatgtcttctgtaggtccttaggtcaggcaacaccatcaataacagcttttgcagaaggtcaaggagcagcatatagaatgtttaagacaatcaaaagacagccagatattgatgtatgtgataccaaaggtatcatattggaagacatcacgggtgatgttgaactgaaggatgtgtacttcagctatcctaccaggccggaatatttggtattcaatggattctccttgcaaataccaagtggcagaacaatggccctagttggagagagtggcagtggaaagtcaactgtgatcagcttggtggagagattttatgatccacagtctggggaagtcttgattgatggaattgacattagaagaatgaatctgggatggatacgaggaaaaatcagtcttgttagccaagaaccagtgttgttctcaagtacaatcagggaaaacatcgcctatgggaaggaggatcaaactcttgaagagatcaagagagcag

SEQ ID NO: 11193 - DNA, 7105 bp, Oryza sativa
taatacagaaaatattacgaattaaataaatgatttatgatgtcacgatgacatcatcgccggcctagcactggacgacgcggccaccggcgatagagagctcggttgggctatccgaggacacctacgcgaagaggacgacgacgcgaactcaccggtgcaaagaacaacgacggacgacgacgtacggcggccggcgacgagctccgacgacggcacggctcggcccgacgtcgacggcagcgctccagcggcttgcgacggcggcgaaggggcggccgaggtgctcctcctccgcacgaacccgacggcggcgacggggagcggcggcgacggctacagcggcggcgcggcttggctggaaaggcggcggctagggctacgcggcggcggcgctacgggcaaagatagagctcgggacttgaggggaaacgtagaggacgactaggggatgctttatataagcttggattagagagatcggactctaaccgagaggaatcgaagccggaaaaatctagggttagtttggagagataaactcaaaacgaattcgattcggtttatccgggcaaaattgatctccgaaactttaggggaaagggagaggataaggaggagatgatttcccctcaagcaatcggactcggagatggccggttgttgcggaatcgacgaggaggcggcggggctcgggcacggctcggccggccggaggtagaagaagacccgacatgtgggccccacatgtcggcggcttgagaggagggggcggggcggcggcacggcctgggccggtttgggccacaaggcgcacgcggctgagaggggagttaggccggaaatggcccaacggcctaggggagggttttaaagactttcatttaaaataattcgtgaaatgatgtttcatttattaaaaatactttctttgctcaaataattcctagaaaaatctagaaaatatataaacaagcaaagtatttaatgaaattttatctagctcagttttatgtcgaaatttttcctagattattagagtttaacttgtaggcttttaaaataatttctaaaaatgcattaaagaattaattattaaattaggcgattttcagggcatgacactgcctgctgaaattgggccaggttggcccagcccatggttcggccgaaccccccgcagctccgtttgatccagggttctcttggacggctgagatggctccccaatgacggttggagggtattaccgaccattccaaccgtcacaaccgtcattgggaggctataaaaggagctctcatcctcacttcactcacacacctcaagcaaaagctctctcatttctctcaagtttagtttagtagtatctagctggtggaataggaatagagtagaaatcaggagtccggaagccttcggaagagttcgggtatagctctactagcttttctcttctcttttgtaagctttgtacttttattagaatactcttctatatacatttatggtattgaaatactttatgagtatatgaatgcccattttacattatggtcatgttatactgaatatacggctagcttatctgggagatgcttttatgcgggtataatgtttgcatatgcaattactctatgtcatgacgatgatattatagtagtatatggtagtttagacgtggtgtctagattaccggatatcattatttggggttatatattgcggacgaaaggtgggccgctgatggtgacagctcagtacgggtattcctccgcgccggtatataatcataagttaattccctggggagggtattccttcatatttagccccggttgtatcgtcatgacgggttgtcgtaaggaactcggcagtcaggggtggcttctcaaagtaccaggagggcatcggatagagggtattagctagtatatcagttaactagaatgtatgaatactatgtatattagaagtataggaatatattttctttctcttttccgtccacttagcttagataatatataatgagaatgagtagttaatgcttgtgtgtcactctacccttgggattatcttaacccttgcctagaatatgattatcacaagtaatatataaattattagtcaagttctctctacatgatcttctcacgggataaaataaatacgatacccttggaatactctcgggtgaaatgctacaatggtatatccgtgcgcttgcggatgaactctgtaaccataatataccataagtatttctgcgtcattgttgggaactatatttctagtaatgtcgttaagaaataccaacaagcatttctggcgccattgtcggggaagattcataatagagattacctgaactaatattttttatttacctttgtataatcattttcctttgcaggctaaccttagttgttttcacttagtgcatgattggtttcaacctgccggaaaacttcaaagaaaatccagaagctttcttccggagcgtcaggccgcgagtcgctgctccacagaaaaaactctaccaatagagaaaccagccgtaccagtgccaccgaccttcaagactatggctaagaagactctccgcgagttcgctactccctctgctaacaatgtggccattgggccgtagttcaacatgggagacgtggatttcaacttgaagtccagcctcatcacgatggcgcaggctagcccgttctgtggcaagcctaatgaggatgccaatgctcatctgcaacagttcctggagatttatagcacgtacactatcaagggcatcagtcccgacgccgtcaggctgcggctgtttccgttctccctcctcgggagagcaaagaagtggttctacgccaaccgtgctgctgtcaatacctaggacaaatgctctacggcattcctctcgaaatttttcccgatgggcaaaacaaatgcccttcgtggaaggatttccagtttccagcagacaagggacgagtctattcctgaagcatgcaaatggctgcaggagtacgtagccgcctggcctcatcatgggatggacgactggctgatcctgtagaacttttataatggactctcccagatgtcccgcgatcacctggacgcggcagctggaggagctttcttctctaaaacggttcaaggagccgttgatctaatagagaagatggtctccaatacgggttggagcgaggaatgacttcagacccgtcagcgaggcatgcacaccgttaaggagacgaaactactagctgccaagctagacctcctcatgaagcggttggacgaccacgagaaatggccacaaggcaccgtcaaggccttggactcacacgttacgtgtgagggtctgcggcggcacgggtcatcctgggaatgactgcccggaaacccgtgagaaggcgatgtacatggggggtaccgtccacaaggaggtcaagggtggaatcaaccacgcccatattatcaaggaggtaacaacaacaataacttttctaaccagccctccttgaaggatctagtttttgcacaagctaaaaccactgatgcgctaagcaaaaaacttgctgccactgacaagatcctagaaaacataaatgtcaagttagatggctttgcttctgcttttcaaaatcagctgagcttcaacaaaatgatagaaacccagctagctcagttagcatctttagtccctgcaaatgaaacggggaggattccggggcaacccgactcctccgttgaaaatgttaaggcgatcacgatgaggggaggtaagtcgactcgtgatccgccgtatcctaaccctgcaggagctactgggataaccaaagaagcgccatctaatgactcggctgacaaggaggttcagccagaaaagacagtgccgcaggagtactgtgacacacggttgctgccgtttctccaacagatgaggaaaccgtcagtggatgagcaattcgctcgttttgttgaagtaatccagaagatccacatcaacatgccgtggttagacgctatgcaagtgccagcatacgcccgttatctcaaggacatactcaacaacaagagaccgctcccaacaacggaggtggtcaagctgacggaacaatgcagcaacgtgatactccacaagttcccggagaagaagaaagatccggggtgtcctacgatcacctgctcgatcggggcacaactgttcgaccaggccttgtgcgaccttggagccagtgtcagtgtcatgccaaaagacgtcttcgacaagcttaacttcacggtgttggcaccaacaccaatgcgccttcaacaggcttattcatcagtacgttacgggacttcttgtatggtcatgacgggctgtcgtaaggaactcggcagtcaggggtggcttctcgaagtaccaggagggcatcggatagagggtattagctagtatatcggttaattagaatgtatgtatactatgtatattagaagtataggaatatattttctttctcttttccgtccacttagcttagataatatataatgagaatgagtagttaatgcttgtgtgtcactctactcttggattatcttaatctctgcctagaatatgattatcacaagtaatatataaattattagtcaagttctctctctacatgatcttcccacgagataaaataaatatgatacccttgaaatactctcgggtgaaatgctacaatggtatatccgtgtgcttgcggatgaactctgtaaccataatataccataagtatttctgcgtcattgctgggaattatatttctagtaatatcgttaagaaataccaacaactggaggctctcttaaggaaccatccatacaaacagatatccattttttttatttttgttgccacaaaaagatttgattttgttttcatattttagtagtctgctacagggttgcatgtcacaagtcatgtaattttagtcgcgtggagtatttatgattcgaaccgaggacctctcactcaccgtgtagcctcctcatcatatcctttcaacttcatccctctaaaacttataacacatattttatactctaaatgatatcaaatggaaaaattatcaaccatgaacgtgtacttcgcgttgagctctaagcctttgagaaagagcatatctctattcgagctcatttgaaaaactcaaaaattcatctttttttattcaaaataaagctgagagtttgtaatgaatatatggccctctaaactatctcaaatgaagcaaatgtttaactacgaagttgtgccattgagagatacattgttcatataaattttgtcatcatctaactcaaaatttcttttttttcctattttagtggtgctccgatttttaagggtggttgttgaagagaaccgtccatggaaatcgatttttataaccttccctcataagaattgcccgtaaaaaatattttaagggtgttcattaataattcatcctgtaacaatcattttaagattttaagggcggctcgttaataattctgccaacaaataccttttttctttatcctttcaaaatgtttaaactttaaaaatttataaaagaaattaatttaagtccgattgagatgaaaaaaagtcactactggagaatgcctcttctcttccggctggcaaccccctatagtcccggatagcaaaccggaagaagaaatccgggactaaagatggtgatctttagtcctggtttcaatacccgagagtagagatgcatctctacttccggttggtaacaccaattaggactaaagatcgctatctttagttccggttggtgttaccaatcgggggtagagatatttttttctttttttatttgcttgtggaccattgtttttagctatttgcacttgtttttcagccgaactcatccatggttcatctcccaacatccgaaatcatgcacaatcccaaatcattcacaacaacaaaatcatcatccataatctcaaatcattcacaacaacaaaatcatcatccacaatctcaaatcatccacaacaacatatatagtcaacaaataatcatccataaattaagaggaaaaaaggaaaaaaaataaaaacattggccagccctctgcgtgcgcccggccgcctgccgccgcactcctcaccggccacggctgccgtgcagccctccatgccggccaccacccgccgtgcctccccgcgtcagccgcaagccagcccggctcactctgctgcatgcgtgagaggatagaatagagagaggaaagggagaggataagaaaagagaggaggaggataagggaagaggtggttgctagaggataagtgcgagggattatatactatacgctgatttttagtccaaccgggaataaaaagagtggggggcggacactttttctaccgggactaaaaatgatatttagtcccggtttaccataaaatggctgtaggcttttcaactggggctaaagatgatttttagtcctggttctttttggaaccgggaccattgtgattttcagccaacccaacaaagatcagttctctccagtagtgagttttctataatctttataatatttacaatattttgtttaatatgcctgccatatttccttgataatacttctttaaatatgattgtctactcatgtcttgtagtctctatatgagagttgatatgttatctaactaagatatttcaaaattaaataaaaattaactaggtcatattttaaaaatagtgtaagaatataacttttatttacctcaatcttaatatgaactttctgaaaatttgaaagctttaaatttctaaagaacaccttgtaaaatataccaaaaatatttaggcacttaaacaatctcaaatataaaaaatttcaactatacagttgtagatttcgtcgaggtctataattttagtgtagaacatatctccacctaaggtcgtttgaagaaaaaacaatattttttttctaaagtagatatgagaacttgtaatgaatatttagcccctagaagatatgaaatgaaagaactttcggctataaagtaaaggggg

SEQ ID NO: 11194 - DNA, 1148 bp, Oryza sativa
atatcttcttgttctttaatgtattcttgggaagcattattgcaggatctgctttagagcagctcaaaacatttcttcaccaatcagcaaatgagtatgtcctctttgtctaccccacaagctgcaccttcaatccattatcctgtatgcttgcaatttatatatgtcctgataccacaatttaatttaattttacaagccatcctatctctctgattgagctcaactaaaccatagaacatcaccaaccatagatagaagtgtacaataaattatgtcaatgtgttgatatttttttcctttgttttgttcatagaggtagttgacaaaacaaaaaaatattgactatgccaaactgatagttgcattcttttgctagttacaatatagatgtgtctcaagccttaaaagttttgcacgacatgagacagcaggcaattctattggctgttacctatgacatagatggcagttgcaatttatttacatgagccagctgtagttaaagaagagagtgagggagggagtagcaccaaccattctagagcgcatatacatgggtgttttttgttcattcagaactaaacatgaaccgtgaaaaaagtggcacgaaggtgcacattcatcatatcatttactaataaggaaacttgctttgtcactgacgtttgcctattgtttttacattgctctgctgccctgcctttcatgctcttcatttgtgctacaatttcctattgtatttcctttctttttcgaagaaactcttatactccttttcaactgtacttatttgcctctttgcagaataccaaggacaattggtgaagcaattccaatgaaagcaaccttttttataacatatgtaatggttgatggttgggctggggtagctggtgaaattttaagattgaaaccattgataatcttccacttgaaaaactttttcttggtcaagactgagaaagacagagaagaagcaatggaccctggaagcattggttttgactcaaatgagcctcaaatacagctctatttcttgctcggacttgtctatgctgtggtgacaccatttttgcttcctttcatattaatattctttgggttagcatatgtggtataccgtcaccaggtaataaccctttgga

SEQ ID NO: 11195 - DNA, 3288 bp, Oryza sativa
tcctgcaccccctgggttggtgatggtgagctcgctctcctgcgatggcatcacgatgcctgcacagctgcctcgcgaccttccactcgccttccgctgctgcggtgctatctggaagcaaaccactagcccgctacactccacccgctgtctgaggccgtgctcgccttccgcccgctgccttgccgccacgctcgcccgtcgccgctctgctgctgccccctacctgcttcgccttccgctcgcttccgatgaaagggaggagcacgacgaggacagggttgctctgcccgccgccgtgctcagccgccgccgctccgcccgccgccgcgaagtggtaggcaatgtgggtggcagcaacgcgcgagtcggcggggggcacgacgtcgaactcgtccgccacgctcgcccgcccgctccgctcgccgcctggtgccgctccaccccccaccgccgcgcggaccttgccgccgcgctcacccgccgcccgcccatcgtcgctccgcccaccggccgccggcctccctcactgaagaagagaagagagaaaagagaagagaaggagaagaaaagagaagaaaaaaagtgcagctgacatatgggctccacgtactttttttaatttcttttgctgactaggatgccacgtcagcgaaactacctatatatactgcaatatgaccttgagtgcatggtttgtatgagtttaatggtacacatttgtttcgtggttaagggatttaaaaaaatctcgttgttaagttgagagacctcggtgaacttattccatccaattaaccccatgaaatatggccagagctatagctagcgaaatgggccgtgctctgtcaggacggcccatgcacgatgtcgttacagcccaggcacgatgctacggcgaaagtgctaatgggcggtcagtcgcgcgcgggagggtgcgcgcgactgaacacgtgtcgcgtgcggagagggggcgcggacggcacgcgcgtggagactggagacgattttttggggttttgttctgtttctgtttggttttttttccggttttcttttggtttctctttcttttcttttttttaaaagatgtacgtttgcaaagtttgtattcgtatgtataccaaattttgtattcgcacgtatacaaagtttgtattcgtgattttttctctcagattttaatatgtacatatacaaagtttatatacacgtacgtaaagtttgtatacgcgtatacaaactttgcatacgtgtatacaaagtttatatatgtgtacgtacgggatgcaagatttgtatacgcgtatacaaagtttgtatttgtacctacgtataaaaacctaaaaaaatacatgtatataaattttgtaaatgtgtagataaactttatatacgtgtatacaaaattggtatacgtaggtataaaaacctaaaaattatatgtgtatacaaactttgtatacatgtatacaaaattggtatacgtacgtataaaaacctaaaaatacacgtattcaaaatttgtatttgtacgtatataaagtttgcatacataagtattaaaaaaagaaaaagatatggaaagaaaaaaatagaaaaaaaacaaaacggaaggtacggaagaaaaactaaaaaaaagagagagagaaacccaaaaaaaaacaaaaaagaaacgaaaaacgcgggcgcccaagagaaacgagaaaaacagaaaacacgggtgctcaagcgacacgttgtccgccgcactagtagttgagagaagagactagagaggttagaactaattgtgcggggcgcaaggagcgcgactgatctcccattagggctcgccatgctacggtacgcagctcggcaaggcacgtttcctgggccgaggccactgcctgtgggctgacacgacaccacacgggtactatagcgggctggcatggcccgacacgacaacggaggggcccggtatggcacgacaagtccatatgctgccgcccgtcatcgccaaacctcgcgcgcctgtcgcctgcgcgattcctttttcttccttttctttttctttttaactttctcgatcaagccgtcgtccacgcgattcaatttttcgctgaagagaactgcggccgcggccgccgcttcaacgcgacggctgccctcccggacgacgtgcgccttcgagcgtcgagggagctccacgtgccaatgacgggccgtgccttggggttggcacgacacggcccgctacgaaaaccgtgctgctggtgggcctgtgccatcctgggccgagctgcccgttcggccaactatagccagagcacagtgcatattaattgcataattaactgttgtagaaagaaaaaaaagtgaaccatggggtatatgatatttgaagggatgaaaatactctcgaaatcggtaacatctcttcgaaaacaatgctagatctgttaaaattgaccatatttatcaatgtaactattaaggcagtgttcgagaggagtggttgggaacccctcctcccgacatataaaacgaagcacatattattgtaggattaattaagtattgattattttttaaaaaaagaattaacataatttttttaaaacaacttccatatagatttttttagcaaaaaacacactgtttagctgtttgaaaagtgtgcacgcgaaaaacgagagaggtgagttggaaaaactaggagaagaacacagcctaagtgccaatatcttactatgctaaaaatttttgaaagatcaaattttataatgcctaaaaattgaaactgaaccacgtatacagaacgaagctcggtttgtctggaattttcgtgaccatatatatcttcattcttagatgagtaaatttcacaacagtacatataatttgttcaaagtatctgtattttttttaaaaaaatttactcgatatttctttgcccgatgtataagtatctacatggtatgtataggtattcaaaataatacatgacggtaaatactacttcctctgtttcataatgtaagtcattctagtatttcccacattcatattaatgttaatgaatcttcatcaatatgaatgtggaaaatgatagaatgacttacattgtgaaacggagggagtagtataccaataatatgatagtggagttgtcggtgacatgggatcaggagtatcatgactagaggtttgaggcagacacaatcgcacacgtggcctggtacccccgagggacgtcgggcccgagggtgatgcgttcgccctcctcttagtccccccgagggg

SEQ ID NO: 11196 - DNA, 3696 bp, Oryza sativa
caattataaaaaatcctaggatcttgttacttgatgaagcaactagtgcattggatatggaatctgagagggtagttcaagatgctttgaatagggtaatgcttgaaaggactacaattattgttgcacatcgcctaagtacagtgaagaatgctgacgtgatttctgttctacagcagggaaagatggttgaacaaggtatggcatttaaaaactttcgaaagagattatcttaaatttcatatcgattagtaacatgttgttcctgcagacagtatgagtacaaacctaatacccactgtgtagtgctcatgatacagggtacttttaaattctcaagttttctacacattttaattggctaattaacacatcttaactagataaatcaaagctgcttctgactactaatcaacagatagacaacaacctatttactttgggtatgtgggttttaaccgtcatactcccttaaagttataggccctctcttttttattcgacatgattcagcacgctacttgatctacaggtttaattttgacttgctggttgtttgtgttattcaattccgagtaggttctcatgtagaactgatgaagaaacctgaaggtgcttatgctcagctgatccagctccaaggggcacagcaggatgctgaaatccataatgacgacactgacatgataataagaagcgattcaggctctaggtctataaatgtaaaaccaagaagccaaagcacctcatttaggagatcaattactaaaggctcctcttttgggcatagtggcaggcatcctatccctgctccccttgactttccagatcccatggaattcaaggatgatctgggcatggaggagactacagacaaagtgcctcgtggccagaagaaagcttcaatcagtcgactgttctatctgaacaaaccagaagcttttgttcttgtacttggttctgtaaccgcggcaatgcatggactcatgtttccaatatttggcatactgatctcaagtgcaataaagatgttttatgagccaccatcagaactcctgaaggactccaggttctgggcaagcatgtttgttgtggtgggagcttctgcatttgttctgattccaaccgagtacttcctgtttggattagcaggtggaaagcttgtggagcgtatacgttcactgacattccgaagtgtcatgcaccaggaaatcaactggtttgacaaacctgaacactctaggtgtgtacacagtctttctctcatcatattattctgccttttgtcctatgatttattctatcaaaattccatgttccagtacttacaccaatgtcatggtgaatactctctagtctactcaaaacaactgaatagcaaagaatttaaaaatattgaacaaaagttttggcatgtaatataatccctactaatctttcacagtcctttgtttctcatcttcccatttgaaaagttcaacacctatgaaatcataatttatgactttccctgaaacaacgttaattttccactggttatgtggtgcaaaaagagtgtttcataaacaaaggcacattggaaaaaagagacaagtgcattttgatgaacagtatatactaggtagcattatccccccaaaatgaccagtactatattaattcaggtggatatttagaatggttttcatgcatgcacacacaggtgcatcatcacattcaccaaatgtgcctccagattgatgcaaacattcagatttcatactaaccatcccatcttctattccttggaataatatccttgcataaatctcaaagtgctttggatggttaagatagtacacgtactatacatatggttttagattttccagatctatacattaaaaagttaagaattgtgctcatcagctagcactatttttctactgttgtccttacgccataagtctcaacatttgttgtagtggatcgattggtgcaaggctgtctgttgatgctctgaatgtgaagcgccttgttggagacaatttggcacttaatgtccagactgtatcaactgtcatatcaggttttacaatagcaatggtggcaaactggaagctggcattgattataacagtggtagttcctttggttggtttccaagcctatgctcaaatgaagtttttgaaaggtttcaacaaaaacgcaaaggtacatacaatggattaatcatgagcattgtgctacccttacagatgctttctcatgcaacacgttgtttgatgttattctttgttgtaatgcagctgaagtatgaagaagcaagtcaagtagcaactgatgcagttggaggcatcagaactgtggcatcattttgtgctgagcagaaagtgatagaagcatatgagaaaaaatgtgaatctccagtaaggcaaggaataagggaaggtgtagttggtggcttgggttttggcttctccttccttgtgttctactttacttatgctctctgcttctatgttggagcaaagtttgttcaccaaggagtggcaacgtttcctgaagtgtttagggtgcgtaaattttcttatccattttacatagcattgacattttgatattttagtcaacttatccagtggctgtcaggtcttctttgttttagttttggctaccagtggaatctcacgaacaagtgcaataggcgcagacagcaccaaggctaatgaatcagctgtttctatcttcgaaatccttgaccggaaatccaagattgattccagcagcgaggagggtgtggtcattgcaagtgtgaggggtgacattgagttccataatgtgtgcttcaattaccccctacgcccaaatattcaaatatttaaagatctctccttgtgcattccctctggaaaggttgctttctatctgaactaagtgaacatatttagtatcattaacacattgctagcttgtgttgatcttaattacattacattatggtttcagactgttgcactggttggagagagcggaagcgggaagtccacggcgattgcgctgcttgaaaggttctacgacccggataccggcaagatccttcttgatggggtggatctcaagacattcaaggtcagctggcttcgtattcagatcgggctcgtggcacaagaaccggtattgttcaatgacaccatccacgccaacatagcttatgggaagcaagaacaggcatctcaggaggagatcatggccgctgccgaagcagcaaacgcgcaccagttcatctcggctctgcctgacgggtacagcaccgtcgtcggcgagagagggatccaactgtcaggcgggcagaagcagcgcgtcgccatcgcgagggccatcatgaaggaccccaaggtgctcctgctcgacgaggcgacgagcgcgctggacgcagagtcggagcgcgtggtgcaggaggcgctggaccgggtgatggtggggaggacgaccgtggtggtggcgcatcggctgtcgacgataaaaggcgcggacatcatcggcgtcctcaagaacggggcgatagtggaaaaaggggggcatgatgaactgatgcggataaaggatggaacctatgcttcgcttgtcgagcttagttcaagttcaaggtaaatcttctgaaagcctgaacattatcacctctaatagtatgaaaatactgacttgtcctgaata

SEQ ID NO: 11197 - DNA, 13881 bp, Oryza sativa
tggatcccccttttttaaaaaaaagataaatatttgatgattactgatcattatttctccatggatgtacatatttgtgtcttccattgataaattcaaaatattgttggttaacactccccaaggcaactctcacagtgacaaagctaaactttccagcggagttaaaatcactaaaaatatgcaatatggtatttatatatctgtttcacattgtgcggtttatggtttgagttatattttgttctgcaggtccttaggtcatgcgacatcatcaataacagcccttgcaggaggtcaaggagcagcatatagactgtttaggacaattgaaagacaaccagatattgatgcatgttgtaccacaggtgacatatttgaagatgtcaagggtgatgttgaactcaagaatgtgtactttagttatccttccagacctgaacatttggtatttgatggattctccttgcaagtaccaagtggcacaagaatggccctagttggagaaagtggcagtgggaaatcaactgttatcagtttggtggagagattctatgatccacagtctggggaagtgttaattgatggagttgatattagaagaataaatcttggatcgataagaagaaaaattggtcttgtcagccaagaaccagtgctgttcgcaggtacaatcagggaaaatatcacgtatggaaaggaggacccaactcttgaagaaatcaatagagcaatcgagcttgcaaatgcagcaaagttcattgataagttgccaaatgtacaatgccaaagtaaaatgttctaattgttaactccatttcagttgttagttgacatcatgaaatatcgcagggtcttgaaacgatggttggtgagcgtggaattcaactgtctggaggtcagaagcaaagaatagcaattgctagagtgattataaaaaaccctaggatcttactgcttgatgaagcaactagtgcattggatatggaatctgagagggtagttcaagaagccttgaataaggtaatgttagaaaggacaacaattattgttgcacatcgcctgagcacagtaaagaacgccgatatgatatctgttctacagcacgggaagctggtggagcaaggtataccatacaaaaacctcttcagagattcacttttttctttgaagagatttaacttgaaatctgatttctagagtgtacatactacatatgtctgcgtatcactattgagatattgtgactatgcacaaggcattttcaggtccacattgatggtctggtgtgtatgtttcagaaaactttaaaatgaatttatattcgacatttacaatattttaaattcagctcactggataatttcaatttgatatgaagatagtaaatagaagttctttctgacccctaataaacagataggtaatagttcacttgtgtagcactgcttttgtaccatattagctgtaatattcctttgggctttaacaaaatgttacacctttttgttcaagagctacttaatgcacaaattttggtacataacttaccagttgtttatgaattatgaaaaggttcacatgaagaattgatgaagaagcctgaaggttcttactgtaagctgattcatctccaggagactcggcaggaagctgtggcacctaatgatgaccctgatatgataataagaaatgattttgactctaggattataaatagcaaaacaagaagccaaaatatctcatttaggaaatcaaccagtaaaagctcctcttttgggcacagtggtacccatcctttcacatctacttgtgacttatctgatcccatggaggtccacgatgatcagcacataaaggagaccacagacaaaatgtctaattgccaagagaaagcttcgatcctccgccttttctctctgaacaagccggaggcctttgttcttgcacttggttctataactgctgcaatgcatggagtcatttttcctgtattcggcatactggtttcaagtgcaataaagatgttttatgagccacgttcagaattactgaagaactccaggttattgggcagcatgtttccggtgcttggaatttccacatttcttcttattccaacagagtacttcctatttggactagcaggtgggaagcttgtggagcgcatacgatcattgacatttaaaagtgtcatgtaccaggagatcagctggtttgataaacctgaaaactctaggtatacattatgtctttccctaatcgtgatgtggtacattttttcctaggacttgttatatcagaatttccttcaagaatcaagatgcacaactgcatgaatattagacttattatggttgttcatgctctcaagctcttaaaccaaatgtacgaataatataattttacgtacctaacaaatactctggcatatatatattttgcttgttaatatatcagaattctttgaaaaacatattctagaaattaaaatttcaaaaataaaatatcataagagctttctgaaaatttgatgggtactaaaattagttaaagtggattttttaagtggaaaaagaaaaggcattatacttgtcagctagcaatatatttttacaggtgtacttatatgggtttcaacttttttttttctagtggatcaattggtgcaaggctatctactgatgctttgaacgtgaagcgcctcgttggggacaatttggcactaaatttccagactttgtcgaccataatatcaggttttacaatagcaatggtagcaaactggaagctggcattgattataacagtggtagttcctttggtgggtttccaggcctatgctcaaatgatgttcctgaaaggtttcaacaaaaatgcaaaggtacatgccttgaaattaatcatgaatattctccatacaggtgctccaacacatggggagttgttttgcctaattttttggtgcaatgcagtcaatgtttgaagatgcaactcaagtagcaactgaggcagttggaggcatcagaaccatcacgtcgttctgtgctgaacagaaggtgatgaacgcctatgagaagaaatgtgcatctccaataattcaaggaataagggacggagttgttggtgccttgggttttggcttctccttccttgtgttctactttgcgtatgctctctgcttttatgtcggagcaaagtttgttcaccaaggaacagcaacattcgctgaagtgtttagggtgcgaactcattcttatttcattttgcatagtgttaatcatgctgagggtgtgaactcattcattttgcatagcgttggtcattattaacattttggttcactgatcatatgctaggtcttcttcgtgttagttttgggtattaatgaaatctcacgaacaagtgcaataggatcagaaagcagacgtgttaatgaatcggtagtttctgtcttcaaaattcttgatcgtaaatccaagattgattcgagcaatgatgagggtgtggtcattgcaagtgtcaggggtgacattgagttccagaatgtgtgttttaagtaccccttgcgcccaaatgttcagatcttcaaggatctatccttgagcattccttctggaaaggttgccttctgtctgaactaacaagtaaaatatttatttctttacaaactgctgtttggtgcataactttattgacgggattatcatttcagactgctgcgctggttggggagagtggaagcgggaagtctacggtgatttcactgcttgagaggttctatgaacctgatgctggcaggatcctttttgacggtgtggagcttgagactctcaaagttagctggcttcgtctacagattggccttgtggcgcaggaaccggtattgttcaacgacaccatccgtgcgaacatagcttatgggaagcaaggtgatgcatctgaagaagagatcattgctgctgctgaagcagccaatgcgcaccagttcatctccgggctgcctgatgggtacaacaccattgttggcgaaagagggatccaattgtcaggtgggcagaagcagcgtgtcgccatagcgagagccgttataaaggaccccaaggtgctgctgctggatgaggcaacaagtgctctggattcagaatcagagcgcgtggttcaggaggcgctggaccgggaggtggttggtaggactaccgtggtggtggcgcatcgcctgtcgacaataaaaggagcggatatcatcggtgtcctcgaaaacgggacgatagtggagaaaggcaggcatgaagaactgatgcagataaagggtggaatatattcttcacttgttgagcttagctcaagctcaatgtaacctttctgaaagccagaaaaccactcttcttcaattggacactgatttagtccctgatatggattgttggtttgcattccaaagttttatatatgtatgtttgtactaggaaagggttgttccttatgctgtctgttaatgcgcaactaccatggaagacatgcccagtttgtagtttgtaatatttaaattttgtacaatgtgtaccatcaactcagtatatatgaatgttcaggctgtagcctatgagcctatttggttgtgaatgctttttttaaaaaacaaaataggtccatgcagcttttatttctgacgtaggttgaatcaaacgatctattatgggttatttccggactgtgtatcaactacctgtgccaattcatggaattaagaaaaaatggcacagcccgccttccatgcttaacccataaagaagttgaaaactgagaaagattcatgatatatattgagttgagcagattacggagttgaaattgaaccaaatttggatttggtatgaccgtattggttaaagtaattccctatatctacaaatattcaaaacaactaacttaattaggactaacatctggtataagtaagactactaactcaataaagatgacttctcaataaaatttcttttaaaatttgtaaacttcattgtactgattcttccatatagtaccacatacgagtcatatgacacgtgagtttgatggtgaatgctttctatcggtagcgcgagggaagagaaaatggaaggcaacttaaccactatatgctatacaactacttttttttatctatgtatttatttatccatatatgtgtgcacatggttgtcttcttaatatttttcttctcaacaatttcttcgattttttatccaatcatatcgttgtatttgttataattaaatctttataacaaaatatcacatgattatactctgatgaaagaaaaacatatgtttcaaaccgttaaaactcaatgtttcatacgcaatagcgtcatgttttaactggtgttttcattgtgtttcacaaaagaaaattaaatgtttcaataacttttttgtttcaccctgtataactcaacgttcacaagtggctgacaaagtattgatatattatccctactcactctttcttctgctatatacttaattttctctccactctatccccgcatagggaatatatatatatatatatatatatatatatatatatatatcatatgcgcacaagcttctcttacacactccgtacacaccaaataataaatgtcatgaaaaactatacaaaatattgaacatttactcctaatagtattacacatatatgcaaagtatcatattcaaattcactatattttagccataacaaaaaaagagaaaaatcttttttgttcacttacatcttttcgttgactcgagaagttcatgtgaagggatccttttatttcgataaatatctattatcatatccgtgccattcgtttttgtatttaataacattcgattttcttttatccgggttttttgtttcggctccaattcaagaaaaaaaaagagtaaattgtagtttggaccacatatttttaccattgttacaatttagacaaggtcctagcaatggttttcactttgaaccacatatctttaccattggtttcactctagaccaccccctcatcttctccaagtccggcagcccatctccaatgcaagtactgttcgtctctctctcccccctagtctcctgctatctgccacgctgtcagaggaggtggtgactgctcccgagacatgcatgatccaaagtggagcatgtcagcaagagtagggcagcgatggtctcgtccagaactccggcagcccaatcttaaaggaaagagtacggaagcggcctggaactccgggcacccaatctggagggacgagcagcatatcatggatcggcaacatcgaaaaagctcgagcacgagcgaacggccaatagcactggaggtgctggtgatggagctcaagtagggaggcagggcaagaagggctggtcttcatgttgaggtagccagtggtggttatcagttctgtgggttcgacacgtgcaggactcaacctcaacttctcaagcatcgaaaatttgatcctcgcacaccagctcagctacagatgacatgattatgaatagccaaacaatcatggttcaggcaactccaactgaagcgaagcaatcgatgccgccaaatcaaatgtggatgattgaaatagccgtggtagcactagcaccgtagcagctcaagcaatgccctaggtccaaactgctatgctttggcaagtctagctggtgtgaattgaaaattttgttaaaccccttgtccattgtgaaactcaaaaaaaaaggtccaagatgaaattcactcaaaaaaaaaaagagaagaaaacggaaacggttgggtggtgtggacccttttccgtcccaatttacacttccgtacctttctctctgacaggtgggccctgataagcagcggccgtgcgtccgcagttacgtcttgtttcgtttaccttctccgactcctgacgcggcctcaacaagaagaccagaagcttcctccaactccggccgccaccgacccccctcgacacccgactccctccataaatttccccccctcccgcggccgccgggagatcatcgccgacgacaaccagagcagaggagaggggaggggaacccaagcaagcaatcagcgtggaatcggatcgggtacgaggaggaggaggaggagggggatggatttcgagctgcgcaaggcgcgggagaagctggagcgggagcagcgggagcgcgtgcagcgcgccaaggacaaggccgaccgcgagcgccgcgccaaggccgaggccgcgcgccgccgcgacgcgctcgaggcgtcccaccgcgagcgccgcctcgacgccgcccgcgcgcaggaagaggtaataataccaccacaaaagcacacaacaaccacgttcctaacctgctagggaatctagggttaggatcacttttgctccccccgtccgtgatccattttgcggtcgtttgtattggtttttatcctgtttgatgattgtaaataggcttctcaagtggagtaattcgattcccaaacccaaatttgatcccaaagccttcatgttaattctgagcaaacacatgcggcaaagattatgcattcactcgatcgcccaatgtcccctttgttgttatattagaaacaataatttcttttcctgatactttggtggatatcttgaatgtttgattggttcaacttgttgaattggactgcttgctccccatgacaatttatcgaaatgcttgcatttgttttctttggtgtctactcctgccttttgatgtgctaccggctcgtgttaatgatctgttttatgtatttgtgttgtaataggctcagcagaagatggaagaggtgatgcaacttggaaaggggatttctttcttgcacatgtttgaagctcttcgatatgatggtcctggggataagatcaagttgccaccatcgtcttttaaggaattgtctgatgaaggagcactggacaaaggtcccatgtacttcaggttgtcaaaggttagagacagtgttccgggtgcccctcaggataatgatgccgatgaggcaacatgttgtggtgttcttgagttcactgcaagggaaggctccgcagaactcactccacatgtgtggaacaatctgttccggggtgatagcccagatgttcctctgattgaggttaggtatgtcagtttacccaaagggacatatgcgaagctgaagccagaaggagtggggttctcagaccttcctaaccatagggctgtccttgaaacggcactccgcaatcatgcaacactatctgaaaatgattttgttgtggtgaattatgggcagctgcaatacaagttgaaggttcttgaattaaaacctgcatcaagtgtttctgtcctggagacagatgtggaagttgacattgaaggaccagattcagttttggacaacgtagagaatcaacatgtgcttgtgccacttgagactggaaaggttgaatctggagttgtggaagaaggaaagtttaggtactacaaatttcttgttgatgaaggtatgggtgagaaagtagcttctaggcatgcaaatattgaggttaagatagagacatatacaagtggtggtgacactgatatttatgtatcaaggcatcctttagttttcccaactcagcaccgtcacgaatggtcttctcatgaaatgggatctaaggtcctcatactgaaaccaagggatgccagtctctccagtggtacctacagtattggagtttatggtttcaagggaaccactaaataccaactttctgtagctattaaagatgttcttaatggccaaaggattggtgagcaggctagtgcctcatctagtgttgatgttgattcagtggtgtgcaagaactgcaaacgctatatatccaaccgaacttcactacttcatgaagcatactgtgtgagacacaatgttgtttgcatgcatgatgggtgtggtgttgttcttcgaaaggaggaagcaacagatcacgtgcattgcaacaagtgtgggcaagctttccagcagagagaaatggagaagcacatgaaagttttccatgagccactacaatgcccttgtggggtggtccttgaaaaggaagatatggtatgtattttgccttcgctacttatattctttgaacattcttcctaacttctgaagttcttttttactcgttgaatcccgccaatgatttgagtacacccagtttaccaagcgtaatattgtctttacttctaaacaaaatgattgcaatacctttttagatgtaataattttatttgcatgatatatttttattgccaatggttagttttacgagtattgttcctcactcaatacaaacagtagagaaactgcctaccagcttttgtttcaaacagttactgtaatttactggtaatgtaatattggaagtcacatgactaatttattctgttcttaaatctcaggttcaacaccaatcctcaacctgccctttgcgcttgattgtgtgccgattttgtggtgacactgttcaagctggtggagaaccacttgatgctcgggatcggcttcgcaacatgtgtgagcacgagagtatctgtggatccaggactgcaccatgtgattcttgtggacggtcagtcatgctgaaggacatggacattcatgtgattgctgtgcatcagaagagctaactattgtaaagcattggctctgagaaagatggcctgtcctttatcctgctgggctttaaccaccaaggccatgaagtttcagcactgctggaccaaatgttatttccttttgtgttacatatatcttgtgtcattggttaaattgtaacactgcgtatgggagcatggaacactggggcggtgtatgggagtatggaacacagtggcggtgtctccttatgtatacacaaaccatctataatatttgatttgagctttctcatattcaggagctttattagaaactttcatttccgtgtctatacttccactgttttatcattagggcttttttttttttggctccgatggataatgataatttcgttgcgtagtgtttgcacacacgatgcatttgaatggaaaaaaaaagttgacaactgaacaaattttcgctgaatcaaaaaagtaactaaattttggccagagacatgtcctttggctatggggacccatcgactcatcgagcatcgatagaccaaaatttgagaattttggcctaaaattctctctatattttatattataagctggtctaacttctttttagttaaactatttttttttgtttgatcaagttttcaataaaaacaaatatattattaaaatatattcaatgttagatttaatgaaactaatttagcgttttagatgttgctgaaattttttttataaatttagtcaaactctttttaagtttgaatagcaaaaaaaataaaattaaaatgatatttttttaagatttatggtacgaaacagtgggagtacttttcatccgtatacaaagtttcttatgtcgaggttcttttgctggtgatgctagctaatttgccgtcgagtttatcctccttgagtgccgtggatggtagggcgaagtgagagccggtgccggtttgatagccacacgacaaagatatatctccaggtattgtgccgaacatcaattcattcagatcaaatagcaaaagatattaggcgcgggcaaaattcgtcctagtcgtttctctcttcattctctcgcttagctccagatttgctgcgaccagcggcgaaggcgcaagaactaattgctacggactcaatccggggcacttccgttgacaaggtaacgatcgtcgatcagtgatttctctaatatctcctccttcccttaccatcctaatcccacatatataaaaactgttaaaaaaactaatctctactattataaaaattaaagatgtttttgccagtactttagtatgtcatccgtgtatgggttggtttttaagttcgttcacttttgaaaatacatatccgtatttgagttggtttttttaagttcgttcgattttgaaaatacaaaagaagtcgtataaaaaatttcttttaaaaatctcacatgcttagttgagacgatcggactcctaattgcagctcatgattttctaaaaaaaaagataaatccaaacgaattcccacagtgaatttcatctcaactaaaccatataataataaaaaaattaaaatagccttcactcgttacaacgtacgggcattttttcagtgtgcttaaaaatgaaaactgatcaaccgagagaaaagaaaagggaaaaattacaacagccctttgctttgagttagctcagtatttgtcaactgatgcgttcttctaatgtaacagtggtcttgattgtgggatgtgattgattaagtggggcatgcgagtgaaacaagcgccagcaagcggcaggcagcagatttggtggcttcgatatttactccgtatttcttttcatcttgtttagttccagattcctacaaaataaccggagaatttaccaagatcttggctaggatcgtgcgaccacagattcataaccgcagaaaacaatgaaccaggggatagcaatttacaccaccacatcaccaggaaaacagtgaaaaatacaggaaagcaacatcgggagcccattggtatatatatatatattttgccattcctccttgctgtaaacaaaaccgatcctcaaaaccattattggtgctctttaatgtacatgtcgaaactacaaacctactagccatcacctctattatatttatagccgttgatcatttacaatttcagcaagggaaggtgattcagagccattgtatttactcggaactggggtgttccgtctggactggcgctttgtcgccacgagaacctgctccgcctctggttcgtcggagatggagaacttctcgtcgtcctcgtcgcctttgaacaccgggtggatgtaggcattcatcaggtatcctttgaggtcgaaccctggctctcttgcgcgttctagggtatccttccgcattgcatcctggaaaagggaatgatgagacgttattggttgatttcagtttgaaggttgaattccacagtttctctaattcacaagatgcacattctccttttgacatagaactgacaatgtccaaaataaaatatagaagcttcaattctatccaagttatggctcccatcggatggcctattcagctaaagaaaaagccaaaatttgaattttcaaacttaattttgacattgattttaagatattttcaacgtagtttctttttcaacattggcttttaagtcaccgagaacacatatataaaagttttacctacaaattcatttttattctctaataagccgttttggcttattacgaaaaaagccaaacgatgaggctgtatgttaagacatttattttgcatgataaagtttcaacaccatctctgtagatatcactacaaatgatttcttttgtaagcagaaccattcaacagcagtagccttgttgtaaaaaaaggcacgtcgaaaataatttaatggcagagtacttatgttgtactattggtaaatttgaacacataggaccatcacacacacttggaaaggatttaaacagatgccttcagatatcttgttagttgcagacttgtgcttggcatatttcttgcaaagcagcattcgatgagaatagccacttccatgtactcttattcttaaaaaaatgtgaatattcatcgactaaataatactacttcagtacgtcatacacccaaatcttactgaaggcaactatatgccaatcctgctaacaagattgtataaaacattttaaacttgctggctgttaaaatctaccatttctggatatttagttcattttactacaccacgacagctttggctaaaaagcaattctatagggctctagacaaattatggtaacagacatctacaatgtttttggttatttacagttcatttcaaatagaaccatgggtgaattggtgataatacgctcatatgttcttatcaacatgtataggaactttcatcccaaggtattaactacgaaaacttcagaattttaatattgttttttatttcacaagctaaggtttaatagataaaaacttaaaatacatagtggcatgataaactgattctgagatgagcattacctgtaatggatattccacaaaagcaggctcatagcgattcttgcagtatttatagaaataaaaggttacaacagggagaacaaggagcaccggtgttgactggccagcaccttttgtgcttagtaatccaaggagaagcagctgtgatacgattaatgctacaattatgcgtccatgaacacttggccaaaatgctgctgcactttcatattcttggttgtacacatttattatctgaaacaatgaaccctcagttaggaagtcaatcattttaatacataatcagaatgtagaattacttgttctattgcaccgaagactaaattgtcacacatttaattcctttgaatacagtgaaaggcgagagtgctaacttcttacatggaaataatagtagacaacatagccaaagaatcaaaagaactatataattgtggactagcaaacacatagactatcacacctgacaaacaagtacagacagggtatgcgattgtatagcaacatgataaattatatggagctacctaatgcaattggttatccattatttaagtacaaaacagaaaacaacatcgttttgattccaaaatgggggaaaaaacagtttgaagtgtccttgatgtagcagaaacgcagtcaatt

SEQ ID NO: 11198 - DNA, 8031 bp, Oryza sativa
gatggagggcttggtggcgaaccctttggtctttgtcgctggcttcgcccaagcacttcaccctatggcttcgctaagaggcaggtgtctgtgaaatttcatttttgctttcctgggcagctgccttaagaggccagcggtggtaacacaactttcgcaggctaagatgccatgtataaaaatcggtttatatgcacatgcaactcagtaagggttgtacctccctggtgcaaaacacaattgctgcactatttgtagaaaacgataagaaacaaaagaataaattagcggtgatgctctaccaatttgggaagacgtttttttttttcaaaatgaagatctgaagaggaattgtatcctgatgcattaatataaattttaaaatatggaatgtttaatgcctctaacacacgttcacatcattgtcatgtgccatagctctttgctctttgaggtagccatgatcacctcaaacacttatcggatatgaagaaaacatcatcgttctagccaaataaataaagatgtaaaagtcaaactttttaaaaatagagcaagagtcctttaaacacatcagaacacattggcatcgattaaatatgataaatttagggcatataattttttggggaatgttcggtcgccacttcgcatacccttatcattgggtccacaatgctctttagattgtcgcccgtgtccatagcattttctaggcggacgttgttcgttaaatgtccacctgtgtgttgttgtttgttcatcttcctcaccccactgcttcaactacatcaacaacattggttgtaaagtgcatctaagctccctagtgggttttagctaattgatgacaaatggttaattgactaatgtgttcactactacaggaaagattttcctgaatgccatacccttttgtttccaggcagaccgtaagtgaaatcgcacaggaaaatagggggggaccggcgccaggccatcgcctgcacaggaaaatcaactttcgtgtgcaggtcagttaacaggcccgcacgtgaaaataaaatagcccaccctacatcaagtgctcgatatcccttcgcgccccttgcccctccgcccactaccccactacctccctctctcccacctcactctctcccactccactcctctcctcccactcctttcctctcctctcctctccctgccggccggcggcgacagcaggcggcggtgctcggccccttcctccctctccctcagttgcgggcgggaagaagggcggcggcgggtgaccacggcagcgcgtggcccctcctctccctccccttgcagatccggctacacgccgcccctcctctccctccccttgcagattcggcgaagaggaggcatgggggcccgacggatctggcagagcggcgagaggcggcgtgcggcggcgggagggaggcggcatgcgcccctcggcggtgagaggtggttggacaaaggcggcctgcgccccttggcggcgggaggtagtgggatagaggcggcccttggttcccctttccacttggtttcttttttgtcactgcattatttttcttttttttaagtaggggcaattgtgttcatatagtttaattattattttacacctgttttttagggtttgtgattttgcccctgctttttttaaatgaagcagccgtctacctctggttttgacggtagtttagtgggttcgaaatttccgaattaaacgaataaaaaaatgatattataatttgtgaatgacatcctacccttgtttcactaaaacagtcaaccacttgctggaagtgtaatttccccaatccaaaaccctagagcggcggcggcgacgcgcgagcacagagaaggggaggagcggcccgcgcgcggcagggagacgcagcgacccggtgggccaactgccgcggggccagcgcggcgcgcggcgcggcggagaggagcggcggcctcgcgcgcgcgcaggtaggcgtggtgcggcggacccgcgggcgcgcgtgcagggaggcgtggcggccccgcggccagcgcgcagggaggcgcggcgcagcggccatgcggccagcgcgcgcggagaggagcggtggctccgtcggctcctctctgttttatgcagttaagtaggtgcttctttttttttttttttttttttgacaataagtagctgcttcttcatctgcataaaagatgatagcattgagggaatttatgatactctttcagaatgtgctaccataagcaaatgtgctggtggaattggtgtctcaattcacaatattagagcttgaggcaagagtatggatatatttgtccattcaccacacacttaacacccttaccatgagttaaacagagtatgggcaagcggctgcttcattaaaaaaagcaagggcaaaatcacataccctaaaaaataagggtaaaatcacaattgaactgtaaaacaaggacaacaacacaattgccccttttagtaagtttatacacctaaaatttacacatctaaaatttatatacctaaattttatagagctaatgtttataagtcaaaattttatatagtcgattcaaattcaaattcgaatttaacttgtacaagttgtaaaaagtagcaaatataactatgaatgtacgatgattactttcagtttaatttgttaattttgttacaacttgtagaaattgaattttggcattgcattttgtggagtgatatatcacatattaacctatgttattattttttttcaacttgtagaataatatcaaatatatcactgcagtggaaggagcagtgacctccgtgggctagagaccatcccctctcacatccgttgactaagcccgtctctactcaatgcctagacatcgcagctcgccgccgccaccaagagagggcgagggaggcgcatcagcacgtgaggagctgatgaagatgatgccgacggctggttctcccatcttcactgcgtgcaggatgggggagcacacgatgaggtcgagggtgggaagtccgccatcagaatccaccgccgacgccatcgtacctccagctagcgccgcacgtccagatccggcacagactgccgccgagaggcgcggaccaccatcgtcccacggccgcacgccgcctcccgcccctcaaactgcctccgtaccgccgccgcacgccgcctaccgccagatccgacgcggactgccgccgtcccaccgccgcacctccagatccggcgcgggccgcctccctcccaccaccggccgccaccgggtcgctgcctcccctcccgccagatttggtggaggggagggccctgccatgttgcagctgtggtggatgaatggaggaggaggagaaggaaatgtggagaggatgagagaaggaaggagagaaggaagaagaagagagaggggaggggcggtggagacaggatggagagggagagagagaagtggataaggatggggcgagagaggagtggctcgtcttaggatgggtgtcggttttaactgaaaagtggcatctatttcttttgcctacaaagatgctggttatagggtaggtcccgtagttgggatagggactaaaatgccggttttagtttagaaccgacatctatatctaacaggggtaataggtatcggttttgtttaaaaaccgcgcaccttttaagtgataaaggctgacggttcttgctggtttggacgggactgaggggcaaggggcccccgcgggccagggggaggcactgtagcgtgcgtgattttaccacttcccacgacctatagagctgacttatattaactattctgcagtattaacaagtattattaactttagaggagtagggtatataaatgttatgtctgagtatttaagcacgcggcaggaatccatgccgtcgccgtgggccgtgcttctcctggacctgaaatggccagctggtgcgggattctattctcagatgaacgtcgtggagctgtgatggtggtgggacgttacgcggtcgggatcggatcgatcggcgctcagccccaccggacgacggcgacggcgcgcggcctccgagtcttggacgcacgcagggggacggcgacccgtttgtccgcgcccgcgtgcatgtacttgcagtgatttttcctcgtttctttccttcgattaccgtgaaagtttcgtacttcctctatttcataatataagtcattttaacaattttgacatatatactgatgttaataaatctagacaatgtaagtccatctaacatttttcatatttatattgatgttaataaatctggactgtatattgatgttaataaatctagacagtctagattcattaacatcaatataaatgtgaaaaatgctagaatgacttacattatgaaacggagagagtacaatacttactatgttctaatataaataacgtctttgattttttaaataatatttaactatttatttaaatattttaagtacatcagtgcatcaatctctgatttactggtagtattggctatatactgctcgtattgtggcagcagcatgaggcctgagcatgagcatatatactccttatgcctgattgaattgatgatgctattcttgctatctctgcacctttgagccaagctctgaacgagtggaaggatattgaacctatcaattttgatattggcttttctgtactgaagaatccagagtgttgtgggttgatctttgcgtccagccaccgaagtcacgtagtgatgaggtagttctcgtacaagcttcgtacgaatttcttcgtgtgtacagtagggctgaggggaaaaaacatagggcgagatttgtgggaccgatatggcgatcgaacatgcaactggctagacattgttacacaggaaagtatgattatagaaatggacgtttcagatttgtttacgtcaccataagtaaagttttctctcagatataaccgtgagatctaagacgtttattttttaatccaattataattttcagatttgcactacatttttttttccttatgattagcctactacacatacactatgggtagtcgtcatcggacattgggtgccggtgggactgtgggaggcacagtcccgtagcctgtaggtaaccataccgacatctcggccacggccgcacgccgacccagcgccttccggcctacggtcttctcccccattttctcatttcggtattttcgattgtttacactataattagactgttttatattttataaatttttaagaggaaatttatagatacatgtataaatagttactgctttcaaatgtttttctttgggaacgtgataaagattgaaaggcccaaaacgaatgtacccgaattcaaacaagagcgagagactttgggccatcgtagtgttctgatcttctggacttatggcccatataccaactgaattcaacaacagcacacttctctcccagtcccagcctccatcacccagtccacctccccacctccgccggccggcggggccatgactgcggcggcagccaagggagacggcaaatgcgccgccgccgccgcctcccctccggcaggatgaattgagcagtccgtcgatggatttcggtatttccagataaaaccctcaactcactgttttctctgtgcaacgagcatctcttgaggggaaaaaagaaggcgataatatcgtgaaattgggcgtctttttctgcgtgtgctccgaataggatgaattaggcaaccgctggtcgctttggctgctgtgctggctatatttggtttacttgtaatatttttgttccacttctttatcatttgggtatatgctgttcttgtgatgggcatatatgggcccaaaaccaaggttgcctcagatatgattcagtaatctactccgtagaatgtattccaggaaactattcactcgcaatgcaggagattgattgaatttttagcttaactctgattattcgtttgctcgtactgtcaagccaatagagtttctgttaagattatttgtccttcgtattttatcctgcacactatcatacatattttatggtgaccaaatttacaattctcatctagtactagtaatctgctcagttatgttttaggctggcaagtcacatctgaactctagaaattcaaaaggtattactaaatgttggaaatgaaccttcctcttcttttttaaggggaacaaagtgtatgagtttcctgtgatgggtgcctaaactaattagggtatgccatttacgtagagctgtatattgagccccttgtaagttgcataatgatgtaatgtgtttctttatgagtatttgcaaatgagcagctcccaatttaaatatggactaagtggcaactattctttcagaagaatacgtcttcatgtagagcagtagcctgtatgacaggggtaaaattatctgtgcttgttttttcattgatttttaaatttcttaatcgctaattaaatcactctttttttttaattttcaggtgatcatgaattttatctatcttggtgttggagcaggacttgtttcagcacttcgtaagtgtctatcttatgcaagaaaataggctatcttaaacatctatgtttgcatagaaatttattttatcttttgatatagaaattggagaataaaaatgtacaacgtgctactagtacttgcagttcttttgtcaggagctttttattggaaatattattagaaacaatgcttacttgattcattatgacaatttggtagaagtatcatgctggacaatcactggagagagacaggcagcacggattagggcgttgtatctcaaagcaatactgaggcaggatattgccttttttgacaaggaaatgaacactgggcaactagttgagaggatgtcaggagatgcattcctcattcaagatgccattggagaaaaggtaggcttgttttcagtgtgtaatctaattgattaaccaaaagtagttcttttgagaagttcagttacaatatttcctatacaattgatttggttttgtacaaatatttagtaactgaagaaagaagacccaacgaatcccttttaattgaaatttatgtagtcaattttctgtagcccatacccaattgcatgcatcatacatggtctatttaggagtttacagagccctaaaaagaatctaggagttcagagaaataacttggtttcatgtgtcacagtcaactgtgtgaatcgcacatacattgttctaactacataatatgagtttgtgcttgactcaagtaactctttggtcatgcatcatatatgttctatgtaggagtaaaaaatagtcaagatgcataatctttgcctgtatgcaagtggagacaaaaagacatattatatgtatcagcattataagttcaatgaatctttctttttttaaaaaaaaaatcccagttgatggattttccagaccataaatgcagttgggttcagtcaatgggaaatgcatatgtttaacttgccaagtactgcattatatttcattatcctgcttcaatgagaaatatgtacatgtactaattctctattagcatataataacatgtaaattttgttatacatgcgttgtctattaggctggcaagtgcatccaactgctttctactttctttggaggcttcattattgcgtttgtgagaggatggctgttggcacttgttatgctttcaagcattcctccagttgctgtggctggtgcaattatgtcaaggttgatggtaaaactgaccatccgcatgcaagcaaaatatggtgatgctggaatcgtggtcgaacaaaccattggggccattagaacagtgagtgatggccgactcttatatttggctataaaatctttgctatcgcgtgtatattgatcctgttctttttatcttcttttgctttgaaggttgttgcattcaatggtgagaagaaagctataaacacatataacaagttcataaaaaaggcata

SEQ ID NO: 11199 - DNA, 4429 bp, Oryza sativa
cctgcagcctgtttaaatccgcaagcagttttattacacggaaaggaattaataagagacatgctatatacgtatattgtcccgatcgaccagctacttattcaaaccctttggatgcttgatgatgacatcaaacggctcgtcatcaaagcaaccggaaggctggggatccatctgtatctcgtcgtcgttgttcaatgagacgacgcaggtcgtcgggagcatggcgatgcggtggtgcagctcggccaagaagaagcggggagccgcctccgccgcgccggcgccggcggccctggcgaagaagctgacgtggaagtggaaggcgccgcggcagtccatgaagccgctcgccgtggcggaggcggcgacgagctcgtacttggcctcgttggcggcgtcgccgttgtagtgcttcagcgcgcactccgcgaggtattccgcgtgcttctcatccatggcgtcgtcgtcggcgtcgaagtcgaagtcgaagtagaagtcgtcgtccgcggcgacgtcgacggtgctcgcgaaggtgatcaagctgtccgtggtgtgatcggcatggtcgtcggagagaggagacgtgggcagcagcgtcggcgatgccggtggcgatgtcggcggcggcgacggctgtgccggggaataaggcggcgacagtggcagaggacaaaactgctcctcctccccgaggtcgtggatgtcgtccgcttcttcgcacggcacgtagtatctcaccgccggtggcatcggcatgactgtctctcggaaagagagcggaaatcgattgatcgatcggcttgcggtatagcagcgagaaaatgcagcagctagctagcagcgcacgcaccgtcggccgtctccgcgcggcgcctgattatatggagtggcgcgcgtcgactccgattcgatcgaatccgactcggagtaatagcctggatcgatatcggcaaatgcggcacattcggaggggggattcgagtcggaacaggaagacggtggcgcgcgacatccgagctggagcgtgacgctcggccgcatggcctcgcgatgtcgcctccatgagtccatccaaatctgattaggcttttttccttaaaaaaaaatcttattaggttagctaattactccattacatccactatgacacttgatacgtacacaagctagcaagccaacttgcacgtttctttccaacgttagagcagggaaaatcactacctaaaaatgattttttttacgagcatcctaataggttgagttccgcatctgcaaaaatcgactctaatttttctatatgacttaaaaaatatgtatgcaaaaatcaaattttccaaattgaccacttaaaatatccgcacgcaaagggctcttactcgcccgcatgcaaaaataggagaatgattaggatcagtcgacgggggaggtgggaaaatcggtcgttccccctcctcccacgtgcgcacccccactggatccacccacttgtccctcccctttccatagaagatgtttcatctagtgtacttacaatgtttcactatatatagatctaatgttgcagtgaattaaaatattcttttgcaacaaatcacccgcatattttggaaacccactattaagagaatttggtttattttttgttccacaaaaaatgttttaccgagtgtactcacaatgtttcactatgtatagatctaatattgcagtgaactgaagtattccattgcaacaaaaaaaacccacatattttggaaacccccaagtaagggaattcgtttcatttttttccaccgaaaaatgtttcacctagtgtatttataatgtttcactatgtatagatcaaatgttgcagtgaactgaaacattctttcgctatttgctgaaacattgtttttatataaggtgaaataacacccgatttaaacgagtgaaacatttttgaatacttagtgaaacaattccgatatacctggtggaacatcgtgcaacatttaaaaataattcaataataagctaaaaaaatttcgtcggaatatatccaggtgtggtcttgttttgaagatttaattacaatgaatttaatggtgcaatcggatcatgatttgaataagtaatttaagagaaaaatcagtttaaagtagttttacacgtaaattgggcgctgacatcagcgcccgattttaacctcctcccatcgggcggctaagtcggagtcacgtcctgcaaaaatacctccagaaaattcccacttttttttttatttattatccactctctctctctctcctcccatcaccccactcctctcctggctatctctttctcccactcctctcacccacttctctcccctctcctccctcccagcggcggcgtgcaaagacgacaacttcctcttctcccccactcctcctctccccgctccttcctcccgatagcggggaagggtgtattcatcccttaaggggatctttcatgcatatgctatctaaatagtcatcaaaaaaataaaaataaattgacaagatagattaatacgaaatatatcactccacgaatatgtaagttaaaatttaacttgtacaagttgtaacaaaaataacaaatataactacaaatgtattataactatttttagtttaattttttccttttgttacaacttatagaaatcgaatttagccttgcatgtttgtggagtgatatattttatattaattagttgtcatttttttcaaaatttttataactatttagatggcatgcatgtaatgagagttcatccccacggggaatgaaaatccaaatctgttagagcagacgtgtagtcaaaaggacagatgatcgagcccggtgtaagcctgtaatagagctaatactctaatagagtctagtgcgagtctctaacagacttatggctggatgaaagctataatttcatctcataccttgtgtgaacacttgttagctaagtaatcaatttccctttgtaaaaaaaaggacggaggatctttaataatagatataatccgaagctcaatcactattgattatttacccatacaatttttgtaaaatgtaaatatattataattgtagtgtaattatattgtgattatttacctatacaatttttataaaaatgtaaatatattataacttgcatgtagctatagtattacttgtatgcaactttcacataattttacaccgttggatttactttaagattcatgcaaattgggaagaaaaaatcatagcacgcactgatgaggactttcggtgtcatgatatccgcttcgagaaaatagcttgtaactgtaagatttttgaagttgtagtatagatataaacaagttataaacccataatgcaattacaatgtaattatactatatttacaagttacaaacttttaggattcccaacctatgttagattttgctatatctatagcgacatattttcttttcaatcacatagtacactttatgatagtcctgatatcattgtacccatcgtgaaagttactaagaaccaagattttttagataatggaatgaaataacatctcggcctttgctcaaaaaagctacagccaattattacaaactagcactctgtaagagtgtagtccaaatgaaagcaaacacaccaaccaaaaaaaataccaagataagagcatgattccatattttcccatcgatgcgtgcaagttaaaataccattgtataagacaatttatctaagaaataacatcaccatgcattagggttccgtcaatttcactccgttagcctaagtagtttttttttcatcttcctctcatccatcggtcattttctctcgtctacgagtaaaggggaggagagtaacaaagaggacacagagttgagctaggcggtagggcggtggttgctgatagcccgcagaaggaagagattcgtggtgatggcatgttgcaaggaggatccacaggatgggaggggcttaggcgatgaagaccatggggcaagcggcaacatcatggagttgaataacaactgggaatggagatctaggctacgacagtgaggggaaaaatagatggcggtgggctggccgataaaggagaggtgagacacacttgtagaaaaatgatttttgcaggcctctccccttaatttcatagggagagaaaaaatacaaaacacatgctttaggcttacggtggtagtgtgtgtgtgtgtgtgtgtgtgtgtgtgtgtgtggtgatggtggtgggaggaggggggtggcgggtttgagaggatggcaacaacactggttgatccagagcagctagccctgcgagccagtttaagttgtggggtggtggagtgggcttgggtggtgatgggatggcgcggtggtccgacgatggtcgttgtgtaagatggttgtg

SEQ ID NO: 11200 - DNA, 4084 bp, Oryza sativa
ttcctgcagccccagagcagggcgagggatcgcgatgggagtcgggaggacttcttcttatgtaggagtagtaccaggagtaggaaggagttgggctggctggcaatctacccgtcgcttttggaagggtccgactcttctgttcgaggaggagaagaaggcgacgaagccgagaaggggaaacgggcgaggagagggagagagagacgttgctgttaaccgcatgcgcaaagctgtcaccccgcgtggcagcgtacgccgctacttgatggagttggagtttaccttgggttaggttgggttggggttcgcttcgctgcgtgggagacgtggcggcgaagcgtggccgccgcccgcacgcgagacgccggcttcgtctcgggggcgtgggtgggaaacgggaagcgggggtggtggtccaccaccggagcaggtaaagaacaaagaaaacggacacgatatgcaacgtcagggcctcaggggggcgcagcgcagcgcaggtgcgcccttttttttcacttttgttactgctaatctggtccagatgcaaaacgggagttggagttttgtgtactgacatttttcggggtttttttttcctactagggctctaggagtaccatatggcagtgagattttgcttgcgtgtggatgtaatgagtcgtaggttctgtttttaggtgagcggtgtttcctctgtagttggtacaagggtacagcatcagccccgtttgtagcactatgtttgtgttaccaccaaatgaccagattgactaccagcacaatttcaacgtgcaatagatgtacagcagtagcacttgaccgcttaggcagctcctaattacgtagtaagagtagtaacatcttacgcaaaatagcactgattttaagtgcggtgcatatcaagagccggaacggatcggcagggaataaagtccacacgagaacggtgacagcctcgctagtaaccaccggacacttattaccagaaagagatgtttagtccgtgaccaccgatccatcaatgttttgtggtgtagtactacgtactggtagggtaggaggggtactgctagaatcgtacgtacattgttgcagaaaagattgctcgcaagtgacaaacagaaaccggcgttgtcaatagttgctccataagctataccccacggctttttcactaacacccttgtaagtactaatttttccatataaacctacttgattttgtgtaaatgatcccactaaaatatcaatcaatcactaaaatatcaatcagtaatactcctcaatcagtgataattgatctcacggggtgctggctctgtcattggttatcaaactggtgcgaaatgggagtatgcgtgcgtgtggttgccgtgccgacacgtacgctgagaattctcacgtcgatggaacgaactattttaatctagaatccaatccggacgggcgtcgcgtcaccatccggatacagtacggcctgtcggcaaaacacatgtttttttgtccgtgtgaccgtgtcggcacaccgtacctcagctgcccaaccaaaacaaccggtatcgcctcgccctcgcctctgcacgctcgtcaaacgccttgagttgacatatactactccataggagtagagtaatgcagtataacgtgcgggacgcggccgcctccaccggatgcgacgcggacgcctcgtgaaaatgggacggcggcgcgagaaaacgggaggtttcgccggccaacgaggcaacgacccacccgctccagatgttgcgccagcgctgcgcccacgagaccgaccacgaatcctttgcttccggctgcggcctgcggcgttctgacgtccgatcgcgggggttcggttgatttctcggtttctgcttttaacggctgcatggttctggagtctgtctgtacttcacctggattctgttctgtaggtgtacgttctactacggagtactagctgcttcgacatgttgacttcagttaattttaccggcgcattgtgtagggcgtgcatatagtaatagtactagcacatgtcgggaggattatatacagtacttgagacaacgtgcggccggctcgttgacatgtcaaagattttgtgtgcatgtgctaaaaagtgtgcatacccgttcgtgctcctcgaattgacatgtgcatcggcattatattagtggcacccgttcttttctccaataaaaattggaggaagaattaaattttcgttgtacgtttttcaaactgctaaacgatgtgttttgtgtaaaaaatttatatataaaagttgctctaaaatatcatattaatctatttttcaagtttgtagtgattaaaacacaatcaattatacattaataccacctcgttatgcataaaaataataatcttcatcttcaggagaaaagaacaccaccttagtgccctatttagatcccacctcaaaatttttcaccttgtcacatcgaacgtttgaacacctgcattaagtattaaatatagactaaaaataactaattacacagattgcgactaatttatgagacaaatcttttaaacctagactgtgtttagttcacgctgaagtttggaagtttggttgaaattggtacgatgtgatagaaaaattatttgtgtatgaaaagtttgatgtgatggaaagttggaagtttgaaaaaaaaactttggaactaaacagggccctaattgttccatgatttgacaatgtggtgctacaataaacatttgctaatgacggattaattaggcttaataaattcttcttgcggtttactgattgattctataattagttttttattagtgctcgaacaccccatgcgacataataaccgatgtgacacgccaaaactttacacctatggatcaacaccccctaagtatgctttcacagggctaaatttgttcccacccctaggttaaataatcgtttgctgaggccatgttctaaagtagaggtcagcttggctactttttttttaactaccagatggtgtgttttataaataaataaataaatatatatatagaagttgctttaaaaaaatcaaatgaaaccattttgtatttattttaataattaatacttaattaatcatatgctaatcatgtttctcattatgcgtgaggctaatcaaccctttccaatctctatttagaatgcaccctaatttttttagtttgttaaaacaattggtgaatagccaatataatcccaaaagttttaccaaaggccctattttgacttacaattatcattgaacccacttgatgtaccacacggccgatcctaatcatcatttgtattagcaaatgtccattttacccttaatttacatatactagaaagaaaaaaatgaataaaaattttatagatgtagtactttccattatctcaacctgcatatgggggttgtgttttaatgtctatcgtatacttataagaaaatgtattattaaaacttttttaaaaagcgcaatgtagttattgaacgtatgtctaaaaattaggtttataggggttctcgttatgtaggcattttttcttatacatgtgaaaaggggtataacagccatttaattaatcaagagaggtgttgattagatttagccatctgactttctaggtgggttaaagatgagtttaaagtgaaacaagaacttgaagaaataaaatagacgaattgaaatatcaagaatcaaattgagaggcttagatgaacttgaaagactaatctacaattcttcgtaccagaaaatgtcagtataaaaaacactgaacattagtctatactttatttacgcccataatcatccgcaatctaacattttcattgttaggctaactgcaaacactggacctagctaattaattatattctcctacttccgtcttataatataatacatcttacccttttaattaatttgtcccataattgtattaggctatgtttagttccttccaaagttggaagtttaggttgaaattggtacggtatgattgaaaagttgtgtgtgtatgacatgttgatgtgatggaaaaagttagaagtttgaa

SEQ ID NO: 11201 - DNA, 6432 bp, Oryza sativa
agaatgtagaagaaaaaagtagtaaatcaaatgtaaagtttatgaacttgtctatttagggcattaggtgctcaaagatatactttggcttggtaggttccatgacttgcttgctcctcaaagtggtacattaatggataagttgtgagattggtagattgccaaaacattttcataatagaggaaaaataagatgcaaaaaacagtattgcttagcatcaaccattcaatggacagatttcagcaagtactggatcaggtgtatagaacagactttagctgcactagaacatcaagttattgatggccacaggcaacaaagcaggtgcaaaagcacaactgatataatgctaattaatttcattctagcaagtttcagttgtatttccaaaagaaagcaagaatgaaatgttaacaaacaataaatttgcaatgactggaaattcacaaattatgtgccaaaatatataacagaaatacatctgtaaagagtgcacagtgcagcaggactaaaccccttcatagcatccaagccatgttttcaattctttaacagtaagttcaagttcaaccgtgatttcatgcatacatttcctcagtttcattcggtaggaaaaagcctctgttacctctgcatgatatttatcttgaagcttacttaaagccttaaaggacaactgaccctatgatatcttgaaaggatttgatcatcaaaagttaacaaaaatatattttatcattttttttctgcaataacattccttgcaagttgcaacccacacagaagtctaatttattacatggcagtagcacttaaatcatatattggatgatgataagatcataaagccatgttctgaaaatccaatactagaaaagcagtatgtggtaagctttcaactgaaaaaaaaaattgaggaacaactgataataattattgcagaagaaagagataaatgcacgtacatttcaatcaaaggcttcagaaatggagctgccttctcaatcccttcaatatttgcaagggactgaacaaatgcaatcgggagcacataaaagaagttcaggaagaagaatgcaaccgcaattatcagcctcctaattgtcaggtaaacaaaaggaatagagaggttatcccaatagacatcacgaggttctggggcccactcggtcaaccagacagttggattactggtttgctgtgtctgagcacacactgctgctccccaccgcgatcggaaggaaacaaaggctgctggcacaactgattttggatccttcataatctttccacgttcatcagtttcctaaatatcatttataagaagttaatccggtggtttatggtactggggaaatccttttaacatgtgaaacacaacattcaacttatacagtgctaattactaataaaagctaacacatatttgccaatattgatggatgcaaagacaagaaagaaagacactatttgcttcagtaaaatagcaagaagctttacttttgttaagacactatatgaagtcaactgtagtattttgaaataacactagactcaaagcagaataatgcattaggaggcacagcacaaagatattatgacttacttccttttctatcctctcaatttcagatgtgtagtattcaatagcatccacctttgaaccaaaacatccaagaaaaccagtctggaaaagaagtatagaaaaataagaagaataaataaggaatcataaataaaaattattcttttttgttttgataaaaacaacaagaactgtgtaagagaagtaaagagattaacatgatcaaatttagcaacaacctttgtagtaggcctttgagatgtatttctttcatatttcagctgatagtaatcaagccaattctgcattttcttcttctctttgaccatcttatcaagcttatttgcattatagacaacctataccagtccatgaaatgaatgataagaacatggtagtggtaagccatatcagagcatagattttttttttttagtaacgataagcagttaaaactaaggaatcaaacagaactacatttgattgcagaaagataaaaaggaaaggcatatatgaaagaagttaatggcatataactattcacatgacttcgctatgaactttgaactgaccagacagaaagatccagtgaagcataaataccagactgtaaaatataaatattacctggtgcgtaagataatggtcaggatggtttacaaggaagaaatgttccacaagctcaccaattgattcatcaggatcaggcggtatattccgcacaaggacctaaaaatcaacattggtcaattagtatatcattgctcttcagtcataatcagttacaaaatcttccttcaccagaggctttccaattttaaagatgagttctcccaccaacctatcttggttagccacattcagcttagttaaatatctggatagaaccaggtacttgcaagttcaaaagtcacattaaaaattatacccagttggcagttgaaactattggtgccctaactaattcgtcttttcttttggatagaaatccatttcttagagcatctataagaataaacagtgcaaacatacctaacaattttcattttacagaatgagcagtatacagcaagcattcaataatgatacttttatggttttgatgtcaacaactcaatgtccataacatttcaagaatagtggttttcatgattatcttttttatcagctgatattttacattattcaagttcccacgtagtccctcaatcactatccatgaggtgaagcttttttgtcttccatagatgtgtaaaaagacttaagtggcattattagattcattgtgaaatgaacactgttagtgacatgacatgctatgaactaagtagaattggaaggcacattagaaagaaaatatcaagtaatataaattgaactgccaaatgcatagagttcacaagatcataccgtgaactgatctgggcggcgcttctctgatgcaagaaagcgcagacgcattgttgccactatttcatactcccgtaacagcacatagcatgtccaaaatgtgaaaacataagccatggtcaggtgagctgcgaacctgcattaaaaaaaagtcacaggcatagtgaacactaaaacaatagtttcagagttgatgaacagggtatcctgcaagactaatgtgctgcctggaaggctaatatcaactataaccactcacctacttatctatggcaagatcaaacctttgcgactatttgtctaattactattacaaagtatcacaccaaactgacacaacaagctaggttaaaattaatggccttcagaattgcacaccccacacatgcaagctactaccgtttctgactcccagctcatgtattatcacagaggctgggtggttgttcatactgcatggtcatctctatacatcttcggatcttcatgactttcctaagcccaaatggggaaagaaagtaagagcaatcatcattccacttaccatttgaaccaaccccatactcactatcttaaattgtgtttgaagtaatctatcaggcatgcccatattttagccaaagatggtacacaacattaacagtaatatgtaggtatattactatattttaagacagaaaaattatctggtactaacctctttgaccctacaggtatgttggatattgaaagtttgtcaatatcactgtgctgcaccttcgagctttgaagggtaatattggtccaattaacaggcacaagaataataaatgctagaactgtgattggagcaaatattttaagcctgcaacagttaatagtaaaggagattagtgtaaaagtattggcagagaaaagtaacagagatgggagatacccagtggataaaacagaaacattcaacaaaacaacattttcggtactagaagtacacttctacatatgtaagaaatggagaaatagcaacgatttagaatccataaaaatataagacaattaaaatgaatagtatgtaaatattagaatatggtccaacactaaagcccttcccttctgtcaagaagaaaacctgaaagctaaacccccccccccccctcccttaaatatatgtctgacctaaagtataattgacgacttaaaaagttagcagaatttatgaatataaattgcataccctattaagtagatccgcagatagacagctgaatcaaggcctgcatggctaattaactcatcctctggcattttgagagcagcaggcatccaacttaagaccttcaagtatgatcgcatgtccaaattgacaaacttccgcacaaatgcacccccatgacttggactctctcttgcacctttgagataccactttgggaagtaaaccctatcgttgatgggctgtagtcgcaggaaagcaaacgctagcaggaaagtgatggcactcagtatgttgatagctgcagagacacctatatcttgaatagtagccatatttgtccttcaaataacttgcgagaattactacagatgctagctgaaagatgtaagaaaacaatactacggttacagggaacaaacttttatgttaaacaaactataaaattagtgaacaaaatagcaaaacaatgtgacatgttgagtggggaacacaaccacacaatgtaaagaggggtatagccaccaatcttggaaatttcatatcatacattaagttctagtttgattcatagtatgattcccatataagcacaggcttgaatcgaggtttaactccacaattatgttcaacccttttagcaccaagatcatgtaaaataggtatgtaattccaagatatgttttgtttgaatccattatcctatatcaatggtgactgcctcaattgttttcttcagcacaaaggtatgttttgtgtgaattccagtatcgcatcaataacggcagaccaaattgattttttttagcacaaagacaacaagcagatctaacagatgaaaatgcccatttaaaaatactgattcaggggttaatattgtcaagaggatcgcaagacattgataagatactttcagagtttcgcatggtataacgtacattaactcgagcataggtgcagcaatcctatctgactgacagctacagaaaggaagtaaatgttgattttattcctaaaattatatttgacaaccagaagagaaaccactaatattcccatcatatcagctctgcgatgctcaatggattaggctgatacgaactttggacctccagcattttttttaaaaaagaactatatgagctgcaacaggactggaattatggatggttagatataatccaacagtccttataattagtattattgtagcacatgtgcgagtaagaaaacaaaatttggttttaggtgcagaatatcagccgtgtgatcgggacaggccaaaagatcacaacttgggtataaattcattgaattgaaaaaacgtccgcttgaagcctaaagctttcctaaaaacaaaatcttgaaacgccagcctagaaaagtaatttaaatttaaaaacggcaggcatttaaaggtagcattaagcaggcaggtttcttactaactttaatttgccaactggacgaaaaaaatcataagatcattactactagtagtataatggtagccaaagccatatcttctaccattatttaatttgtgaaattgacagcgaaaaagcaaaagaaaattgcggtggaagccaaagccagttcatctggtagtagtactattttgtgctaacagttgggatttagcacatgaacagttaaacaagaaagacaataatcttagattagttgcggtaatagtactctactttgtcatatcagaaaataaaagaactctactcctactactttgcagcagagtcccaaaggggagagcttttccgagtggcatacagcaaaatttccctattttgtttgcaaaaacaaaacaaaaaagattcgtttcccccataaaaatcggaaggacaccaacaaaatgtttctcttcttggactcccccgtaagaatagctgaaaaaaagttttaagacaacagaagtaaagcaaagtcgtatagcgctatagccgcatggtcacccatggaggaaacggattgaaacaatcaccaaaacatccaaatgcatcggagacggggggagacaaaatttgaaagggaggaagcacccggagaccccagatctgaccagcaacaggaagcgaagaacaggagcagagagaatcgcagggagagcggagggcggggaaggagacaacaaacccaagaacgaacgaaaccccgaaacccacctcgaagaacagcaaaccaccaccctagccgccgccgccgctacacatccccctccgaaatgcc

SEQ ID NO: 11202 - DNA, 7342 bp, Oryza sativa
atcatccacatatacaccaaccacaagtcgtgagttcttctctccttgaatatacacagcactttcgacaccactcttgacaaaattcaggctcacaagactagaatccaatttggcataccatgcacgtggtgcttgttttagtccatatagggccttcttcagtttcaacaccttgtcttcttttccatcaacaacaaaaccaggtggttgaaccacataaacatctttttccaattccctattcaagaaagctgatttcacatccatgtgatgaacttcccatccctgatgagcagccattgcaatcagcaatcgcacagtctccatcctcgccactggggcaaacacttcatcaaaatcaactccatgttgttggacatatccctttgccaccaatcgagctttgtacttcacaatggcatctttggcatcacgtttgattttataaacccactccaaccctattgctctgtggctagagggcaaatcacagagaaaccaagtgttgttaccttcaattgagtccatctcttcaagcatggccttcctccagcagctctcctgctcagcctccaagaaatttgctggttcctctgctgccataaggcattgatcactgtaatcaaaatcaaggattggagctgtagtggcaagcgtgtttgccactgttctgtacctcctgggcccttcattagtcccttcactagcatcagttggagaggaacagaattcaacaccagatggcagagttattgcagttccggtgcttgatgttggtgatgttgctagcatggtaggagtgactgctgcatcctgggcatgtgtctcacccccttggactgggactgtgaaattctccaccgtaaactccacataggcatcctgatctccttcttcatcagtgttgctgccccagtcccagaacgtcgtcccatcaaaaatgacgtcgcgcgacacacacaggcgtcgcgccacaggatcatacatcctgtaggcttttgatccttgctcgtagccaatgaagaccatcctcgtgccatgatcatcaagctttctcaagtttggcttggccgtcttaacatagcccacacacccaaacacacgcaggtgttcgacagtgggtcggcgaccatgccacgcttcatacggcgtcaccccatcaagactcttcgttggtgatctgttcaggacgtagacggctgcaaccaccacctctccccagaaatatgccggcatgtttgccgccttcagcatggacctcgccgctgccaccacagtctggttgcgccgctccactacgccgttctgctgcggtgagtagggtgcagtgagttgacgcttcacccctgtatccgcgcagtactccatgaactctacagaggtgaattcacccccgcgatcgatgcgcagcgccatgagcttccgattgctctccttctccacgccggcttggaactgcttaatcgccgccgatgcttcgtgtttggcagagaggagtcgtatccacatgtgacgactcatgtcatcgaccaggagcaagaaatacttcttgccccccggcgtcgccggcgtgattggtccgcagaggtcaccgtgcaccagctcgagcgccgtctgtgccctgtactatgcctcctctgggaatggtgtgcgacgttgtttgcccgcgaggcacccgtcacacaactgatcattatgatcaatttgctggagcccgcggaccatgcctccttgtgccaacctccgaagtgcctgaaaattcagatggccaaatcgtgcatgccatcgccatgctagctcggagccgttcgccgccatatagattggtgtcgcaagattaaacttgagaacatacaggtaacttgaatcacgatttaccttagctagcagcatcccttccgggtaacgcaacgtgaaaacaccatgccaaatgtgtgcgtcgtagccgcgcgcgtcgaggcgaccaacactgacgatgttttttctcagcttggggatgtagtacactgcctccagtgagcggtgatcaccattcttgcactgaaacaccacagttccgtgcccctggatgtcaatcaccgagccatcgccgaatttaaccgtgcccacaacaccagtgtcaagctccgcgaacgccgagcgtgcgcccgtcatgtgattcgtggccccggtgtccaggaaccactctgaagtcttctcctcctcacgcccatcctcgcggtcaagcacaaccttcttctccgtgagatgcacttcctgcacacaaggtgttcgaccaatggccgcttcgccggcgagcgacacccccatcacgtgtgccatgagcagagttggttcttcctcagcctggaccagattcgcattcgcctctccccgacgttggcgacgcggcttacggcactgcttcgagtaatgaccgtattcatcgcaattgaaacacttcaccttagagatgtcacgacggccatggccgccggtggccatcttctttcccttcggtgaatcgccggccttacctcgacggttctggttgctagagcccgcccggcccttgttgctgctgctggatccctcctgctcccgctgcttgacacgggcctgccactgctcctcagtgaggtacaatttgctgccatcacttgcctcctcgtcatcactgtaagagtcgaccgtcgacagccgcccgacgagctcctccagggccatggtcttcacgtcgaggagctgctcgagggaaatcgccaccggcttgtacttcttggggacaacacgcagcagcttcttgttgatgtgttcgtcttccatgactccgcccatgtcgcgaatgtccgcaacgacggcagtgagccgcattgcaaattcctctggcgtctccccgtccttgaagcgcatcgcctcgaactgacggcggaatccctgctccttcgcctcacgcacgcggtcgacactgacccgcatggttttaatggcatcccacgtcgccttcgccgaattgtgcttcgccaggccacgcaacatctcacgcggcacagcttggagaatcgccgagagcgctgcacgatcctcgcggtactccgcgtagccaggatcgatggccgtccagagcccctgcgcctgcaggtttacgcgcatcaacagtgcccagtccggataatttgtcctcgacaggatcgggagacgggcagtgtgcccagcatctctcccctgaggcactagcgggagtgatgcgccgtctgcgcaattccccacgccgctgccgctcgcgctgccgcggccgttgccgcttcccccgccgccgccaccaccacggcggccaggcggtgtgtatgacatcaccggatcgtctcagcaaagctctgataccaaatgtcagaaaactcatgcgaactggctctcaatctcacagaacacacacactgacgcttgcaggtgcagctacagttaactgaacaatttttcagtaaaacagagcagaacagaacaactgacgaacagagttttcgctgcgtaatgccgtgcagcttttccggttttctcttctatttattcatctccacacggagtttgttgcatgcataacagaatcacgacaatctcggatcaactactcaccgcgccatcccacgatccgagccgagtcatcgcagctaaagaatgaagcaaatatgctaaaacagaaaatgctattctaccggccagaattcagactccaaccgaactctacatgcaacaaaacaaaacagaatataaatgctcaagattacaatccaacagttactactgatgaacactcctgactagtccacaaggtagcacgagaaatatcgctgctgatcaatagacagtaggcacatctcgatcaggcctggttctttcttaaatcagtaagaaaatcatcagggtcttccgactagctttatagggcggtgggttggcccgcctgggttagaagcctcacaatttctatttatttgatattagaccattttctaatattcgtgttttttttctttgttcaatcaatggaaattcaacctgtagcttcttttaatttctaatgccagcagaaaaaatatggatcaagacaacttaggggttgtgagttagcatagggccgggatagtacattatacagtagacaccttagctgctcctaatccagtacattcttttccaggtcatgggaacgaaagggaccagaaatacagatcaccggccggtccttggacaccttcatggcaagagcactagttttggccatgcagtggctggttggctgcagtagggccgatgaggataatatgctgatggacagcgaaactgtagaatacaactgtgtatagcatgttttttggacgagcaactgtatagatgttgtctctgtggctgtcgaaatcttcccgctggcttcgtgaaatgtttcctcattgcgaaatgttttctcatccagattcagatttcgggaagggacgtgtattagggatcttcgagggggggggggggatcatgcatttcgtgcaattgatattaattcttgatgtctgtaggaatttccttgtcaaaaatgttagtaaatctggtcatctgtttaagtggaagtaaattttaactttcatactataaactgtataaggtacaagtggccagagttaattttgaattttagaattattaaaatagaagaaaaaactaaaatggaaaccgtacaacttatatatatagctgtctagcatagcatgttttccatggcctcaaggaaattagaatatgtattctgtctattgccgaaccaaatgaatgaacaatttgtaggtttggggggcaccaggagttcatgtcccacagcaccacttttgcagtggatgacaaatgacaattcactccttgattctgtaaaagttcatcggtgtgccactcaattgctccgtcgttccgaggacatcttgatccgtcagatgcatattgcatcatgagctccggcgagcagatgattaaagtatcatatttcataagatagttttacttagccatccattggaatgtgttacgtttcatgctcgtgaaatcaagctcataagtaagaagcttagccccaatgcatggctcccaagtcatgaaaacttattatatataatcagaaaacgaagcgatccccgtccttccattatacgttcgaaatgtctactgctggaattttacgtacataacagtgtatatgtcttttctcattacaaagacatgtcagtgcacacatccgccttctgtagttgaaggctatcaagctcttactacgtcattgcacgcaagaaaaaagatgatatagtatagtttgacaagttacagtgccactatatcagtccatgacattatatttatcttctatctatctatcttctatctatctatctatctatcttctattatatactaaaagtccattaaactttctataaacgctctcaagccgccacgtggcacttctacaacgctcctagatcgccacgtggcaatgtctaatcacaccgtcaattttcacttaaatcggtggacccaataatttggaccattagattagattacatgtattatatatttaaaaagaaacaaataccttactgttcaccagaaaaaagaaaacaaaagcatatgtactccatatatccatatataggtacgtacgtagtatgcaaagactaaaaaataatcaataatcttacctactgttcattgtaaggaaaaaaaatacacacagacttactataaaaaaacaatagagccaaaaaaaaaaacgtacgtacgtactaccaataaaaattgattatttttaagatagatttttttcgactatttaaagataaaacctattactctataaatttaagcaaatatagctatagattttgacttaaatgggtgaatctaatattttaaaccattaaattagatgtatattattttaaaaactaataccttattactctgtgtacataaacgggagaaatatataactgttaggctagaaaaagaaagaaaacacataatctcatcgtcgttttcacttaaataagtggacctaataatttagaccattcgattagattagatgtattttatttaaaaataaactaataccttactgttcaccagaaaaagaaaacaaaaacaaaagtatatactccatataggtacgtacatacataagactaaaaaacaatcaatcttacctattgtttattaaaaaaaactacgcacagctatagaaaacaataaagctaaaaaaaatatacatacatagtaccattaaaaaaatcaattatcttttaaaatggagttttctactatttaaatataaaatctattactctataaatttaagcaaatatcaccgtcgattttcacttaaatctggtaacccaatatttttagaccattagattagatgtattttattttaaaaacaccatataactctgtgtatgtatacgggaaatataagtagtcagtacgtgcatatgacctgggaaaagaaaagaagtttacctactgtccttcaatatctactcacggtggttttctgaaatagtattttcaaaatcacttactataaaaacaataaaaaaatatgtatcattggaaaaagatcgatggtcttttgaaatagtattatctactatttaaagataaatatattgctctacaaatttatgtaaatatacgtagttaaactaaatttatattataaatatgaaatatcccatcaatgatctttattcgttctatcttaacatacaagactaatgtatataataattaatgctatgatatttttttgtcaaatatcacttgacgaatatacaacgctaatttaaatcaatatttgtaaaactgaaaacaacacaatttagttgtttcattttacaccattagattagatttattattgacaaataatacaattctcctatatacggatacatgaaaaatatataactgttgaccggaaaaagtactccgtacatagagatgattgaaagaaaacaataatgcttacatatcgtctgacggaagggaaaaaaaagtacttatgataaagtaaaacaatcggaagtctttaaaaaagatttttctacaatttagggataatacccctaaaaaacaatttaaggataaaatataataatcttcaaatttacacaaatgtaaatttaaaatatccaatcaatgattttaagcgttctatcttttaaatttttttaaaattatttatccaatttgtgattcagtagtattcctttaaataaataaactattactccctcattccctaaatgtttgacgc

SEQ ID NO: 11203 - DNA, 5198 bp, Oryza sativa
ttatgataataatttcacatcacattttagtgtaagaaaccacttgacgaatatataatgctaatttaagtgtacatatgtcttatccaaattactaaaggtgtctcatgtgattagaacaataggggctgaaaacaaaacagacactgaactaacatgcactaccctatagatatttgtcaaagtatgataccgtactttggattatcgtgatagtattttaaaaaaatcactttctctcagttacatataaattcttctattattttggaataaaagttaactccttccatttatgtgacggtggtaatataagtaatataagtctatgtttgattagatgaagtagtatcattagctatatttttaatagtaaatatctttcattaatatatagtaaaattaaaatgttacttaaagtcatctataacatacacaataaaaaaagttatataaagttgggaaactctagaaattttaaaaaaagaatcacacataacacaaatagatatgaactaattctattattgtgacatattttttctaataaatttgaggatatacattttcaagtaatacgcccaaaccaattattaacgaacatacgttttaaatagagtcaaaaaaatatttcaaaaatatgatccacacataaagattcgtaataaaagttcaaacaatattaaacaacatgcccgcgcattgcgcgggctaccttctaccttctggttcaacaaaaaagacagcgtgtgttaagaacttcctgtaaaaagagatacatgaaggctgcagattcagcgattattatgcttgcatatgaccctacacggctagcgcagtcttcgttctttgcttgcggctagcgattttatctgtgggactgagagtaatctggaaatcaggtgtcgatgctacacgctgagacagtataggagtatccatttcgatatgccatgcatgcaaattcagcaccatatcctactctcggacaccaacgactgtaagcagcagaacaacgagaggggacttcttcgcaacaagatcgtaaggctcgttagagttccgcgcggccatgctcatcagctgaaggatgcaggatatatatggcaaattatttgaggtgttttggtcattttggtttttgagccatgtcaaatcaacatcaccttaacgcatcgatccaccatcaaattatttgagagtatatatgtgacgttctctttcaattgataagaggtaccaaacatttttaataaaaatcttttggctcctctccgtgtcttgctagtgctcgatcggatactgggagttatgcatgatgcagaagctgggatttttattccattatctgaaaacgataccgggagttatcgctaccactgtttttttaattaaattactgtaggagattatcgctagcagtattaagcaccgaaacttgatggtggataccgtgaaaggtacagtggtacgggttaattggatccataccactataattgtggcaaatcagaaaaataccactactatttgtgttatcggctgggtaccactgaaaatttctaaaattaaaatcatgccactcccttcactctttccgtcctcctctctcatcgtcagtagcagaggggtgcggggagcgggcgcggccgcggccgccgccggcgaggacggtcgaggaggggcgaggatatggcggaagagctcattgacgacggggaaggagataccatggccgccttgccttctccccgtcctctcgctactcgccggcgccgcctcatcctcgccgctcaccggcgctgcttcgccttatccccgtgccgaagtgagagaggaggatgacgatgtgagggaggatgacgatgtgagagaggaggacggaaataatgatgggagtggtatagttccaattttagaaattttcaatggtacacatccaataacgcgaatagtagtaatatttttctgatttgctatgtttacagtgtcatggacccaattaaccctacttcgaaaccgactctcttagtacgtacttggtcaatcttaaccatctgtaaccaagtgcccttgttaggtagagcaatttatcaccacacgcacatacacgtcatctgtctattgaattacattgtagatagttcttggaatgaataattagtgaacatgactctgtttgttcatctttgactttctcccaaaagccggatcaatgcaatttgatctgtcctaaaaaaataataattagtgagcacggatagatacaacccaacatcaacttggctttaaaatgacagtagcacgaaccaaagtcttcctgtgagagctatagcagaagggagagcagatagtagccaagtcacgagttaaagggcgtgcaagcctgcagagcacctgctacacgatatgcacacatgatctcctgcaccggtgttcgtttccagatgatgggcatgggaggcaccgggaatgaactcccctccttttgcttgtgaccctgctcacacaaacagtgttgttcgccccgattcatcagctgcagcagggtcgatgactcgatgcacacggtcacaaactcacagactcgcagacaacaatttcatctaagcttggggatttgttcctgcgggctcacagtagcagggtgtccctttctacgtgcaaagcttgctaattctgtacgatgtatttctcttcaccacgaacatggcatttgcagcgcgttcgtccgatcgggaaggaaacgtgcctcgccctgcttgtgagctgtgaaccgggagcgacaaatatttttattctccatatacccttctctattaaactatatcatccttttaatttatactccctccgtattttaatgtatgatgccgttgcacgatctatcacaaaactacaggtttaagaatatgtttcacaaaactacagtttcagtgtattcgtttatcataaaactacagttcacaaaacttcatatttaaaaacttgtttaacaaaacaacagatttaatatcttcatttatcacaaaacaacatgtttaatgttttcattatcacaaaactacaggttttaacattgttaaaacctgtattttttatgataatggagatactaaatctatagttttgtgataaataaagacactaaatgtgtagttctaggataaatgaatacactaaatctatagttttgtgaaacaaattcttaaatatataattttgtgaaacaaattcttaaatatatagttttgtgaaacaaattcttaaatatatagttttgtgatagattttgcaaagtacatgtagttttaggatatatagagacactaaatatttagttttgtgaaacaaactcttaaatctgtaattttgtgattacttatgctaaatacctgtagttttgtgaaatttactctaaaatttataaaatgcatgttgttttaccttttttttcatttatcctatatatatctataaagtttatccccactaagtgcaattaatactaattctctcttatctcatgaagccatattatctcaattatttttagcctttggatgattcatcaatggtgtaaattgcatctcttccccctcaaaaggtacaccaaacaattcaatcatttatccacatttataaatgaggtatagctattttgtcattgtatggctatttggtactcctagacagtaccttatctaccacttcaaactgaaggaagaatttaatattagctagtagtatgataaactgcagcctaaagatatgtgtaattgttgtgcttgctcgaagtgagagaatgaaccagttaaggaaggatatattcatgtccgatggagttgtgtgccatgtgttacctctatgaggattgggacatgcgcgagacttcagggtcagacgagttttggctactaattgaacaaatctttatatactcctcatgatccaccctagatgcatatacaggggaacatcttttacatattttctttatcgttaggggtagcaggcgtcgggaagtgatctggttatgaaatggtatggtgccaaccagtagaacatgaatattctcctgaaaagataaaatgattcctgatgaagatcctctaacttacttccctgtaacttgtatcactgacatgtgggtctctatccaatgggccgggacatgtcagtgccttaaagctagaagaaagtaagtcagaggatcctcttccaaggactccagttgcaatagtctgccctctaacactccaataaaattttgaacatccaattcatatagcgattttaataaattcttagcaaaattttgagggtgatggaaagcatagcaatcttggacatcgaagtctcgtagcaggcaaggccgtccttcatttttgaggggattgaaaccaaacggggaattttggaatatccaaaactattttctccttttgtacgaacgaagagagaatgcttcggccaacccggctataaatatatggggaatatgcttaaactgtgatagcctattatcgtcggagacagctcaaaattggcaatatagtagttgaaaatggttaaaggagcgtcatctatgatgatcttgcactgtaacacacatagggtgcaagccggacggccaagctgggttttttttcgcttatccacttctagttttttttttctaaaatttatactaccatgcatataaaaaataacctaccaagtaggattttatgtgggtaatgggcttgctcacttacatccctaaagacacacgcatcaaagtggtccatatatacattcgcctgtattcttgaatggcctctagttaatataatggtgaagcagaccagctgggtgtagctgcgtggttgcagtgttactataaaccaccaagtacaaaaccttatatatgtagtagctagcatgcccgatcacaggagcacacacaacacagtccaatccgacgacctaagttcgaatccccaccccttctaattatttgatattaggttcttccctaatattcgagtcttttttttactgctagaaaaaaattccacctgctctatgcatgttcaagtaatccatatcctcgatcgctctgctacaacaaattaaccaactagacatatgtttgatgttccagttcgatcgcaggcatgggcggcaccggggatccctctcgctcgatctccgga

SEQ ID NO: 11204 - DNA, 1267 bp, Oryza sativa
cagttagagcccgtcacaggtgagtttgcctacagcaattttattttattttatttcacttagttcttttattttccttaacatatttccacatacactatatatttttgttatacttaattattttatttcactaacagtagtaattgcacttcattattttactaattctattattttatttccaatggttatactaatttaattattttatttcacttctagtgggtgcttaacttaattattttatttaactatttcatcagcaatatactattgattatttcgaacatattagagtcatacagataacagacatgtagacataaactacgtacataaattacaaaaataatccttcctcatggtcgacgcgtgcatattgaacgtcatcttcttcttcctcctcttctagaggtatttcttgacctatgccatggacgtgctggttgtaatcatcctcgtctataatattgtctaatccaacaattctccttttctcttcacgaacaacatgtagtttcttgttacacgagtcaactatgtagaacacttgaacaacttgtttggagagaacgaacggttcatccttgtacgcgttgttagccaagttaacagtggtgaaacctttcttgtcaacttttacattgcgaagatctacccatcgataacgaaacaacgggactttgaacttcaagtaatctagctccaatatttgctcaactctaccatagtattgatcacgacgaccaccgtcactagcagcctcgatgcgtaacccactgttctgcactatatatttgctgtcttgctttaccgtgtgaaaggtgtatccatttatgtcatatccttgccaggtggtggcactccattcaggaccctgtgacaaccactgaagtgtttcactagacaagttctgcaacctagcaattcggttcttcagccactcgttgaaagaagacatgtgcttatttctgacccaactctctgattggcctgggttctcctgtcggagaactgcaaggtgttcgtcaacgtacggcaccacctcagtcatatgctacagtaccatgaaatgagctttatcgtacaccttccgatccaacctaacagtctttcttccaatagtaccaacaccatcaagcctcccttcgtgatgagatagtggtaatccaattgaagatatttctgacatgtagtccacacaaaaatcgatgacctcttcggtggtgtaactctcgatgatactcccctcgggatgtgaacg

SEQ ID NO: 11205 - DNA, 1455 bp, Oryza sativa
agatcccggtgatctttagccccggttggtgctaccaaccgggactaaagtcccacccctatatatatgtcttcttcctcctccagctgcccgagcaagcttcaaaatttcttcaaaaaagaggggaggtcatgccaaaatttctattaaatttattttggtgattacatacaaatcggaggtgcctaaaaggtttgcaacttcatcctccaatgttttttttgtcatactacatttgcacctatgttttgcacactttttttgtctccaaaatttagttgtaagttgatgagagagaaaatgtgtgtggggaagaaagaatatatagagatttagttcatttgctaaacaaggttttataaaatagttgagaaggaaaactctagtgaaagttaatcttaaataatagaaaacaaactaaaataaaaattaaaagaagtaaaacacattaaaattagtttaaaactttacaaatagtttttaagaattatttggtgtaatattttatgatttttgtatgaataaagatatcttataattattgtatgactgtcattattgtaagaataattatttgtgtacggttttttttgactcatgtagatggatcggcaatggatgtacgctgaccggcggtccaaagagtttattgacggcgtgcactattttttgagagtggccgaagctaacaggcaaaggggttttatttgttgtccatgcaataagtgtaagaatcagaaggagtatgctgcatccaggactattcatttccacttgtttgagtcggggttcatgccaagctataattgttggacatcccacggagagcaaggtgttgaaatagaagaagatgaagtggaagacgacaatattccggactttgctcagtatgttggatttgaaggaaatcaaacgggcgaggaggaaatagctgctgatggtaacgacgttgcggatgatcttggtcagatgttgcaggacgccagggaggactgcgaaagtgaaaaggaggcccataaattggacaagatgttggaggaccacagaacttcgttgtacccaggttgcgagcaggggcacaaaaagttggataccactctggagttgttgcaatggaaggcaaaaaatggggttagtgacaaggcatttggcgatttattgaaactcgtcaagaacattcttccggggggaaacaaattgcccgagacaacgtacgaggctaagaagatagtctgcccgttaggactggaagttcataagattcacgcatgtccgaacgactgtatcctatatcgcggtgaggagtatgagaacctagaagcatgccctgtttgcaaagcactacgatacaagattagacgggacgatccaggagaatttgacgggcagctaacaaagaagagaattcctgctaaggtgatgtggtatttccctataataccacggctaaggcgt

SEQ ID NO: 11206 - DNA, 1520 bp, Oryza sativa
atcccatcttgattattcatatcccactacatgtttcatagcatacccgagaactacttttataactacccaattatggagtagcgtttagcagtccctaagtaagctactacacatgttgagaaccatgataatctcaggtctaaggattcaatagcaacactcaatgagatcactgatgacacaacacatatggctcttgcagtgtctcatgttgggtctatctaacaacatgttcaccaacatgtgtccacattattaatttggtatctctataccatgatcaattaatacatgtgctgatcatataaacatatttgttccacatatgatatttgatcagggatcctttagaaatagtaacaaacaacataaagagtctcatgaaagaatcacatattcattaaccaataaggagttatctatttcaaggaacaatgtcggataaatatgtaaacatagtatgtgatacaatcatctctatgattgcctctagggcatatcactaacagtctcccacttgcactagagtcaatcatgaatgtatattacacccattgccctagtttgtgcctcatgcttaggctgagggagtggctttgtcaacggatctgcaacattcaaatccgtatgtattttgtgtatcttcacatctcctctacccactatctcgcgaatgaggtgataccgccgtaaaatgtgtttggacttttgatgcgatctaggcccttggcttgcgcaatggcaccactattatcgcaatagaggtccatagggctagaagcactagtcatcacacctagttgagaaacgaatttctttatccaaacaacctcctttgctgcttcagaagcggcaatgtattcggcttctgttgtagaatcagccactgtatcttgcttggaactcttccaactcacagcgcctctattcaggcagaacacaaatccagactgcgatctaaaatcatctttgtcggtttggaagcttgcgtcagtgtaaccatttacaacgagctcttcctatcctccatagactaggaacatatccttagttcttctcaaatacttcaggatattttttacagttatctagtgactctcacctggatctgattggtatcggcttgttgcactaagtgcatatgaaacatttggacgtgtacatagcatagcatacataatggatccgattgccgaggcatatgggatcacactcatcttgtttcactcatcagtcgtctgaggacactgattcttgccaagattaatgccatgtgacatcggtaagaaacctttcttagaatcttgcatgttgaacctcttcaacaccttgtcaatgtatgtactctggcttaatccaattagcctctttgatttatctctatagatccttatgcccagaatatatactacttcccctaagtccttcattgaaaaactatttttcaacgatgtcttaacggattcaagcataggaatatcattcccaatcaataatatgtcatctacatataggat

SEQ ID NO: 11207 - DNA, 2862 bp, Oryza sativa
gttgtgcctcggggtatattcatgtcggcgaggaccttgttaacactttcttccacctagcgttcatgctagcttctagttcttgaatgacctcaaccttaagttcggccttcaaacgagcgtccctctcttccttggggactttccgtttcctgtattgggagctgtaccgtgggagtccatgcttccagggcacatcgctaccaattcccctagtccggccaggatgttctttggttccgagtgccttggtgaggatgtcatcttcgcgcctcttcggcgcggactcaacctcgctttgtgaagcttgttcagcaaccaagcccaactagaaaaaaaacagttatttatacgaacttctactttatacgaatggaaattagttaggttaagtagtgaactcaccagttcctgatagacgacggcatcacttttgttctcaaatgtgacagagccgtccgggttgaccttacccctagcccgcgcccagttgcgagttctttgttcagggatgtctgaaaacgggacagggacattcgctgctgcagcggctgcatcttcttggacccatattgcctccttgccaatgtaccctgtggtgcccagccgatgtgggtgctcattccgctgttgcagtaggcgatgtgcctcgcttgattccctaaactcttgggtgttcttgagagaaaagaattcctcccacaccgcttcggttatttgagggtattcatcgaatggcatatgattgccgggcgggttgacaaactcggtgaagagcttcgacttccaattcttccaagctttgcccatcttctggaatgtcttccgcttgagcctatcctttgcttcagccggaaatgtgaaccatttctccattgccgtccaagctcgctctttctcggcttctgtgaccttgccgatatctttatggaggatcccgaagttctcacgtgccaccagcccgcagtagttagaccatcttccaatgacagtcctgggcaccgtgggcctaccactagcgtcaacctctcttataacttgcactgtggtcggccatatattttgtgaccggggatttctactcgacctacttgcacttgtcccgcccgacatcgatgtatgttgttcctgcggcaattttgcagcacaaacagaaggcaacatatgctaaggggtgctagctaaaatttatgtggtcatgtgatgaaaatttatcctataaattaccatgaatttcgggttgttcgaccaccgttgtcgagggatgaccttcggcaactgcctccgcggctgggtttgcttcttcctgtatcctcacaggtgttggggagggcgggtttgtgccgggcgttgtcatggtctaattttcgcgaaaaagcttataaatttcctactattatactaaatagcattagatccaatgtaatacggggtatactatgaaatatatggccttagttttgcttagaaattatgcatcaattaccatcatttgcatgaagggaaaaaaagaggaaatcataacatcaaaatctgttcttatgcataaaaaaaacaagtgtatatagtctcctcttatcaatctagaaaaaagaacaagtgtagaaaatctgttcttatgcataaaaaaagaacaattgtagatactttgttcttatctataaagaacaagtgtagaggtatataaccactgaatcaatcatgcaaatttaaaaaatagcagcagcaagggtacagatagaatgttattgacataaaacagtagcagcaggagtatatatgccacaggggcagcaacagcagggggaaattcacataaaacagcagggtgaacaagtagccacagtaagaccagtagcagggcaaagatagtccacaagggcagcaacaacaggggcaaattaactaaaacaacatgtctagatagtctcctcttatcaatccagaaaaaagaagaagtatagataaaaaaataaacaagtgtagttaatctattcttattgagcaattcatcactggccatttaacaaggaacacattgggcagcagcagcaggagcaaagatagtccacaggggtagcaacaacaggggcaaattaactaaaacaacatgtctagatagtctcctcatatcaatccagaaaaaagaacaagtatagataaaaaaaatgaacaagtgtagataatctgttcttattgagcaattcatcactggccatttaacaaggaacacagcagcaacagtagcaattgcagattaaaaaaaatgaacaagtagcccacaataacagcagtagcaggggtgtattaactggccatttatctagttaaaatcatgcaaaattcaaccaatgcaggaaaattaatcctaaaatcatctaatacaaaaagactaattcctctaatattgcatatatttcatccacaaatagtccaaattcatcatctcatatatttcacatctcaaatatgcatatatttcatcaaaaaaaagagacagtactactaacttcatctaaacagcaattcatccattcaattctagcaagtcatccatccaaactgcaattcatcaattcatcatctcactaggaggagggggcgtcgcacctggtcggcggtcgaggagaagaggtcggggaggcggcgtcttggcggccaatgttcgggtcgtggatcccggcgtcggggaggtcggggttggcggtggtcggcggtacagttgccggcgtcgtggatcccgacgtcgtcttgggaggtcggggacacggcgaggacgacggccttgatggtcggcggtgcaggccggtgtcgtggatcccggcgtcgggaaggtcggggtcggggtcggcggagagggcg

SEQ ID NO: 11208 - DNA, 2595 bp, Oryza sativa
cccaaccgggagtaaagatcttttcccgctatttcgaaattctttttaaacccggttagggttaagaaccgggactaaagattatagcactgcatatgattttcgcttacatatgtgtttataaaatagaagttaatgcattaacattatttaaagtacaaagattaatgacaattacttcgaaaaattatttttgtctgtaataaattaagtggataaatcgtaataagcaaatataattaataaaaattccaataatcatatatacttagcatatatatgaatgatattattatattggtaaaaactctaattaagatatgtatgtacatactgcatgatttaaaattaataaaaattgtaatcatcatatgtacttagcgtaggaattatattaaattaaatgctaaaaactctaattaacatatgtaaatgccacatgcatgatttaaaccttttaaaaattcgaatagtcatatataagtagcatatgaaagatagtaaattaaattgtgaaaaactctaatatatgaatgatagttttaaaaatatattaaatttaatacttttaaaaattctccagtcaattataattagcatatgaatgatagtaaattaaatgttaaaaactctaattaacatatgaaattgccacttgcgtgatttaaaacttttaaaaatcctctagtcaattataattagcatatgaatgctagtaaattaaatgttaaaaactctaattaacatacatatgaaattgccacctgtgtgatttaaaacttttaaaaattgtaagtatcacatataactagcatatacatgatttaaacttgttgaaacctctaataatcgtgcgtaattaacatatgccatacatcaattgatttatatggataatcaatacatccaaaatagtttacatcgtgtacacaataattacggcacgtactttctccccactattgttccctccttgtgatcgctgcgtgagtaaggggtgtcttcatttgataggaggatgctagggtcaatcgtcaccgtgaaagggggttgcccatccaactgatcgtaatcctcgtcagtcttgtcctcaactccgacgatttttcttttgcctgggagaaccacttgacgcttaggctcatcaggccctctgcccttctttcctttgctagacatgtccttcacgaaaaagacttgcgttacatcattggcaaggacaaaaggttcgtccgagtatccaaccttgttaaggtcaacagttgtcattccactgtcatcaatcattacgcctccaccagtcaacctaacccattggcaccggaacagaggaaccttgagaggaccatagtcaagttcccatatgtcctcgatggcaccgtaatacgtggcagttgttccatcatgtcccatggcatcgacacgaacagcgctgttttggttcgtgctcttcatgtcttgggctctcgtgtagaatgtgtacccattgatctcatatccctggaatgtcgcgatcgacccagacggtcccctcgccaggaaggcaagttgttggttgatcgactcgttacccatgagatgttgtcgtagccacgcgggaaaagtatcaatgtgatgccgtgtaatccatgcatcggacttaccgatgttcctggcgcgaactagagccaagtgctcctcgatgtaaggagctaccaatgaagagtgttgcagaacagtgaaatgggctttacggaataaattgttgtctaccgtcgttattgctttccttccgagagttccctttccccgtagtctcccttcatggcgtgattcaggtaccccgattgggcgaaggtcttcgataaattctacgcaaaattcgatgacctcctctgttccataacccttggcgatgcttgcctctcgacgagcacggttacgaacatacttcttcagaacgcccatgtacctctcgaaaggaaacatgttgtgtaggtacataggcccgagaatacggatctctttcacaaggtgacaaagcagatgcgtcattatattgaaaaatgaaggtggaaatatcaactcaaaactgacgagacattgcaccacttcattctgaagggcttctaatctatccggatcgatgaccttctgcgaaattgcgttcatgaatgcacatagctttgttattgttgcccggacattgtctggaaggataccccttattacaactggtagcagttgtgtcatcaacacgtgacagtcatgagactttaggtttgtgaacttcttctccttcgtacttattattcgcttaatattcgtggagtatccagatggtacctttatgctctccaagcattcaaacatactttccttctctgccttgctaagagtgtagctggctggactcaagtaatggcttcctttctcctttggtttcgggtgaagatcgccgcgttgttccatatgcttcagatcattacgtgcttccagtgtatctttcgactttccgtatacacctaggaagccaagaaggtttacgcaaaggttcttagtgaggtgcatcacgtcgattgcgtggcgtacgtccaagaattcccaatatggtaa

SEQ ID NO: 11209 - DNA, 2340 bp, Oryza sativa
agcagcagtcgtcgcctctccgccaccaacatatcgctggcggcggagcagcagcagctcattttcgccaagaagcaggaggtgaagcacctcaagcaaacctccctctggtcctccaccttcgacgccgtcgtctcctcgctcgcgcgggccgcgttcaccatcctcgcgcgcatcaagctcgtcttcggcgccgcccacgatcaccgcccgacgacgacaccgctgcaccggagcctcaccctctcctccgccgtccacccgtcctccgtcgacgtgcaagtgcaaccgccggtgtcgcgcaagtccatgtccatggatatgggcatgggggaggcgctgtacttggagaggcagaggcagagcgggctgttggagcgcagcgcggcggcgctggtgccgccgccggggacgctgggcgcggccgcgttggcgccgcgctacgcctgggtgataatctcgatcgagaggatggcgcggtcgccgcggctggtgggggcggaggagcgggacgagctgtacggcatgctgacggcgagcgtgcgcgcgcagcttcaagcgaggctgagtgggacggtggcggcggcggagccggggctggcggggcaatggcgggcggcggtgggagggatcctggagtggctggccccgatggcgcacgcgacggtgcggtggcaggcggagcgaagcttggagcagcagaggaagacgacgagggagatggagactcagacgctggtggtgcagacgctgcaaatggcggagcgcgggaaggtggaggcggcggtggcggacctgctggtgggcctcaactacctctgccgctttcacaaggagatcaccacctgccgtacccgtacgtgccaccacgacgatgcaccatgacaacgtgcatgctgcttcaagacgacgatgtacgattgccaatggaacagtatgcatccatccatccacaccgatcgtctgatccatgctctcatcttctcttctttagtttttcttttgtttttttgggatggatcccaattcccaagtacccaattggctaatggagtaggagatgcatgggctggcatctgggtgatctccagtactagttaagtcgattgatgagaatggagttttctgataattggagcaggatggaatcttgcttcattatattcatgtacagatagcaaaccaccagcggtgagtgattacattaattaaccccctctctagttataccactatggaatatacacatctctcgagcaaaaagcaagtacacacccttatatattcactagcaaaatacccgtgcttcgttacggtgtattaaaactaaaaatatttgtttttaaccgaatttttttacactgctttggtacttttgctcgctagaaaaagtctcaaatgatagagggaagtatagctcataataaattattattcaatagtgcgttgctacggagtaatttcaattaaaatcacaataaatatttttaggatttaatttgtgatatgagtccttttagagtaaggcattcttgatataaatttgccaataaacaacatgttgaaaacaatatatttcaacatcaactaatgttttatcgcaattaaaaaaagactaacttcctcttgttgggtaattgtattttgtcaggtaatttttatttttagtttttctatgaaaattagattggagatatatttgagagagacaaagtggacttgttgctttaaaaaagactaaccataccaaatgtggcccaacaactcaatcgcacgctgttagtgcttcatgtgctgcgtgcggcccagtaatgctacaacgcagagatggaggccagctcgatgcgggattgatccgagccactcgttttgatggacggttcggatcggttcagaatccattaaaacggccggtaccaaaaccctaaccctatttcagtttttcctctcctaactcccgatcctctcaggctgaaatggtgatgacgcaccacgatggatgaaatctaattgttacgtttaaggcccccttctaaactccaactctaaacttcaacttttttgtttttcgttaacacgtttccaaactactaaacggtgttttttttttgaaaaataatatatataagttttttaaaaaattcaaaggaacccatttttcaaatttataataattaataattaattaatcatgtattaattgtttgctctgccttttttttaaaaaaaaatgcccatatgagcatgacggtggacacgagcggagagcgagagagcggcgcgcctcgttacttccgcacgcctcttttttctcttctccgcccgcctctatctcctcat

SEQ ID NO: 11210 - DNA, 5134 bp, Oryza sativa
cagaactagatatttgaattgatttacaaaaccaggcgcggagtttaatttatagtgtttcagagtctctcatctccttcctgttcatggcagggtatagttaactgaccatttttggccttactaaaaaacttggtagagccaaaaccttatcgagtttcggtagtactaaatttattatagtaaaacttgtactcgtgtatgtaaaatttgacgtcatacttcctattaaagttgctgaaaatatgataagataaaaatttgcttcgactcaaatagaggaggaaggaggaagtgcccaaatgtaactttgttttgggccttggaagctactacaggaaggaaggagagttattgggtggggctgggccgtcttaattacttagtagtggtggtgaactcctctcattggcgccccctcggagtccgtctcatcttctctatctacacttgtacacaacactagcaaaccgccatggcgccgccgccgccgtgttgtgtgctagtggtacgctgctgttccggatccctcccttcgccgccgccgccgccgccgcccagaccctctccctccaacaacctcagaatcgccagaaggttaggggtattggcctgcttccctcccttgttctctcttctctggggtggcctggactgattgatttgggatttgtatcttcttcttcttctctctgcgactgatgatgaaatgaagagagtttgtgctgaggagcagtgagctcgccacgctcgctgccatcttccacttgaggtaggtagctaggttaattaggttcccttcagattagttgcgatggttaattaaggtgttgaaccaccatgttcagcggcacgaagccaaggtacctgggcgtgcagaagagtcctccatcgctggctctgtgccctgccaccaacaattgcgtttccacttgtgaggacatcactgactccattcactacgctcccccatggtatatatgctctcttcttccctctcaacatgcattcatatactagtggagtatatgctactaattcattacttttaggaactataaccccaaggacggacgcagggctaaacccatcaccaaacatgaagccatcaaccagctcattcaagtcgtaagtcatccatctgcatttctcttcctttctttttttttctttttttgtttgtttccacgtacatctaatctaactagtaataaaaaatagtatcctcgtgggaattaatcttcaatcatataagtatgttttatggatggtgtcaatcggcaggtcacacaaacaaagcctgacaacttcactcctcgcctagtagagaaaacagatgactatgttcgagttgaatacgagagtcctatattcggggtataattcattctaacaccttcttgctcttcattcagttcacccatcttcttagtctctactccctctatttcacaatataagtcattttagcatttcccacatttatattgatgttaatgaatctagatacatcaatatgaatgtggaaaatgctagaatgacttacatggtgaaacggatgaagtagttgatagtataattgatatatccacatgaactttgcagtttgtagatgatgtggagttctggttccctcctggtaacaaatccattgttcagtaccgatcagcatctcgatcaggattcattgacttcaacgccaacaagaaaagagtcaaggcacgcacgcacgcgcccaatatcgatcatttctattacggagtaggagtagtactcctatctatcattgtgttgatccatgtctcatgctctgttcgatccatctttccattgctgcaggcgctcaggttggcactggaaaacaaaggctgggcttcagaaagcaccatctgaacctaacctcaaggaagccaacccctcgagtctgtactggagtgtggattctaatccctcgagggatatcccctcgtatatctttttcttccaaattcgatgcaaatagttgtgaaaaattctaaaaaaaattgataatgtagagtataatgatacctactagtccaccaaaattcatgttcaaattcgatctacacatcgagaaacaaaaaagacaaatttagatataaacagtacgctattattcatacgctgaatttgtcttttttatatctcgacttgtgagttgagtttgaacttaagattttgtggagttgtatatatgtgttgtatgaatgttgtcaaatttttccagaatttttcataaccgtttagatggtttttgagcaaacaaggaaacatcccctcgagggattaaaatagttttcctctgtgctgtacagactgaccgaccgattggctggtacaggcactcttccttcctggcgcttttaattgcacatttctcctatccttaatggattagtagaccttgatatgcaacagaatctctcaaactttggaccctcatgctattggcaggctgagtacttactcctccctccgtccaaaaaaaaaaaagacaaaccctgagttttcgtgtccaactttgactgtctgtcttatatgaattttgtttataattcgtattttcattgttgttagatgataaaacataattaatattttatgtatgacttatctttttaatttttttcatatttttttaaataagacggacggttaaacgttaagcacggaaatcagggtttgttggccggaggagggagtatgaatgatgcatgtccagtcaagccgatagatataagtcaactggctatggctgtggctcccaagaaaacagaggcaggagggttttcttctctccctgtcatgttctctgagatatactatatatgtagacgatgctaattacttaacacagctgaaaaaagaaatactggccgtcccgtcatgacttgcacttgtatgagggctagcgcgatgtttgtgaattgtgagggggaattgctctggcccatcgatacatgaatcccctgcttggtctactactttgggtgctggccacgcaaagccaatgtttgcattgcaaactgatgagatttagatctaggaacacattacatcaagtaagtcacatgcaaggctaaagcttactaagtactatatagtagtactagtagttagtggcatgcatctgaccctctctctctctctagaatctagattgtgtatttgcgttgcatccattcacagtttgttataattgcatttctctggtcgatcagctaggatgtgatgtgaaaacgcgcattcctgctgtgccggtggctatcaatataggtaagtgttgacatttgtaatttgtttgagcactagctagtcggtcgtgctttccccagcccaggcgcactactccattgacactgtctataaaggctgggaggcagcagaaagacgaaagtcaaaaggactaaaaagagagaggcatatatagtgacataaacatgggcactcgtccatttctggttccggagtcaaactaaacaccaagctaagcaagctatattgatagtgagtagagtgcaggcttcaattcagttgcatcgatgcatttgtgataaatcagcaagtgccttccctgtatatatgtatgacggtggatgcagctattgttagtgccccatgacgagatctcaccttaatactactacttacactagtattagtttttatcctcgctctgtccgtttgtctgctgactgactataactgattaactaggaatagttttgtatataggatgactagcaatagggattccttacagatgccgagaaagttttttaacacatagctatagctgatttctactgctactattttaagttttagttattattagtgcaggtggaggtggagggcttgcatcggagaaggattctaattatatccggatggacacttccattgtttatttcatgtcaactaaataactgtaacaaaattcaaaaaggatgacaaagacatattaatatgaaatatatcaatccacgaatataaaaaaaattcaaatttaacttctacaattgataacaaaaataacaaatttaattgtacgtatacatatgctaattagagtttaatttgttgttttttaactacttatacttaaacttgcatgtttgtgcatcgatataattacatattttaaaaaattacaaccatttaattaacatgacggagtgaacatatggatctaggtaattaaaagagtttcctttatggggtattatatactatctaatgtggtacgctacgtacggcttttaagtcaatgcgtccgtccgtaagtaagaaaacaaactgtacatcgtgcataaacagtaggactccagtatgtatgagtgttgtgtttgaggggtgtgtatgtgttgtgttgtaggtcaaccaatggaaaagcaaggagatgatgatgaatggttatagaggcagggcaccatcccaccttgaattgtcgcatcgcatcgcatccacaccaaatttcactgactactgatcgatcaactttccttttctcctctttctttcttcactaatcaatcaacttaatttgctctgtcaatgtgcatcatgtagctagctagctattcagattcagagtgatgaagtagtatatatttatgtcgccggtgcggtgccgcgtcgtccactggcttgctctactctattattccctttgcattgcattgatcgagtaggagtagtatgcccatggccatcgagtcatggctcaccaaggtccgctccgccatcatctcttccaaacccagcccctcgtcgtcgtcgtcgtcgtcttggaggtcgaagacggtcggtatcctggccttggaggtggccaccctcatgtccaaacttgtccacctctggcgatccctcgccgacgccgccctcgcccgcctccgccaccacctcatcaaccttgacggcgtccgcaagctcgtctcccaccacgacgccgccctcctcgccctcgcctgcgctgagctcaccgacgccctacgtgtcgccgcccactccgtcgccgcgctcgccacccgctgcgcggatcccttcctccgcgatttcgccgacgccttcgcggacttcgccgacactggccgcgaccctcaccggtggg

SEQ ID NO: 11211 - DNA, 569 bp, Oryza sativa
attcgctgtgaaataactatccctctaggagatcttgcaatttcaatacccagaaaatatctcaactggcctaggtccttgacctcaaattctttgcttagattccgtttcaacctagttatctccaagcaatcatttccagtgataatcatatcatcaacatagacagcaagaatggttatatgatctccactatgatgatagaaaactgtatgatctccattacattgcttatagtccatagcacacattgcacgcctaaaccgatcaaaccatgctcttggtgactgtttaagaccatacaaagatttcttcaatctcaacacctttcctttagtttgtgaagtggcaaatccaggtgggacatccatatacacctcttcttgaagatctctatgtaagaatgcattcttgacatctaactgatgcaatggccaatcaaaattagctgcacaagatataagagttcttaccgtgctcatctttgctactggtgcaaaagtttcatcataatcaattccatatgtttgactatatcccttagccaccaaccttgctttgtatctttc

SEQ ID NO: 11212 - DNA, 621 bp, Oryza sativa
gctcatgaccaatttctagcggacctgcgagcattctaccgagtaacaccacaccgctcattgtcagtgatgctggctttaaagtgccatggtataaatccgttgagaagctgggttggtactggttaagtcgagtaagaggaaaagtgccatatgcagacctaggagcggaaaactggaaacctatcagcaacttacatgatatgtcatctagtcactcaaagactttaggctataagaggctgactaaaagcaatccaatctcatgccaaattctattgtataaatctcgctctaaaggccgaaaaaatcagcgctcgacacggactcattgtcaccacccgtcacctaaaatctactcagcgtcggcaaaggagccatgggttctagcaactaacttacctgttgaaattcgaacacccaaacaacttgttaatatctattcgaagcgaatgcagattgaagaaaccttccgagacttgaaaagtcctgcctacggactaggcctacgccatagccgaacgagcagctcagagcgttttgatatcatgctgctaatcgccctgatgcttcaactaacatgttggcttgcgggcgttcatgctcagaaacaaggttggg

SEQ ID NO: 11213 - DNA, 8164 bp, Oryza sativa
gcaccctccccttccggtttggtttttttatttgtgttcttgtagtagtgttttctctaggatttggataaaatttgtgtgtatatgtttcagttttccctctcctgttcaatttgcatgatggaattccggatgggattttggttgtgtgtatatgtttcagttttccctatccgattcaatttgtatgatggaattccggatgggattttgggggcggacaattgaggggggggcacggacgaaaaaacagcgcacggacgaggtgacgattggaaaaatataaatcttttaattagttaagattacatgcaagttgacatcaacgagtcttcaggaacaatttaaggctgacaaatactatggcctgttgttagtcaagttgtgtgcatgtatcgtccatgatatatatggtgcctttctcttctctcagctgtgcaacactaactgcaacctagcatgcatgcatatgctgatgttgggttgacccctgaagctaattaagctagcagcgatggcaattcctataccagttgagaacaagcaaagctagcgcgctaacgatcgagctggagtgtgtgtgaatgcaaatgcgcatatatacggtaatgatgcatccacacacacacacaactatatagtaatagtagtagtagtatatataatgctgcatagatagcagtaaattagcgacgatatgatgcataggaagtaaagtagaaacaggaatgatgcatacgtatgtgaataagtgtgatgtgtccgctccatgggaggcaatcgccgggactataaatccatgtttagaatttttgctcctatatatgtagtatagatctttgctcatgcactctaccgcccagcaatccatatcgccctttctatctagtttccatcccatcatacgatcgatcgagcaacttgctaattaattgccaactttttaatttgtttaatgaatcatctagtagtaattgtttacagtctgcacttgacaatgcaagtagctaataggctgcccggccgggataacacatggggaagttggttgagtcgatatatatatgatgcatgaggattccatccatacatacatcacatgcttaattatgcttattcttatgcatgcatatgctgctcctgccctggatcatagatcagaaatcagttttagttagttgcggtagcaacctaacctagcttcatgttgctcctgcgctggatcatagatcacaactcagttttagttagttgcagttgcaacctagctagcttcaggtcggtggatgaaaacagccaaaacaccacgtactggccggtgtggtgtgattaattaaactgcaggcaggcagactccctccctccctatatatccatacaaccaaaaatccaaacttaacttaattttctttcattttattttcattacaaccggccggatcggactagtgttctttcaacagctagctagtttgtccatactaattggtgccaattatatagggtagtaggtctcgtcctccattgaaaatgttctttcacaagctggagtcgatccggaggtccgagaagtttaattatggttggttcacttaatttgttgtcttttttaatattaccaaagtttggtaatgttaaaatctggcacatatattgtggcgtttaccgaattttgatattggtaattgtaagggtatgtttagtttgttacgataccaaaatttaatagggttaaaaatgacaataaataccctaaaacatccacagaatatatgtttttatgctgtagtatctctgaagcagttacagatacagtaatacgtacagttttttttaacggaaaatatattttttttgaacagaagtaacacgtacagtttagtaggtgacttagcttgaagagcgagctcaataggaacggacgattggcttgattaattatatactacttcctctcagtgatgcagctagaaaattttcgagcccggacatactcagatatacatattatttgctataatatttctaactttaatcatttaaaagaaatttcaatggtgtatttgacggtaggcccagacaactacaagccacgcggtggctccgcccctgcttactctgtttcacataataatatgctttagcttttaaataggttcatgcatggcatgaactatatgtatgttcatatttatgtggatgttgataaagagtaaaaaaaaaacatcctgtaacatggatgtatatgtgatggagaggaaagcgccatcttatcttactgaaaaccccaagttatctaatcaggcagggatacataagaaacaaaaggtgcattttttttttcaaactacaaactttaaagcaactaaagagaaaccagctaaatactttaatcagtagtgccaaattaacaggggagataagggaggtaagctaatcaacaaccacagtcgccagctggttaatgttacctctcaaccttgcaattatgcatagtacgtaggagccaccaatataatatcgtgtggtatacttcttccaaagcatagggaccccaattaatcctctcaaaaatagaaattatatatatagctagatactcaatccatgtacctaccatcttcgttctgcatacacaaagcacaacaaacaaacacatgcatatggtatatttgtatggtgctatatatactattaaaatagggtaggtgtgcatgatttttatatatatagtgaatgaagcaaatcattgtccacatatatatgttaattggaacaaattaaaggccaggccaacagagatttatattttgtaatctgggattgcttatatagccagcagttgttgctttaaacttgaggcaacttcttattcagaatagtactgcacaactagacacatatatatatgtgccgacgattaattggagatgaagatgaatctgtgggtagctacatactagctaattagttgtttctactttctccttatgtcagcactaagctagctttctgtaaagtggtatatcaagttgctgttccagcgaaaacaaaagaaaagagagggacgcacaattaagtagcaatagattacaggccaaaatcaagtcattcatgattggtcagagacacctttgacttgaaaacactcaactatatatacatatattaggttgctgctgctatatagtggtagatgagctcgagtgcagtggagagggcagagggacctccaaattccaaaaggaacctagcagattttgctttctcaaaaggaaaccatatagatagcatagatatggacctctttttttgctaagaagaagaacaaattagtctagaattaatagtgcccgggcgaattgttaattctctaactaattaattagagctaggccatgtccatccctaaaagaaagaaaagattctcgatcgtgtgcctggctacagattaattagtacgtacatgacaagatgcatgaatgcataaatagctccaggacatctatccatggctgtgcctatggcgagcaacattattcttggcagggtatataatataattataggtggctgatgactcattgactaaactcaacaagaatgtgggttccaaatgttcccatccaggtggtaaactgagcgtgaagttaggatagatcatattgcttttctgaaaaatgtccagttcacagagcgtgaagtctaggattatgttttttataggacggagggaaggagtacatactccactgtgctagggtagtaccttggctatttactccctctgtttcaaaatgttgtcacatatactacgaattttgaaatggttctatcataggctctgtttagatttcaattttttcttcaaactttcaacttttccatcacatcgaactttcctacacatataaacttccaatttttccgtcacatcgctccaatttcttcaaacttctaattttggcgtggaactaaacacagccatagtagtagtactaatatttcataggttataacattttgggatagagggattattttactcacctcatgtatattaagaccaagtgttcaatgaactttgttagtagtacagtaccatataactgtctgtaaaagggtattaatgtcattaaggtaaaacaacaacagctatcggggatcagcgctctataatttgggataattaattccacagaaacgccaaacacataaagaggaatattgtatatgatgccctctatgactatgagcgagcctatatatgcgcctagtgctcttttggcagttctttaatttcttcctgatagtataaactaagaagacatggtgcaaaacgtacgtatggttcaacaatggccggtatagctttattcgacattctcaaacgttcttcgatcctccaatactgtttgtttatcatctactagctttatgttatctttggtttgttgtttatcgtgtagtctatcgatgtttgtcgcatgccacatgcagaacataaacatgcatcaacaaagtggagtaactaacatatgcatactgaatgcaagagaactcgataagttacttccaagttccactctagtttcttttgttctaacaagaaaagggaaaattgtgagcagcaggcaacctatttccaaaatgttgacagatatgtatttagagaaaagtgcagtgtctccccttcacaaactctctctgcatgttatgtttgacgactcccgtcagtaaggactcaactcaagcaacatatctgcattatctttcatcgtttttttctcttccttcagtgcccacaccgaatctgcgctgtagagggtgaccaggatccaaccacactcattcaggttgaaatagccttaggagctaaccacagcttcacctttttgtccactccagcagtcgctaaaacaaaagcaggagttccacctaaaagaaaatattatcagtgatcagtttagaatctgtaaacacttctccctcggaccaacaatagctttatcctagtatcctcagcctggaaatcttccagcaaaaagcaacacgcatatttgtaaatggcgacaagtgatgcgttgacatgagacatgaagtgcaccagctctaaaatatgaattacatttgcatatggctaaaaaggacaagcttcaaagaaaaacgttttggatttcaaagaatttcacatgtacatttcgttcgcgcggtttgcatacttcttaccatttggaattgttcgtgaagcccaggcaatgccagttatatcacctgattacataaagaaacatatcactgtaagattgcagcatatatctagcaaagatcataacaggaaaaggtgtaaattatagcctaatgtatcagcactgcatatctttatcgagtgaaaagtagttgaattctaaatactaaattacgatcaaatttctgaagacagcacaaagttgagaccatctgttatgcaagtaagtattggtataatccatggacttcatggccatgatctacaagtagtctgcaggatcattgaaaaggaaaataacacatgaacattgaccacagagtacagagtatgatgtatttgcccatggtagtcagttcttaacaactcgggactattgttgaaaaggataggttgtgactcaaacacaaaaaggttcacaagaaaaataaacagtgtcaaatcttctgtgattcagatcttaattactgccgtctccttaacaatttattaggtccatttagtagtaaaaacagtgtccaatctggcaaatcaagaaagaagagggcacataccttcatgtgctttctcagctgtatcaagaactgcaccagtttccacacataaccattgcagcgttgatccacttgtcgtggccagaactttctcatcaggagatacactcatgtgatcatactggcaaacagaaccttttgaatcatggagaggaattggcaaaactctcaaggttttagggtcttcatcaagatggtaccttactacaaaattgacagaatatcaacttgtgaggaaggagagtatctgagaaaaagagaacagtacaaggtgtgcatagacttctataatggcaataccaagaacaaatttattttcatcaggacatttgtataaattcataagtgcattctgtataaacatttggtagtgatcaatcagcacagcatctaacagaaaggaacggcatgagaatggctgggaagcaacttgaatacttgattacagaggattgcgtaaccaggtttgatacttaaaaaaaatgataggtcctctcaacttttgtgaagtcaggcacaaagacaactatagatgcactttggcatactgagcattcaataagtggaaatgaaaaaaaaaatcaaaagtataggagttgttgccgtgatcactttcagaattcaagtaaacaagtttttactgttacaatttatgaacccaatcccaacttattgcttcaagccatcaaggatatggtggtaagcggcatagaacataacattttgattaaaataatagaacataccattaatgttccatactcgaattgtaccatctttggaagctgtaataatctgctcagaattcagagcgaaacacaggcaagtaacagcgctctgaaaaaaggagaccgtcagcttctcatatgattcagaacatgcaaataaattcgtaacacgtccaacaagacaagggggggtcttactttgtgacccttaagttgcataactttattgacctccttcacagagctatcctttgaataaacaatctcccacacctactcaaataaatgggaaaagttatattgcccggatatcctggcaaggatatgctatagttcttcaaaataaacagaaaactaaccttgacatcagcttgtaaagctgcagcagctatgaaacggccatttggggatatatcagccatattatttttcaattgattggtgtcgactgttcccaactcctttccacttttcccatgccaaattttgatatcagttgctgcatgacaactcaaaatatcaaccttagtgtgagataaaaggaaatccatgtagcgtgcacaacttaatggcatataccttcagagcaagaaatcaatattgtgctgccatcaccagtcccataggttgcacgagctgccgcaagattcagcactgactccttgccgtgaatcttacggtgttcccactttatctcagggggagaaagcttgccctgctgtttgtttccgccagctggaggagcaccaacatccgcatacatgtagagagatgagcctaaaagtgcttgcgctgccacaacaactgatgatgccccttgtgagaaagcaatagctgtaggatgtgccccagcgggcaagttgatcctcagaattctgcaaaacccccataatctcatactccagcataaggaagtaataagaaagaataattcgtgcagaattaaaaaaaaaatcttacttaaagctcttgcttgagacatcatcaaccctgaatactctgacagctccatccgcacatactgcaacaggaagcagaaagttatagatgtagacattagaatttggagtagcaatcacacttggttgatgaagtgaaatatggtaaactgtatgtgtggtgccaactttgatttgttagcaatgagaaccacaaaacatgaggcatgatataagatgagaaaataagaaaggcaggacacgaacaaagagaggtcctgcctcgtggtaatatggtgttgagaaagtagagcggaaaaaagctgaccggtggccaggttgcaggcatcatcggagaaatgaagtgctgtgactgaatcagtatgccccctcaaagtgttgacatcaagatgatggtgcttttttgcggcgtcctaaaagaaaatcatgttgagatcaatgacggttatatgaaatttgccgacaagaaagaaatacagtaatatgacattttcggagaggaatgaaatagtaaggaggcttgtgcgtgtaatgcctaaaatttataatggataaacatatcaaatttggtaactcagattacggaatttgcaagcagcaatgaggttacatttaaagtcgtgggtggaagatagtactagtatataggcggtagtaataataaagaaaaaggaa

SEQ ID NO: 11214 - DNA, 712 bp, Oryza sativa
ctaattttcaagatttctattcggactcctcaacacatatctttactcgtgcaatgagtactcgatgacaagaagctacagttctcgactctatgttcagttgccttctaactaaccaaagagtcgggggctacacaaatacaagactctcaaaattcaacaagctgaagaaatcaattaatcagccaacgagtcaactccaggagtcgttatcttcatctttgcttcgaagcagatattctacttcagcaactccaattatttcactagcaattttggtttctggacgctgccataatctactccaaatttctcaaagtatcaagttcaagatttaatctacatgttcgagagtttggagttatcagccaatcagcttggtttagacgagttggacaacagcatctactttcctccaagtgaagcatttacaacagctataacactaagttctgcagtcatcttcgtacatcaagaagcgttgcatcagtcttctttatgcacacgctctcgtcaaggaaactacttgagctttgatatcttctgaacagtttgatggattattgtcgctgacatcatcactagcacctctgcttcattagccctgacatctccgctgttgctaatggatgactatgtcttcgccgacttattatttcaccttcacggttgacctacaatgcaaacgctgatgagcgtcttcgtcattatc

SEQ ID NO: 11215 - DNA, 670 bp, Oryza sativa
atgcgcatgctggtacttaatgcagcgagtttagctgaagcgggtcaaccatttcatcgtgaagcttaccttgcaagacttttgtgcgctgaaaaatctatgaaaatcggtacggatggtgtacagatcctaggtggtcatggttttaccaaagaacaccctgttgaacgttggtatcgtgatttgcgtgctactgcaatcttacattctggcttacatgcttaattgatcattcgaggatattacaatgaatttacaaaatcctaaaaaattcaaaatgatggtcgatcaggcacatgaagttgctttgaatgtgttgcgcccaatttcaagaaagtatgacaaagccgaacatgcctatccaaaagaattggacatgttggcatcattaattgatggcatgaatgaaggtggtgaaggaataaatgcaggtgctgctgttggcaaacgtggagaaactgagtcaggtaacaaaaacggcaataatatgtcgactgcactcggtattatcgaaatgtgctatggcgatacgggtttattgttaagtatgccccgccaaggcttgggtaactctgctattgcggcagtagcaaatgacgagcaacttgaacgttttaaagggacatgggctgccatggcaattactgaaccaggttgtggttcggactca

SEQ ID NO: 11216 - DNA, 717 bp, Oryza sativa
tgtccatgccccgttttcagacatccctgaacaaagagctcgcaactgggcgcgggcaaggggtaaggtcaacccggatggctctgtcacatttgagaacaaaagagatgccgtcgtctatcaggaactggtgagttcactacttaacctaactaatttccgttcgtataaagtagaagttcgtataaatgactcttttttttctagttgggcttggttgctgaacaagcttcacaaagcaaggttgagtccgcgccgaagaggcgcgaagatgacatcctcacaaaggcgctcggaaccaaagaacatcctggccggactaggggaattggtagcgatgtgccctggaagcatggactcccgcagtacagttcccaatacaagaaacggaaagtctccaaggaagagagggacgctcgtttgaaggccgaacttaaggttgaggtcattcaagaactagaagctagcatgaacgctagggtggaagaaagggttaacaaggtcctcgccgacatgaatataccccgaggcacaacacctgctgtgcatccaactcctcgtgcacaacacgacgcgagtccgtcacagcataggagtagttgtgcatccacagaggtgctggcccctggtctccccgtcgcaccactagctgcagtggaccacatagaggtaattgatgttatctgatccatatctaataaaaaagcgggctgcagg

SEQ ID NO: 11217 - DNA, 516 bp, Oryza sativa
caacatcagctaatgcagttgaaccacatgccatcgttttgtcttctactcaatctatgccaccttctacgccgtttgtgcttccagatacaaaggtataatctaattgtgttgtcttataaggatatgtgacctgttacatctaagttaccataatttcttagattatatcctttttgtataggacacaagggacagccatggtgatcagcatgaggcaacaccacctactccacaggctagcaatatattttatactcacatcaattatatgcatatgtctttgtcagaccttcctaaccattaatactttatcaggtcatagctatagcacatctagataaaaaacgtaaatcttctatggctgatgagaatcttggccatggagggttagtgccaatggaaaatttcatgttttactttgatttcttctctttttcctcatgactcaaacaacttccatttgtagctcatctctgatgaacatgatcgtcgcaagccttctgttgtgcacac

SEQ ID NO: 11218 - DNA, 557 bp, Oryza sativa
ctcattgaagagatacgggcgatgtggttctctggctggcgcacggaacgtgtttgaccaggtgcaggagcgcgatgtgggtgtctggagctctattgtatcagcatatgcattccatggccacgcagatgttgcaatgtcgcttttcaggcatatggagctggacaatgtccggcctgatggcataatgttccttggcgtattaaaggcttgcggccatgctggtcacgcagatgatgcattgaagtatttcgatgttctaaccaaaatatttggggtcgaggcctgtggagatcactattcatgcttggttgatgtcttgggccgggcaggaagactacgccaagcttatgatgttatacagacaatgccagttaaagttactgcgaaagcctggggtgctcttcttgctgattgcaggacatatggggaggtggggttggcataggttgcagggagagcattgtttgacattgaaccggacaatgcaggtaactttgtttcactcgcgaacatctattcaagcatgggtatgcatgacaaggcataacaggtga

SEQ ID NO: 11219 - DNA, 618 bp, Oryza sativa
gatcaaaatatataaaaaaaatacagatttaaaatattatattttaaaattatcacaaaactatatatgtagggcctcatatatttagatgcagtatcaggagatcggtcccttgtgcatcttccccgtcttgacttgctccggttcaattcaaatcacctcgctcgccgtccgtcttcgtggagctttcgaatacgaggcggcgatcgatgcattcccgccaccaacgcctcgcgtcgctgacgaagttgctcacttcccacgtcaacgtcggccgtcaccgggatgctctcgccttcttctcccgcatggtctccgacccctccctcccgccgctctccgacccctccttcgcctacgccttcccgctcgccctcaagtcctcctccgccctccgcctcccctccgccgccgccgccgccgactccctccacgccctcgccgccaagtgtggcttcctctccagtccattcttcgcctccgcgctcgtcgcctcctacggcgcgtgcgcctcccccgccctcgcccgccgcctgttagacgaattgccccaccgcaacgccatcgtctgtagcgccatgatctccgtccacatccgatcgggcgacctcgccgggg

SEQ ID NO: 11220 - DNA, 674 bp, Oryza sativa
ccccccgccgcgacatgccccctccacgccgaccaaattcgctgctggtgtctgcgctttggctaacgatctgctgcttcaattccgccgcccgcctccccgtgcggccgtgctgtgtgctctcgcagactacgcgttcaacgccgtgaagctggccgggatcacctccgtcggcgtgcgcggcgagcggactccgtctacgtcctcacccatcgggagggaggtgagcacgtcgcgagagcggaaatccccttgtcccctcatttgtgattcattctgcggccgtttgatttgcttcgttcccctgatcaggacaagttgcacgacccgacgaccatcacgaacctgttcgcgatcaccgaccggattgggctgctcgccaccgggatgccaggtgagccacaactttgctctctcagattctcagttctaagtgctgcgtggaacatgcggtgcgcgcgtttggatcccgctggcacaatatcatttacgagttacgaattgcgaattggaggatcactcgactttatcctgccgtagaacgtctcagcgaaaccggttccaataattaatctctgcaactcttggtgttcatgagagcattgcgatgtgataaggatgttttacataccgatgatgcgcttgttcgactggatgctaattttgctgactcc

SEQ ID NO: 11221 - DNA, 755 bp, Oryza sativa
  unsure (1)..(755): unsure at all n locations
cgatcctatattattctttaaatgatgatgcatgccatatatattattctgtaaatgataatgtcctgatgtttcatatctagatacctcatttgctgcacattactctctttattcagtaggcttagatacctgatttgctgcatattactctctttattcagcaagttgctcatatctagatatctcatttgcagcacatcaatttgatttcatatggtcatgtaaatttcatctgccttgagccatccttgttcagaactaatgttttgattatgttttattgcagagatcttccttgagtcaggtgatggcgatcggtgcacaaagataaaaagaaaaatccggaagtttgaattaccgttgatacttcaatctagaagtttgaattaccattgatgtgtcgttcgtggtgtcaactagtacttgagctcgttttgtgttgagattgtagcactctacttctactgagatcgntttctcctcctataatgtttaaagaccaatcaggttattattactgtgtctggctgtgtcaccatagcggcattgntggtccatccagttttgatgcggtcttcaattctcccgtctttcggctgtggttgattgcttcatcgtttttgcggctaaagtttttctgctcctaccaaaactgtaggggaaacttttggtgtgctgtctgttctatctcttatgcattgcacagcctggttttttcgctcttctgaagtatagccctgtgcgctctcatc

SEQ ID NO: 11222 - DNA, 996 bp, Oryza sativa
tggactaattcgcgagacgaatctattgagcataattaatccatgattagcccgcgtgatgctacagtaaacattatctaattataaattaattaggcttaaaaaatttgtctcacgaattaactttcatttatgtaattagatttgtaagaagactatatttaatactctaaattagtattaaatataaagttaagtccctggatcctcagttctctgaagttgctgagccatcagaaaacagctaggactgcagcgaagttatacctcaaatgtgatccagccgagcgacagggccacggcgatggtgagagaattcgcgaatttccgatacatttcaagcttcgccgtcatcctcctcgcctgcaagaatcagattaatcacagaattcattgatgattctcgaagaattattcgaattttggtagaattttgaaagtgggaagttcaaatgatgctaccttgagcttgctgatagttcttgacagcgaggtgaagatccagtagatgaacaccgtgttgagggcggcgacggggagaatgaagaagagcctcctcgccggcgagtggtcactgacgatgccgacgttgtcgccgacgtcgagcacctccgccgcggcgaggaacgcggcgccgaggcggccaccctggcgttgccgcagcccagtgcgggcctcgtcacgccgtaccccatggccacgagcagcgccagcacgcggcacgccgcggcgcgcacggcgcccgacgtcgccgcccagaacgtcgtccccgccggccggacgcccgacgcgtcgaactcggcgaggtcgaggtaccaggtggtgacctccaccatgcccagcgcgatggccgccgtcacgaagttctgcatctgcgacacctcgcgccagaacctcgcgtaccgggcgaaccatagcgcggtgagcgcggcgaacgcctactacatggcgccgtacaacggcttgagcggcgccatcctccccgggaggtagccg

SEQ ID NO: 11223 - DNA, 2254 bp, Oryza sativa
acatggggcagttgaggcgctgtgaggattaaaggaagttcagcctggggcccctcctcgcttgctccccccgccaaacggcggctgggcgagggcctcggggcaaagcagtgcaagggcccgaggggcatgacgtggcaccccgaggccccgacaccccggccgctcctgcggttcgtggaatgcggggacaggaccatgctgtagggacacgtggtaggatggaaaggtagattcccctcacttcgcatacccccgggcccatatctccgacagtttagggcttagggtttaatagttggagagtcgagatatccggtactgcgattcaagcatacgaatcagattcggcccaataatccagatgccaataggacggcccatcaatccagatgcaatacgacggcccatcagatcccgtccccgagaaggaatccccctcaccgttggatccgatccgacggctgagaccagccacacaaaccctcaatatatattcgctcgccccccgctgcgtctcgccgctcctacaccgcgccgtcgccagcagccgccgccgctgcctctcctcctcctcccctcgccgccgatccaatccggtaagcctcgccgccgcaagctccccctcgtccctcccccggatagttcgtcgcctcgtcaggcatctcgccgatttggcgccgttctgttgttctgtttggtggagccgtgcgcgagatttccggtgtttgttgacctgtttagctctgatggattcaccttgtgttagttagttttccgtcgaatggtgtggcgattaggtttggggggattggttcgtctgtgattttgtagctagattttttgaaatctagggtagtgtgagtggggaagctgctggccttagtggatacatgctgttcgtggtctcctggttcttgaaatcatgatgagttagtgctgtttgaaccttgaagcaaagttttaagttattggagttcctgtgcttagatttgtatactattagtgaagagatgcatagctgtactgctgtagtggatataggagtgttgtttttgatttgctggtgctcttccatagcatccggatgcggtgttcaattgtgtagttgtttatgtagttcaatgcactagaagcttttatttctgaatgcctagttattagttgggtatgaagtccaatgtgtgaaatgctgtcatgtttcaacttttagttaagatatgaaacttgagaaacaaatgaaaggtttagattcagtactgatgtacaacttaagtaacatctatggttgtaaattgtaccatgcattggttattgtgaattagctcttttggttgattgaaacaattctctatgtgccaacaggtcactttcagtcttttttcttgagggggagatggcggtttctttcaccaacgttagctcagaggcaggcctcaaaaagctcgatgagtaccttctcactcgcagctacatctctgggtatatgatcagtgtccactgtccaccttattttctgaattgccatttatgttcactggacttaaacccttcaattatctgtttccaggtaccaagcctccaacgatgacttggctgtgtactctgcattttcaactgcgccctcttcaagctataccaatgttgctaggtggtttactcacattgatgcactcctacgtctgaggtatgcatttttcccctttttttattctcttacattttatgttcagtgttgtgaattttctgaatgttgtatttcagtggagttactgctgatggtcaaggcgtaaaggtcgagtcgacagctgttccttcagcttcaacccctgatgttgctgatgcaaaggtcatacaaccctagccttgtcttgtttgcctgaaatctgtgaagtgttctagcatagtactgtgaattgtgatttgatgctgtttgcaaattacgtttttgtggttcaatggtgctggttaccatctctaatatatcatcatatcttctaatttcaggctcctgcagctgatgatgacgatgatgacgatgttgacctttttggtgaggagactgaagaggagaagaaggcagctgaggagcgtgctgctgctgtcaaggcttctggcaagaagaaggaatgtatgccatcctgcattatactataccatttttatgcaatgaataatacaattattcattttattttattctcatctgtagctgtaaattaagaccaaatcatcactattcattataatgcaa

SEQ ID NO: 11224 - DNA, 681 bp, Oryza sativa
atacacatggtgataaaccatgtttggaggaagcttttgatcttctttgtgaaatgaaaatcagaggcgtgaagccgactgcggcaacctacggaacctacctttatggactttgccgtgccaaacaagtcgaatctgcatgggactttcttcaagtgcttcggcagagaggctacccttgcaacagctattgttttaatgcagtgattcatggtttctgtaacgataatcaggttcacaaagccatggaggtatttgatgagatgaagaaaggtggggttgtcccagatgtccatagctacagcatattagttgatgcgctttgcaaacaaggtgctctatcattaggctctaatttgcttgatgaaatggaaagaaacagagtcagtcctactcttgtcatttacagttcacttctgcatggtctttgcaaagctggaaaagttgaggaggcccttgaacttttcgaacgtctcaaatatcaaggtttcaagcatgaccaaattacttacagcattgttcttcatggttgttgccgacatatggatatagaggttgcctatggtctttggattgacatggttaaccataattttgttccagatgtttacaattacactagtcttatatatgcattttgtagacatagataccttaaagaagcattggggttatttgaaa

SEQ ID NO: 11225 - DNA, 1603 bp, Oryza sativa
agtcactaaatatcatggctgttaaggcgtcgctatggcatcgctatagtgctagggcaccctgagggggtcaaggcatccctccgccttagggcttaatgcagagagggagagggagaggtgaaggcggcagcaactacacccttttcccttttctctgctccatgtcatcaccattttgctcccccttagctctggtttccactctcttctctcccctgcgccagattcatcttgactcaagggagcagccgccagatccatccaagggaaggagcacatacagagagaagcacttgattcattctgaatcagggggaagggagcacagatagaggaatagagctagcatgattaagaagagccggtgcgaggaagaagcgatagagccgtgaggaagaaacgacatcgggggcggcgctgtgagaggagagacacacctggtgcgggtgttagggttatttctttgtctttgggctggtatgaaggatattgggcttttgtgggctggcctgctaggctggttttcttctgatcgctgctaaccacataggttatggcatcgccatgccttagcgttttactgctatagccttaccccttaacaaccatgctacatatatggcaatcatcttgatatgataatgttcttggcttattgcatagttagtgcacactatgttgtagctggcttggttcttcatcagctagtatgccccatctgaattgctaccttttgtctactttgttcatgccaatttggctaatctatgtagccaggcttttacaggtatttcatggattgcgtagttccttgtatactgtattcatgccaattttgttcattgcaggaaatgcgtgagctgcaagagctggaaaagagattttacgcattcttgcttcatatagcaacacatgatctgtctacagttctcctaactcctagttgtaggcattatctagagaacataatgcagttgcttttgattacttcatgcagccataaagagatatcacatcggaaggtggggtttaattgatcttgaatttcttatttccacttcaagcgagttacattctccatctccactttaaatagaattgtctattttatactcggttattgttttgtagacatgcgtacagacttttgtcaaccttatcaaagactggtgtagtagctctgaaattgaagataaggtattgttgtgttcagttcttcttatgtcatgttttgaagagtctatctagtacttgggcagttgcattactcataatgtcatgtatttcttgttttcctcagcttcctggcttccgagtgtttatgattgagaagttcgctactggttgctgtttgcagagtgtccttgacaagtcatttaacttccgtgatggaatttcggtaggacctgtcaaccatacaatctatatctatctaaatttctcgtacctgttttactgtgttaaatgtataccatcaagtagttattatactgtttgtctattgcttcattaaattcttggtaattttattaatgtccgtcctgatagggtttataggcatttgattgtgacctccagcctataggtgtccgattggagg

SEQ ID NO: 11226 - DNA, 641 bp, Oryza sativa
gaagtcctcttcagtaggtccagaacagttaattttgagggaattcttgcactgacatttgaaagcaccattcagaaattagtttccttgctcaacaacaataccaggtaggcaacaggtaaaatgaacatttggaacatacaaataatttaaaaggttaccaaccttttcattctccagtaatattactaggattggtccactgtggtcacatcgttttgaatacgaaaaaggacagtcatcagactgagaagaacaactgcatattgcccttggtggagctccatgtgtaagagaggaagggtgatctatgtgcagagtttcgcactgccatgtaacaacccatctaacccattccaccatttcaggaacagatgaacaacaatttcgaacagcttccttgtatctccaatgtgcagcaattccaaattctgcctgtaaatgcatgtccctcgtacgaatttggatctccaatggcagtgtttcttcactgagaacaaccgtgtgcagggattgatacctacaagttagcaagcatacagttatcacggtgacttactcttttttttgcataatagtattagttttcagagtcttacccattgggtttggggctgttgatgtagtctttgaatttgcca

SEQ ID NO: 11227 - DNA, 1256 bp, Oryza sativa
ttaacacaattgcacaaaagaatgtttaatggatttctgtggacaatcatatattcattgatttccattgttgtttggattgacagtctacacaatcctttcctttgtatattgctattttaagaactatatgataccccttgcattgctgcagtacgaatgaatgaaaataagctgcagaactgtgatgaaacaataagatggagaaataatattaactgtaaacaaaatagttgtagaactactaaattattattagagtccataaagtggacattgtccgctcaaagggatgggccaaagagggggaaaagtgagatgtggagtctaactgggccaatccactgtatggccctaaagcggtccttgtagaacagaacatcgatctaatttaatggttaatactatgatccaatggctgaaataattttgatggtatgattaacaacagaggcacctttttgttgtataagtatataaaagaaacattacaaagtacgatagtttccaaagtcctgccgttattattcctcagagaaatacagctaaaacaggacagttaccgaaaaagggaacacaggtgctacagttactattagagatcgcaatagcttgcaaaccaaataaccaggagacagggacatgatatacttcattatcaacgagcacctgtcgcagtgcaattggaatacatggaagcaccgaaatgcgtaatatctcaaccatacggtggagaaatgatatgatctgtatttcagcattgcataagttacaaattggttaatcatccaagcagtaaattgcaaaagatgttgataacagttacttaccttagatcgcaggggcttcacattaggaaatgagatgaggacttgcaaaactacatcaagggtctgagaacaatacgaaaaaaaaatcacatacgaaaaatggaaattatgcacatatatgataattaaaaagcatatatatacgtggaatggagaatgacagaatgtaccttcttgaacataacgccaagtgtcggcctgcttcccatcacaagccgttcattaaatccctaaaaaaggacagcatccagacacagtaagatcaagcattaatacttgaggcacttgccatatacagaaccaaagatttggcatatgagcgaatcagaacgtttttttagaaataaaatgatatactacgttcacggaatgtgatattgccaactcctcgtgatgtgtgaggatgaacagcataccttgctgatc

SEQ ID NO: 11228 - DNA, 2380 bp, Oryza sativa
ataagatataaatagtattttatgtatgactaattttttcaaaaagaaatatatataatttttttaaataagatggacggtcaaacattagacacgaaaactcacaactggatttaaaatgggacgtagcaacaaggcagaggctgtactggccgagagtagccattgtttagttcatagtgggtgagtaaataaaaaaatgtaagtcgcaactgcaagttttaagatcattaagtcataaattaatatacattgttttccctcattaagactgagacaggaaaaaatcgatatataaccacatgttggccaatttggatggactctgattggccgtactagcgaactcactagttcctttgtggggaaatacgttatttgtcaatatctttttttccacgtcttgcgaattgcgatgtaggttcatgcatggcactacccaaatgaaaggagtagctgaccaggatgaaatacactcccaatggccaatgggcgttcgagtcaattgaccactcgattctatcgatttgttttgtccgagtaacaggaacagaacagcttgatctatcttatcgcccccatcatcccataaatggcttgattcctcaaaaccaaataacccacaaatgtctctaaaccagcaccagaacgtttggactttggagaggtccaaacctgaaacctgatggctttttcatgggtaaattgtacaaccaacgaccgacctgatcacctgaccaagtgaccatccttgatcaagctgtacagtatggagatgcacgggcttttttttcttcttcgcaaactctatctatgtacactcgaatactctcctctctccccaaattacaaacacaaaaccagacggctacgagtcggaccctgaacacagctcggcgcagcactcgtagcagccgaggcaggcgaacgccgcgcagacctgcgtcatcacgatggcgcactggtcgttcatcttgttgcaggccttgatgcagcacatgcagcagaggcagtcggcgaggcggctgcagcagccggcggccttgttgaggatctcgaacgtctccagcggcttcacgtcgccgaaacccgtgacgaggttctccctggtggcggcccggtcgccgaacccgagcttgaggcattggagcgggatccgtcgaggttcgtcggggcccttgtgacctttcagtttctgcttgacctgttcgagtaaacaggcaagttagttgggagttctgagctagcgtggttgtcacaagatccatttctcgtaaaccagtttataagcagggaccattggtattattataaaaacagtgggacttaccttttgtgctgcatctaccttctccaatgtttgaagtaggaccatgctcgtgtactctgaaggaatgctattttgaatgcttagtttcaccaccttcaaaaatcaaacgaaatggagttactgaaacccatatactgctaactgaatggaactcaaactactaaagaaagtaacatatttcaggggcaactgcaattcacaagagaatgtgacctataaagatttcaaactagttcagggaataaatgaaatggaaagcgaacatcaaaataatattcagcaccaacaaccacactagggctgagtttagttccaaactttttcttcaaacttccaacttttccatcacatgaaaacattcctacacacacaaacttccaacttttccatcacatcaaaacattcctacacacacaaacttctaacttttccatcacatcattccaatttcaaccaaacttataattttggcgtgaactaaacacaccctaaggctgtgttcggatatggggagttgggaactaaactccccgcacggaaaacggatcggtccattagcgcgtgattaagtatttactttttttttttcaaaaatggatcaatatgcttttttaaagcaacttttgtacagaaactttttgcaaaaaaacacatcgtttagtagtttgaaaaacatgcgcgcagaaaaagagaggggtgagctgggaactctgtgttcggcacaccaagttcccatctcctctccatcgtgtttcgtgcgcacgtttttcaaaccgctaaacggtgtgtgttttgcaaaaagtttctatacgaaagttgcttaaaaaaatcatattgacccatttttgaaaaaaaaagctaatacttaattaatcacgtgctaatggatcgctccgttttacgtgcgtaggagattggttcccataaagcccaagcgaactcaagcatttttcaatgtattgcccattaaatgcttaaatgcttcagacaagcaatgtgagaactttcaaacattaccgattatcttcactatatctcatgactccaaaa

SEQ ID NO: 11229 - DNA, 1291 bp, Oryza sativa
aaattcagtggaggtataaagcgaagaacatgtataatgcaacccttagccaaaagcctgaaacataaactcacctttctctccagttgcttgtcagaagaaagccatgccttcgctgtgagaaggccaatctgctgtgccgccaaaacctagaaatcataaataaaaaaaatgcatatattattagtatactcgagaaatctatggccccaagtatgatattgtgcaagtttctcaatggaaagaagagaaaccaaatgtacacaatagtgagcatcttactttgtcaaggggtatatcctttatatgctgcaccttaagttcaatcgagatctctctcatgtcagccaagtaacctttagctgtaaccatatctgggaacttgccttggtatttcccagatatacataaaggactttttgctgaaatgtctggaatgtattcagaatcgatctgaattggaggaaaggaacagtcagaagacaataaaactactgtttttttctagctactactagttacacctgcaaaaagcatacccacaaaccacccttccatacagcaaataattatttctatatacaggacaggctctttgtaggaagagcagtataagatggtatggcagcaatgaacacagcacacatacactaccagaaaaatgagttgggaaatcacaaatcaaatactgaaaaagagtcaatttcattatgaaacatgatcgcaatgcagccagaaccaccttgatggcattactcgtcttacatatccatctctacataaccaaatttacaatattgagtagttagtgatgaattaactcacttcaaattcatcaagatgtgctgtagcatcaatggagatgtttgcaactattgtactcgatgctttcctgaaccacctaagtacctgactctcaattgatcctgcaaaaacaattcaccaaaaaaaaaaggtttatgaagatgttacatggacttcataaaagtcatatttgtccaattaatgcatataatagaacagtattgcttagatatgaacttcaggaataaatccagatcaataacaataatgtattggtagaatgcccatgaaacttgagcagaggttgcaagatggagtgtcaacttaaacagcatgcagggatcataaagaaacagtgttacgtggaaaattgcaaaccaagagtacaactagctcttagattgcagagcaagaggatcccttcatagaaaacattattgccacctctaacaatatgaactgattgcagtttggtttttctattata

SEQ ID NO: 11230 - DNA, 1508 bp, Oryza sativa
tcagcttggatttatgaagaaaggggatccaactgtaactctgcacccagtgaaattcaagcgcgcgcggaggtgaaggacgcgagcaaaacaaagtgctcgatatacgacgatcacagtctttcaaatattttacagcttggaagttatgcaaaaccattaccgctaactgattactgtacgctatagctatatgtatgactgcgctcaagctgtgtcaagtgtcaattatgagttgcccccggatttacgataccaactgatgatcacacatcaacacttcaaactgtaactgtctacgaaggaactgcatcctcctgctcccgtgtaaccttagccagggataattttcctatgaagttggtcgcaaggctgccgaggaagagatctccgttgaactctgtcaccgaagtgaccatgttgatcacattcccttcagagtcaccaagaaccctcacgatctcgccgttcaacgacacctgagccaccactgctcccttgagcgtcgccttggtcctctcgacgagcgccgggaacgacgcgatgaccctcctcgtcaagctccagcgagagatcaggtccagccatggagacctcacctgcagtttgagcacagaaaattgtaagtttgagcactgaaaatgttgtgtagatgcttatggcagcagaaaggttagagagcagagacctggagaagggcaatccagaagtgaccatctgaacccagccgaatgttgtctggattccccggcaggttgtccacgaagatctctgcctccagccttctcccctttcagccacactctcaagcatctgaacctgcacttgacaatatcacttcatggtcacttgacgatagagtgaacagactcttttttttatgagcaattttaccgttcttaaggagatacatgagatactattttttttctattttaatttgatatctctttatatctagatactataagataccaaattttatactaattttttttacctcatggtacatccttatgaaccgtaaaattactcgttttttattattattttagataagggtattttctatccagattctacatccaatcagatatatgcagccatttaaattaggaacttagccccacaaacaatccaatctgaaattcgttcctaagaagatttgcactcgtaaccttaaaatgttactcaggtcactgcacgtgtcatttcacagatgagaagttgagcttgttactacctcatcgtctcgcagacgacgacgaaggcctcgtcgggcggcagggcgacgccgttggcgaagccgaggccgtcgagcacgacggaggcctcgccggtgcgggggtcgtacttgagcaggcggccggtgaagcggtactcgaagaagtcgaggaaccagttgtcgaagctgaacctggtgctggcgtcgctgaagtacaccgtgccatcggaggcctcgatcgccgcgtccgcgaacctgaagacgacgaacggagaagaacagt

SEQ ID NO: 11231 - DNA, 1965 bp, Oryza sativa
cggcgtcatctattaaaaaacggaggtaggatttagcagctgatgaagtaccgagacacgcagatgctaatgaccactagaggaagacagaactagcatattttacccacttcatccatctcttcagaaactttcgctgcgtcagatcgaatgatacgagacggaaaaaagaagaagaatggcacgagaattggatattcttttacatagatggtagatataaggtcagaaacaaatccatcaggcaactcctccttaacatgttcgtgtactgtctcacagaaaggacgggttcagatcctcttatccatcatatatagttgactgtagaatgtgtaggttggatttctttcgtgtgatcgctctgtaactgtgattgcgtcaaacatactatctgttttcttcttccccaaagtacaaactgtcgtcctaccgttaggacagcttttacccattttgaaatacaaacagtaccgtaaaagttatcgattgttagaaaactacaagaagatgcacacggcaatatggacttccatgatagttaagtaggtatagtttttttttttaaatcgaagccaggcaaagttggagttatattaaggaaaatagaaagtatttacaatatcaccaggaaaggtgaaagagacagaacaggggaaataaagaagaaaagcaacaaggaaaacctaaaagggagacctaagtggatattctcgtgatgttttttttgccccacacatactccaaagtttgatttcgtcttgtattttggcgagtagttgcggcatggttttctcttgattttgaaaaaccctcctgttccgttcacaccatacttcccataccaccaacatgtggattgatttgagtgctttggccttgcttttgcctccttctgatccaccattccaacagtacttcgttttcatcgtattggtgttctatatcgttgcagttcagtatactcaggaccctctcccagatatggcacacaaaagcgcaatctttaaaaagatgttgggcggtttcaaggttcctatagcatagttggcagaaatagttgtttggccattgtctgatttgtagcctatctattgtccaaactctattttgcaatagaagccatgtaaagtgtttgcatttggaaggtgcccattgcttccaaatcagttttacagctgcagagcttattctaccattaaactgcgctatgtagaatgactttgcgctgtacttttcatttgccgtccaccgccaagttatggtgtcctcgacaccttctgtgagtgccacgccattattccacgcatggtagaataataatacatgaagtgtgtaatccgtggccaattatgcaggacaattaggatatgatgatgttgttcacaccaaaattagtccatatctttattttctccgcataaataattagctgcataaattagctacggactttggaacttaatttgggaaaaagcaaactctttttattcagtacattgtgatatgatgtcaaaacaaaaattcttaaaactagaggcggcagctgatctggagttgtgtcccgtgactcgtgtcttcgccgccgatgccttcctcaccggcgccgccgccattgtcatcgtcctccggaggcaaggatgcaaatagcgccgcgaggctggcgtcgatctggtccagcgagtcagcggccaaggtttctccggcgtcccggatgtcgcggatcatctccaagaagtcgtcggagtggagcgggatgaagccggcgtcgacgaactcctcgagcgtatcgtagatggctctcaacgaggcgatcagctgcctggtcgtcgcgaggtggagcaggttgcagcgcagcagcagcgagccgctcggcgaatcggacagcttcgcctgcagctacttggcgaacgactccctcgcatccatgtatttgttggcgaacgacgacgtactgctactatg

SEQ ID NO: 11232 - DNA, 6302 bp, Oryza sativa
  unsure (1)..(6302): unsure at all n locations
ttatatctcgaaaaaataataaaaaacatgggacccacatgtcagctaaaaataataattttaaaatggtggccccacatgtcagctactcctcccttcttccccctcccttctctctcatattcatcgtcctctcttcttcatgtgcgcagggggaaggaggcgaggcgaggcgacgggaccatcccccacaccgacaccacccccagcgcgccgccaccgccggcatcttcgtcttcctcctccgccgtcaccgcctgcatcttcgtcttcctcctcgccgccgccgccgccgcggcaaccgcggcaagcaggccggcgacgacgacgtggagatggccgaggggaggaacaacaaggtcgccgacggcggcagcgccgatgactcgacgaccagcggcaaggcggacaccaaggtgtagctctggcgtctcaatcgatccatgagcgatcgagtagctcagtagcatgcaatcggctaagatttgctgcatgtgttctagtactagaagtaataatactccctccatctacttttgatagtgatatttccaaatctgaaaattttatttttgatagacatatttcaatccaacaacctatcatcttaataactttctcggatttaatgcacgactctccattcttccacacatgattggctacatgagcattgaaaaatgtaaatattaatgaatcgtttatttacgaggaatgactagtagcatgtttaaatagatgataagtagaattacttatccttggtctatgtgcaaagatgaaatatgactatcaaaagtagatagaggaagtattagctatcctaaaaggctaaaacacataacgtgtatgaaaggaaagtactatcctaactgaataaaacagcttttacaggcacaagtttaacataatatgtctgctttgatctttatttggaagttgtaattaaccatgtttgtaataacgcgataattaaacgagagtatccatgtgtcaagaggtcaagcgtgacctctcccacaccgtccatggcttccccgccgatgagcaccacgtccgggaggtgattgcgctcacgctccactcccacgcctgcgtcgcgtcgctgtcgcgctgcctgggcgtcacgctcaagatgctggtgctcgtccaccgcctcctcgccgacgcgggcccggcgttcgagcaggaggtgttttacgccatgcgccggggcacccggtccgtccacccccaccccccagcgccgccacgccgtggcccgctccagccggcctccttcgtcgctcgggccgcccgtgcgccgttccagccgcgcctcctcgtcgctccgccgcccatgagcgggagagagacaagagggagagagaggggacagagagaagaggttgtgaggataacgtgtgggtccacatgggcccaccttttttttattaatttgtgtgtgcaactgacatgtgggcctcacaagttttattatttttttcggatctaattgccacatcagcgccatgtcaataacacgttggacaaaaatctagtcaaaagaagccacgtcggcgccacctcagccaaaaccggagtcaaatactgccgagggaccttatttaaacggtttcgtaagttgggggatccgtcgtatcctgttttgtgactaagggacgaaaatcggactgggcaacaaataaagggacccaaagtgaacttattccgaattctttctaccacggattctgttgggccgtttctagaagaaaaaggaaaagggacggcctgtaggctgcattgggccgagcccagccaggctgagccagcacgtggaacgggccgaattcacggaccagtgcagtgcggttggtggggaataagttcaccttacgtccctcactttacacgagtctgtctaagttccctaatccccaatattagaaatcttcacccataaactatacaaaaccgtgtaaaagtatggatatgtggtttcactgatgtggcaacctagtcagcaagataaaaaaataaaaacgttatggggcccacatgtaagtgagaaggaaaaaaaatatggctattcaaatagattcgatgtaaagttaagggacgtcaggtgaacttgatggacacgaagttgctattcagttgaagatttattcaacatttattgtgatataaaattattctctctcattttttttccaagccgaacaagaccttagtttgatgttggtacggaaaagcctactccataatccacagtttggtgacaccttaatctgagagagtagttatctaggttatgcgtgcttcaggtccttacgctctcagggcaaataataatgaaattcacattacccacataactgtcttttagtgtgagcgtcttcatggcttaataagcccttgtgcaggcgaactatattttcgctttccacaatttataaaatttttaataaacaactaaacaaaatcattttagtattgattaaactacatgcggctcataactaatcatttaactatttgtcacttttaagatgtaatgataataaatttaccactcattttctatggcatatggtgcctatgacatgtgagtccagtgataaatatgttatcatcacttgtaatagtggcaaatataattattcctttatttttagccttccacaatttatagaatttttaataaacaactaaacaaaattattttagtattgattaaactacatgcggctagtaatctagagttgtgtcccgcccggcgccgcctatatgacttcctcatctggagttgcctctcgtcgccgcagctcgtcgccgtcgctgccgccactgtaatgatcatgagctggccttgaggtgtcacaccctgaagttttccccattttgcttgctttaaaaattggttaaataaattgcccgaagaaattatcttaattaacctagagctgaattccttaattaataaatacaattaataatcggaaatagcgtggtggaatttttcttgagttccccatgctccaatgcattaacaagatttttagtggaattttcagagccttggaaataattttaaccaattaaaaatcaccaaagtgcaatttttaatcccaggaaaaatcctttcttccttttctttttcttttccttcttttttctctattgggccgtcggcccactccctcccgcgctcgggctcctttctttgggccggcccgttccccttcccctctctccgggacgctgacaggtggggcccacctgtcaggtcgtcccctttcttcagcccgccgccccacgacggcaaccgccgncgaaaccgcccgcgccgncgccttcttcacgtngngccttcactccgcgcccgcaccttgcgcccacgtncccgccctcttccccgcatctnccggcccgcacgcgcgcccgcaaatgggcgggaatcgatttgaatcccccccactttctctctcttttcccccacgtcgccggccaaatcggggggtttcccggccatgtccgcccctttcgagcccctataaagcttccccgcatctccctcttccttttccccttttcgccgcgctctcccgtgccttctaccggtcgcgcgccgctcgccactagcgccgccgccgcctgccgtctcctgccgcgtgccgtcgccactagggccgccgtcgcgccaagccgccaccgcctcgcgtcgccggaaccccaccggaaccctatctccctcgcgagccggtgagctatccattcccctccgtctccggccagccattttggtcgtcgcggtcgctttctccatccctaactcctctcctcccctcctctaggtgtctccaccgctcgtccgcccctcctctcgtcgggtcgtcgtcgccgccttcgtcttccgctccggccgccgtgtcgccggtgagtcctccctccccccctcctttcctcaccttcccgcgagcgccggccacgtcgctgctccggccatgcgccgccgcctttcggccgtcgccgccgcttcccgcaccgccggtcaccgccgtcggtggccgtgcctcgccgccgcctcgccttggtcagccggtcggccttgaggccgagccgagccggccggcgcctccctcgcctcccctttgagccaccgcctggtggggcccacctgccaggcgccacctccctccctttggagccgctgactcatgggccccacctgtcggcgccgccccccccttcgctgacgtcagccctgggctttattgcgcaataaattgattaaggacttttctttattagtaaaaacacagtttatcttctaaaattcataagtaattcatccgagctccgtttaagtccattcaagtctcagtaaatcaagaaaaatgcaaagaatccattaaaaatggttttgtttcctgtttctgtagtcttatagcatgttttgcttgtgtgctttgtttgtcgcgtaggtttcggccgtttcgtcgatccgcagtttctcgaagacgttgctgaggtctcatcagttcgagagcaaggcaagtcatgcaatacgtttgatcatattgtacccaatttacaaatatcccgcatttctattaaatgttgcattcttttacaatgtaatgtgggatgggtcctattcctcagccacatattggttaccctatgccattgataacttgggtatcaaaatgactagatgttggcttagaaaatgcttagccatgcttagttcaactaatacacaaatggggatcactttattacatagactttgtctattggcatagctttagattggtgccaccgcaatggtgttagttaattaaaatacactgaatggtgggctgtgggtgcatggttttgctggtcgcacccatggcagttaaggaccggttcacgggaaaccctgggagacttaccgtgcttaccacaagcgggagtgggtaactgcttgatctgaagtatagctcgacccttctaggcaccggtggtgagggtgggcgtgatggaattgggtcggcaggggtgtccggttgtccagatgccggattcaccgcggcgcaagaggggaccgcccactgccttttgaggggtgggggtgaaaccttagcgtggtgtggatggttaggggagggttatgtggagggtcttgtcacgatttccccctttgcagtatcatggtgatacttcggggcatggcgacatgtttggaatcgtgtcttgtgggtacagttgtacacctctggccagagtaaaactattcgaatagccgtgcccgcggttatgggcgatcaaccagattcaccgtgattagtctcacccctagtttagcttaatgaactggtgtagttcaggtggttggttgggcctgttgcaacgtggtgtagcgttggacagtgattggttaatattgattaattactacagctgttttactgctttcaactactgctttgaaatgcctgctttatgcaaaagaacccctagcttcctttggttatatcctgcatcatacctcctcttccggtatgacttgctgagtacagtgggtagtacttagtcttgctctcttttcccccacaccagagttgaagttcttctcagttggagatgtcttgaagaggtgggtttcgtcgctgccgtcaagggttgcctgtggaatggaatcgcccgctgcaggagtcaagtcttcaggcttagctcgcttttaccttttccgctgcatttgtaatcctttatgtttttgtaagacgtggatttgtatgtcaacaattgtcgtttgtgtaccctggctggtcctggacaggggtttaatacacattcagcttagaaattatggttcgtgaatttctgggcgtgacatgaggcatgggtggcactagtacagaagagcttttttcatacgggcgaaatggatctttccatgcggctagcctgcccgcatggaacaaaaggtctgtaaaaatcgctatttctccatgcgggcaacacaaccgcatgcaaaaaggggattttcgcatgcggtccacatagccaaccgcatgcaaagatattttttagccaaaaaaaaaaaatccaaaaaccccccgaaacactaacccgccgcccgccgccggacgccgcgtgaccggcgccagatccacgctgctgcggccgccggccgtcgcggcgcagagccgtgcccgccgccctcgccggctgccactgctcgccgtcgccgtcgccaagcgtcgtgctcctccgtagggcggcggatccggccctcccgaggacgatgccgccgccgctctccgccg

SEQ ID NO: 11233 - DNA, 2376 bp, Oryza sativa
cccctagggtggcggatccggccttcccgaagacggcgccgcctgatccgccgccgctcccgccgtctcgtcgtagggcgtcgccaccgcggctccttgctgccgtcgcccgctccctcctcgcggccgccgctacgcctccttgcttccgccgctactcccgccatctcgccatcgcccgctgcctccttgatgtcgccgcccgctcctcctagctgccgccgccgccgctcccaccgtcgcccaccgcctcctgccgccgcccaagtgtgagagagagagagagaggacttcacggcggtgaggagggggagcggcagtgaggagggatggcagtggtgccgccgcccgagggagtcaccgacgacggagggatggcgggggagtgagaaagtgagagagatagagagagacgagagatgagagatctacagagagagaggagataataagtgaggggagaggaagagaagataaggtttggtgtgaaatttttgaactggtagagagggaaggaagagggaccatttttacatgcgggccacttaaccacccgtatgcaaaaattgattttttgcatgtggctttttagatttcaaatcgatttttatgtcactatattaactcatatgaaaaagttaccaaaaacaaagttgtagaactcatcaagatctacaacttttattttgaccatttttctatatgactttgtttgaatagtttcaaattgaatttcaaaatatgacaacttcaaacaaaattttcaaataataaatgatttcaaatagaaatgtcatcaacaacaaagtggtataacttatcaagatctacaacttttgtattggtcatttttctatatgactttgtttcgacagtttgaatttgaatttaaaattatgacaatttcaaacaatattttcaaatactaaatgatttcaactgaaaaagtcatcaatcacaaagtggtataactcatcaatatctataacttttattttggtcgtttcttcatacgataaagttatgtgtaacattgttcacaaaatgtacatctgttatatagttttataaactatagagagagatatgtaaattttgtgaaaatgttacgatcactttgtcggatgaaaaaatgaccaaaatagaagttatagatcttgatgagttatacaactttgttgttgatgactttttcaactgaaatcgtttattgcttcaaaatcggcgaccagcggaacagggagcggaggtctatgcgtttggcggcgagggccctcgttggtgggcttggcaacggcataccaattccatcccctttggcatcgagtcattgtatgtcagccatggtgccttgtaacaatgaccatgataacgacggtggtggcaacaacaattgtagtaacaccaccagtaccgaggaaggcttgtggcggcgacagtgaagttcatatattaacctcatgtctaggaatcgagaaaatgatcttatatattcttggaataagtttgtttagagatttatttgtaaaataagttttttaaaatggtcaaagtacttttaaaaaataaaaaaggtatatgctacagtgctacatgtcggctgcgcacggcagggcatgtccaacgccgtgacagcaggcaggcatttgccatccgcactgcatttttttgagcgaaaaccgcattgcacatagtccgtggattcagctcatgccgctcattccatgtgccagatcatcctaaccggacataatacaatatttaggtgacatgcaagaaacgataagatacctccttaaaaattcatctctacttttcccttctcttatagaaacggcccaacacaattcgggagaatttactttttgccatcctctaaaaataccagttctcaaatgccactctccccaaatttcatttccaaataccacctgcgtccacatgtcagccggtgattattttgaaactcgatgacaacatgaggggcctcatgtgaactttttcctacagaatcgaatgacaagggccggcccaattgggcggaatccgagctagtgcggcgcctccgccacctcctccacaaaccccgagccggcgagacgagcacctgccgccgctgccgccctcaaccggcactagcagagcgcagatgggcatcgccacattgccgctcgctgccttcgcgacagggacgagttcggctccgacctgaggcctctgcatgcgcatgcgctgctttggctcgcgccatggctgctcttctacttgcgcacacgaggtgttcgttgaaatgcttgggaagtcatcgcttgctaattactccaatctgatacccttgtattatatgtcccaggggagcacgtaaccaaaacatgg

SEQ ID NO: 11234 - DNA, 3455 bp, Oryza sativa
  unsure (1)..(3455): unsure at all n locations
ggtgcacgtgctccaccacttcgacggccgcatgctcatgctccacagcgccgccaacgggcggtacctggcggccacgacctcgccgtgggcggcgaccgcggcgcggttcggcctcggcggtggcaaccgcgtcaccctgcgcgacctcgaccggctgccgatgttcgccgccggctggtttcccatcgtgtcggcatccggggacgtcctgctgggtcacgctagcgaccgattcctccgagctatcgacagaggggatggcaatggcgtcaccgtcgaggtgtccgacagccgcagaccgaacacgccctgggtggtggaggccatccccccgatagaatccatacctcgccttccacatcttgtggtgagcgcgtcatgccctgttttttcgatcctttcttaactgattgcatgagttgggttctttggggatcaattgctgatgctttcttgaaccagagcttgcagattgtggcaagttgagttagttttgctcttctgggcgctattatttggttctgatgttgcgttgtttctgcctctgttgctaatcgtgcgtcctgagttgttcatgggaaagtaattcttagtagcattagtagcatttgggggtcatggtgtcaattctatttctgtatgatacattcgtagtggggagcagttcttggttccatcaggttgccatcttggttcttcagttcttgcttgtccgcatttgcttccttccagggtgcagttcttgggtcacaaattccattttcggttccgtttacttaaattttctgtccgctctatgaattttccttttccaagattatttcagtacggttcttgaaaatggcaacactacctgatcaccattgccgttctttcttaatgtgttcttggtcctcggtcacacagtgtgtgatgaattcttgcaaattgtaatgaattcctttgtgccatcttctttgctgcagggcataggacacattgcacgggcaatccggttcgtgcgagcagagcgggcatctactgatgggacctttccccatgtcgcctgggcttgtttcgagttcaccgggaggtcattgttcaatctgaggacggagctggcgcgtaggttgaactttgcagtggtctccgatgtcattatgtgtgttcgagcgggcttgtttggacggctgactcctctgatcaccgatctgcctcccaacaatgtgaccatggagatcatcgttgtcacggctgggacgattggtgagatttcgtttttatgtacctgtgtattactggttatcgccttctcttttcatgacagttctatagattacatgctcggtattccatagtcttggttagtcatactgttgctgcattttccctgacaacttttgtattgacatcatctagttaaggagaaactactgactactgtactgcttttaataaagttctatcacttgtcatcaaggaaactgtgcacatgtatagtaaggagaaacttatctgaatgttcttgtagataaggaaagaaagaagttgagtgaaaataagtagttattaagagtttgtcttgtggattttcagtctgtgtacagatgctaaatatggactgaaactagtcatgtgatcaggaacagccattttttagttgcatgcatagtacatactcatgctcaatcttgatatggataagactggttttatgcatcctcagtttgaataactcggttgctttttttttctttattttgccctggtattagtgttgaggggtttaatcccagatcatctcagtcagctcttgtcattatgagaaatggggccttcgatttaagacattcttacatgccttgtgcctactctaaccgtaaaagagttcacttgtacattagtaccatatcaagatacaatgcaaacactgtttccattaagagcaattttacggtccttaatgaggtaccatgaagtaccattttttctattgtaaatttggtacctcatggtacctaggtactatgaggtactaaaatttacactaaaattttagtacctcatggtacctcctcaaggaccgtagaattactcttccattaaatcatgcttccggtttctgctcactatgctggtttctatgagtttttcattttcttctttaacaaaagggtgacccagatgtttacatgatgtctgaattgagcggcttgcgagttacaatatctgtacctaactgccttattattttgtctggtccttttgcaaattcagatgccaatgagttgagattccccaatgttggtgcagtctagaggaagacagaagtgcaggagcagaacatctgacagtcactcccccattcatcgtttcagaatttttttgctggctcagaccgaatgacaggagaaatcaatggaataggcttcagaaaggaaaccaccatctgttctgtttcccggttgttagctatgggatgctctgatgtcttgaatgcctgaacatcgcgttctgacatttgctgtactttccattgtcatctgtatgatatgactgatgatccatacatttgcagatgtgaaatgttgtgctcaagtctgaatacacagagctcatctgtatgatatatagtactacatcttttgacattttttgctgtgattcctgtgttatcattgtgtttgatttcccttatgtctacaccaaaaagcagtcaacatcttatccagataaatagtggtggttggttataaagatttgctgcaatgtttctgactttggcaaattattttaattccattcacttatatgtattgtgcataagagtaaatataagatcaaacctaagcaaagtcagtttagtacttaaagtcttaaactgcatgcggccgatctggagtttgtgttctgttgctgccgatgcctttcctcacaaggcgatgggcggattgcgcgcgccngccggcgnccggcattcgncgccccgtcggcggggttggacanaaaacccgatcccgccgttggggcgtcggcaccgtcgcaagagcgccgcttgntgggggcctccactgctttntcttgctgccngcggcgacaaggatgaagctctgttcttaacttcgcacacgaggtgttcgttgaaaatgcttcggagtcggttcgcttgctaatcaggttgcttcttgatgtcacagggaaagcacacatatcgagcatggcattcacgggcgcggtggtcgtggacgacgacgccggccgcgccgtggtgagcgcgtgcgtggcgtgtggtgcaagtgcagcagctagctctcgttgcttccggcgaaacgggcatgacgtcatccagcatgtgggaccagcgggcccacctgtcagaggagccggaactgcggccccacctgtcagcgaagggggacaactcctttaaattgcggccggcttggcgctgacgctgagagccccgagccgta

SEQ ID NO: 11235 - DNA, 3776 bp, Oryza sativa
ccacgtgggtaaaaagtggcaaatagttataccacctctttatctttataaagaaaacccagaaatatatttaagatgggtatttgaataattgctaaatctaaaagtgacaaatggttaaattccccggacaaaaaccctcccttctcccccaaatcacacctgattcgggggcgccgcgccgcgaatcgctcctcctcctcctctccggctctctctctctttcctccatccgaaacctccaaaggcaggcgagggcgagggcgagggcgagggctatcaatggagtcgcgaggcgagggcgatggcgaaggagcctcaatccggcgagggcgagggcgagtaatggggtcggagggcgagggcgagggcgaaggcgaaggcgaggaggtgaagtgggcgatgctcttcaccctcccgatcccggtcaccgacgaggagcttcctccgaccagagacctggccatgagcaagcagccgccgccgctcatctcctttctctgccttccgcagcggagcctcggcgaggccgcccactgcttcgttgagatagtctgcgcggattctgctggtcggcttctcttgagcgccaagccgcggccagcaccggccgcaaccacctctgctgctctgcctcctcgtcaaggcgtcatcatcatctgcgacgccacaaacctcaaggtcatgcgcctcccgctgccagtcggcgcgacttgtgatgacaacgagcgcgggttcccatgcctggcggtactcagcgatccgcgcgacgaggaggatggcgatgcctacatcgttgttctactccatgcggacgcgagcggagccttccaggaggttctctgctatgaatccaagaccggaggagtactcgacacacagacccatgaccaggactggagcgacacggagacccacgaccaagactggagtgagaagttgctgtcctgcaattcgcagcagccaccgaggggttggcacagacacagccacagccaccgtgcgatacctctcgatggcgaggtctgttggattgatgctgcttatggtttggtgctatgtgaagttctgttggaggatcccaggcttcggtacgtccagctcccagaaggctgcacgatggatgaagacgatgacatggggtcgcctgctgttgtagagaagcttaggagacgttgtattggtgttagtgatggcaaacttagataccttcagatagacagttcaggacagtcgattgccgtgtggaccttgatgactcttaaggatgtcacattttgggagcatacattctcagtcgatttagtatctcttcgtgctgataagagtttccaggaagcaggactgaacccacacatattcccctcagtggcaggcattcatcctatcgacactagtaccattttcttagtgcagaactcaatcatattttctgtcagctcagatacaacaacttcttctatcaaagttggtgatcaccacaagttcctgctcaacgagaatgagatcactccgagtctgtttctccttccgtggctggttcatgacccagcagacctgcttccccaagagacaccaccgagatcaagtaagcacttctagtttcccttgtgattactacagtgtcatttgatacccccatcatatattgttagtttgctctctatattctgaaatgccaaattgtttttgctcctgccagcatgtttttatcttgtctgaaatgttagaatggctaatgtgggttaagtcatgttgcttgctgtttaggttattcaaagaagtgcctccccgaatatacactgtgaattgataccatgatactatattgttagtttgttctctatattctgaaatgccaaattatccctgccaacatgcttttgtcttctctcaaatgttagaattgttaatgggggttaagccatgttgcttgttgtttaggttatttaaagaagtggctcctcggatataaactgtgatttgataccatgagccatggtatattgttggtttgttctctatattctgaaatgctaaattgttcttgtacctgccatcatgcttttgtcttctctgaactgttacaattgtaatggggattaagccatgtttcttgctgtttagattgttcaaagagatggcttcgtgcccttaaactaaagcaagcactcaagagggggatcgtgtggctgagtgataaccatgaagttgtaactcacgttggagatgtaatagattttcttaccattcctgctggcggttcctttagatctgcagctatttgtgtcaagaaggttggttcctattgttcgaaaacagggaagatattgaaatttcacaattcgaggttacatgcaaatgatccggtcaaggcattgccaatggaagatttccaaatcatcaatgacgtggatgaagatgtcgagtcattgtcaatggaaggtatccacatcgtcaaaaacgtcaatgaagctagaaggtttatcaatcagtggattagctgccagcaaccacatagttgtataatggatgtggctaagtctgtgggtgtggaagagtgcattaatatcttgacgtaccttgggggtgaaaatgccacgttcatgctgatgaattccccgacattccttgagaaaaccggcaacaacttacgcaagtcttctgatttgaaggagtgggtctacctaaaagagtagcagccatttactggagacttatctgactgtataagaggaagacagatacaggagcagaacctctcatggtaaggtttccattttaccccatgtatggctggtcatctttttttttccctgacacagtttctatgcattaatagtcattcacttgtgataatcctttagtcttcagtttgtattttgtcctgcatcttttgtgacaaacttctgcatcgatttctttctaacagagcttggtactgttcttaataaagttatatccatttgtcctctaggaaactgtatagcatgtctggtttggagagacttacctgaaaactgttggaaataatggtttgttggttgccatacatactcatgccccgtccttgtggattttcaatctgtgtacatgtgctaaaatatggcctgaaggtagtttagtaattgggaataatggtttgccctggtatcgaaaatactgggtttatatcccaatccttggttgagaatgtttatgtcctggtagtagtgttgaaggatttaagcccaggtaatctcagtaatatcttttcagtctaagaaacaggttatttgttttaagataatcttgcatgctggttttcatctacaaatgtataatacacaacgctgctgacgttaaatcaagacccagcttatgatgtttttatatgagttatccattttatatttctatatatttattttcttctataacaagatgttttgttagatgatttctgatattgaacggcttacaggttgcgatatatgtacctaacttccttattgttttgtttggtcctctgcaaattcagctgcaatgtagatgcggtctagaggaagacagaactacaggagcctccacttgttcattcgtctcttcagaaatttttgttgcttctgatcgaatgacgcagaattggttgccttctttttgtaaagatagtagataggcacatgctcagaagccaaaaagaaagccgtcaacttttttgttttcctgttactatgtgttggccattatgccgtgaagtttacaaactgctgaaatttccaactacgtagaatgtg

SEQ ID NO: 11236 - DNA, 25066 bp, Oryza sativa
  unsure (1)..(25066): unsure at all n locations
cattgctcccttctgccctctaaataattggattttagagaggtgaggtgaggtgagagtacgtcatataatcaggaaacacatattggtggcagcccagagaatccaacagatagcgaggtgggtctagtgataggaaaagcacatattggtcccaggcgcccatgtgattgtctaggtacacatggaccgtccacagaaaatggcgccatcgaccacaattcagtgcaacgaaaattacgaaatgctactgtcactctacagaaaattcagttgacggctgagaattgaactcccaacttgagtatcgcatatactccgtacttgcctaaggaaaagacaaagtcgtcaatttactcagtttccaacgcttcctacaccaaacctcaccattcctcttcccactaaattacgatatcaaatactactacatcaatggcgtgtctgctcaaacccagccacgtgcacaggcctcgaaacctcccaggtgcccaccccatcgccacccccatcatatcgcgatccaataaatatatatattgtgtatatgtgcagtataaaaattgttagtgatgtgctcgaattggggttccaatttctcgcgtggtaattaatccgcagggtttgttcgattaatcaagtgatcaaaggcgcgcatggaactgcacggatcgggcattgatacgggaggagagggaggatcagcacgagacaagccacgtaccttctagatcgggctcgatctcccccacgccggagtccggcaacggcggcggggtcggcgccggcgccggcgactgcgtgggcgcgggtggcgtcaacgtcggcacgaggaaggtcggcaggaccggctgcttcaccagcggcgccggtgccagcgggcgctgcgccgacccaccgtccctgctcagttccggcacgcaccgccttcgcacccgctggagccgcaacctcctccccggcctcacctgcggcgccaccaggcacgccgccccgatccccatccccgccgccgtcgccatgatcccccctcctctccgccgatcctgctgctgctgtgtcgggcgggccgcgcttggcgggcggtggtggtggtggtggtggtggtggaaaaaaaggagtgggctgagtcgcggagacgatgagagagagagaagaggtgggtgtgtgggtttggttttaagcgagggagaggcgctgaggcggtggggcacagcaaaaacggatcgcggggtggatgagctggttcgctctcgctacgcgcgtggcgtgcgcgcgcgtcccaccgcttccgttccttctctccgttgcttcacgctaaacgaagaaatgtcatttcgccatttgcatttcacttcacaaattcaatttttataaatcacaatggaaaaataaattaaactacaactaatccttttttaaaaaagggtattatttatccgatatgtacatctaaccggatatatataattgtttaaattgaaaatttagctctcaaataactcaatctaaaattcgttcaaatggagatttgaacgtacgatcttgaggcgctaatcaggttaatacatgttctttcgcaaactataactaattaacgtatattcaaaattatttttttttattttttttgtaaaatgtagaaagttaaatttgatcatgcaatgttatgggtttgtgaagtgatatattacatcataaactatattattgaatttttttaaaaaagtttataatgacatctatacctaataaaaaaattcgtaaggtttccgtatggttttttcgtccgtcatccgaatcagaatcatgttgctaaaattgttttaatccgctcaatagtcgggatggatccttttggatctacctcaaaactaggttaatataggatatgtattaattgatgtaacatgtgatcacaagtagcagcttgcctacttggttagtgaagaaaatcttcattgtggccaccagggttcgttcccgccaccctcacctttttactcttattattacaggctttggcccatttaagtttctctcctacctattgattcatttttctttatttgtttttttttcgcttttttcttgggaaaaaaattcctcccgacgctttatctttttttttccttttttatgcggtaagttaggataataacaggtagggaattcactaaaaacaaagttcaatagaaaaaacacataaataatttagttaaaacttttaaaagaatagttgaaaatttcaaatatgtagttgaaagttttcgaaattcgagttgaagtttcgaaatcttaagtgaaagtattcaattttggtatagcttatttttttataactttttaattattaaagtaatttttaatttttagtaaaaaagagaagaagtaaagtagatggtaatactggaaactaattacgtaaaaggaaaaaaagaggtgcgaaaacagaaaagaggagacacggtagcaaccaactgtgcgaatttttttttcaatttttatccgactccttgcgcaagaggtgcgaaaaaatagagaagacaatgtggcaaccaactgcgtgaaaaagaagtctcgaaacaaaagataatataaaaaaaggaaaataggtcgcacgcgactgtgcgatggatgggctcaaaacgcgcaccacttaaattcgcgacgcgtatgcactaattaggagttttgtattattactcgcactgtctatgggcctctcctaggccagattgacctaccctacctaaaacttttacacttattattactcggaataagtctactttgtctccatatctcaaatcctatttgcgtgcaatttttttctctccgccactagcacggaccatgcacatcctttttttttctctccaccattagcacagaccatgcacattcgatggctgaaaagtcaaaagttttatacctctttcttcaacagatatttagtgattctgaaatcttataatgaaccagtttttaatttgaaaattaaacataatttttttttcttttcgtcatctgcaaaacacgacatattagagtccgcaccatctatcgtccacgcatgagctgttaagcgattcgtctccacgcgaatccgtgttggattttagaagtaatatcatgcgcgtgccatgcaagagttgagagagagcttgtgttatgacaatatgagtactatatcaatatgcaatggtgtttcttattagtcttgattatcattaacccaatgaacaatttatctatcttgaaatattattacatacatgttaaccgtgtatttatagcatttaaccttccattatacccgtagcgaagcacgggcattttgctagtgtaaatttacatatggaggcaggtgatgtccacttgatcgctttggcccgttggtttcacggtttttcaccgagtcaccggggactcgtgactcgtgtcgtgtcgtgaccccgctttacgtggcgcgttgccggatcgcgagggcgtcctctgcgtttctctctctctctctttcttttttgtttgggcttggttgtgttgggacgtgtacggtgtgtcctgtgttctgtgtgtgggctgtgtggcctttttgtcagcttgttgagataggttgtcaaaaactgagatagactttgcttgattgccttgtttttgcttttgccagcttgtttcagctgggttaacgtgattgttctagctagattttttgcagggggtgaagtgctgtgttgcactaatgatacagtggttacaaaagctgtgcacagattacaggtagtaccattggccatgagtgagagtttggttcatttgtatttttcttggaagccagcatgcagaggcctaaactatctgttgtttggctttaattagactacttaggaaatattacaatcgcatattcgcatatcaaccagctgtgaaggtgtttgttgctaatccttcattcattcatattcccagtttaatacgtgagatagaagaaccgaagtctcacgcattactctaaccggagtttaaattaattaagctttacttattttagtattcaaataagtgccaaatacttatccgcatgtaaagtttatttcattcacattagtaaatgtcgtcattgtcaagtgcttgtgacaatcatcttgtaactcaatcacgcaagtaattttactattagatcatgaactattgagttgcatgcaccgtacgtctccctcacgcgaggccccctcaagtctctagcgtggaataaaagtatgctgaaatttttatttaattgcacgccagccagaattcgaactcgagacatttagctctgatactatattaagttgcatgcatcgaccagtttaacccaaaagcttaagctgatgagtaaagacgggcaatttactttatattccaacatggaccgtacgtttaattgatatatcgagcacgatcaataatcaacaatgccacatttcggtcttgtttagttccaaactttttcttcaaacttccaactttcccatcacatcaaaactttcttacacacgtaaactttcagctttccatcacatcatttcaatttcaaccaaaatttcgatattggtgtgaactaaacacacccttcattgcatggtagagtatgtaattgaaaaaagaaactactcctggctaaattaaatcgacagcgatgggttacatatatcctaattacatactctaccggctgatcgtccgcgactggtgagttgggccacagccaatggcaccggagttgtcgtcggcgccacgacgacgagtaccaccatcgccgccggcggcgggcgtagctgctcgcaccgagtcgatcatcgtcttgatgacagcctgcgcggggaggatgacggtcaccctgtcctcccggagctcgcggatcttgtcggagagctcggcggcggtgtacgggcaccggtcgttgtcgatggcgtcgatcagggccaggatgtaggccttgttgccggcgatcgacttcttgttgctggcgacgagctcagagatccaggtgagccgcatcgccatcgcctgcctctcgtccatcgtggccagcttctctctcatcctcatctcgtcctcttccatggctggctaagctctggctgctcgtggcttctgcctgctaggctgctagagtacgtgcgtgcgtacgcgtggacgatgagtacgttgaggactcttgctgctgctgatgccgccgcgatgagaaaagtagacagccaggggtctggttatataggcagcaaggcacgcggtgagcngacgagccagtcgacgattcggagcgcggagtccgtgtcgnaaccgaaaagagctcggcacggattatgttgggctcgatctgtttagaatgtactgggctaaggcccgacgcccgtatccgggccgccgtcaggggttagaattttgaaaaagtatatactccctccatattttaatatataacgccgttgactttttaaacaacgtttgaccacatgtcttattcaaattttttatgcaaatataaaaatacgtatgtcatgcttaaagaatatttgatgataaatcaagtcacaataaaataaattataattacataaattttttgaataagacgaaaggtcaaacgtttgttaaaaagtcaacggcgtcatacattaaaatacggaaggagtacgaggttccttatcttgtcatccctcgactaacaaatccgggttagtctgtgttcctttgaaggggttgggaatccctcccctccgcacgtaaaacggagcgatagattaaaacatgattaattatgtgttagctgtaaaaaaaaacttttaaaatagattaatatgattttttaaagcaacttttatatataaactttttgaaaaacacgcaccttaaggttgtcagtatcccgattcgtattcgaatatcttacgatactacgatcctatcaagccgaaacgataccgatcacacatagaatcctaattttcataatatctcgatcctactattcattactacacgatccaacgaaatcttaggtagtatcccgatgttagggttacagataaggcataccttctatcctacgacttatggaatatacgaatatggtataccttcacgtatacggatcgttcccgtgtacgtggtagaaatccgttccaaattatggaaattatctctacgagtcaagcgatgtccaaagtcctactcggaaatgtatagagtttctgttataccgtaccagatcaaatatcctcgaatctttcttaggggtcaatacgatccacggtataaaagggaccctcaaggaggggtgtgaggacatccaattccatcgccaacacacccaccatagtttacgaagccggagtgcgcggagccaagtcgccgggagatctcgtcgaactcatcgactacgatcttatcggtatcatccgtttcgtctattctctttgtaatctgttctcaccatcatcaatctcatataaactggactatggctattacctgataaggggcttgagccagtataatccttgtcttttgtctgcttgatgttgtactacgtagacccctgctccaacgtaccccaatactcaactcatctggtccgcgagtatcactcgtcgacacccgattctacgatccctacgacactacaaaatattatttaaaataacatggtttgaaaataatgtaaataaatatgctcaaatttatataaaaatcagttaaatatatcaaaaccaacgtggtttttctttgataaatgtctctatttgcatgacatatatcattactacatttattttatatagaatggctatatataattaatataaatattaattaaacttaaaaaagaaaatctcatattattccgatactacgatacgatattactttaaacaaaacgatactacctagtatctcgatcctgacaaccttggataagttaggaactaggaggattcttagacggttttaactcggttttatctgatatagcagctgagtcagcgtggaacccacatatcaggaagaccacatcatcaccctctttctcctcttctctcccttcctcctctctctcactctcctctgggcaagtgaagtctgccgcccggcggggcgaggcggaactcctccatggtggtgcgcggaggtggaggcagggcggagcgctgcggcggcgaatgcagggctccggctgcactccgccgatttctcgccggagccgggccggagcatggcggtgggcacggacagtggcggatccagaaaatcgattcgttggtgtcataacgtgtctatcggtgtcatagtatgctaattatgtttagatcatagtgttataacatatggataaacagttttgctataggttttgccgaaagtcgtcggtgtcgcctgacaccgggtctagtactgtagatccgcccctgggcacggaggcggaggcggaggcggggtcaggctccgtggtggttggcgcggaggccggcgccacggaggtgaagacgggcgagagcatacaggcgggcgccacggcgacggaggcggggctccggcggaactccgccgtcgagacggtggctttccaccgtgctcacggcctctgcaaccgccgcctccgcttctcgcgcgttgttgtcgttgccgccgccgcctcctctctccttcctctgttctccttcctcctctctccttcctctgttctcgatttctatgtgggctcgaagggaaggctccttatgcatatacggtgttcgatgaaatgtttatcaggtatgatttgctgttttcatcgcattttcgccgcccttttgaggatcaatggatcatcagatgataatgacatgatctacactacatcgcagagaaatgatcggcgccctcgacgtcggccggttgatggatcgatgggctcgggcagcccgtggcgtttgtggccggcgcagttgcagacgaacaggaggacgcctgacagacacagcctctctggagtgatgacctcattgagcagaacgaggccccacctggtcagtgggacgaccaggacgcctctgccgtcgggcggtgacgtcattgcgcaggatgaggccccacctgtcagcgagcaggaggctcgtgcaccttttaaagtgctcgccttggcgctcgcccagagccccaagccgtaaccgactaaccgtcgagctcctcctacctgcgtctcgcgccgccaagaaacccaagatcatcccaccgcgcccccgtttccgcctccgcctccaccttcggcgttgctcgccggagcccggaagcgatggagcagttccacgacagggaccacgtgcggctgcggagccgcgtgcacggcacgtacctccacgccgatgaggacgggaggggcgtctccctgcagccgaccggggcatcgctcaccgcggtttggacggtgcacctggagggcggtagcccccagcgccgcctcctgctccacagcgccgcctacggccgataccttgcggccacaggcaagccggggccgagcggcctccgtggccaccgtgtcgcgcttatcaacctcgaccggctggacgacgagtccgtgtcgtgggaggcggttcggacggcgaaaggagatgacgtgctgctccggcacgccacggggcgcaacctacgcgccaaccatggcgctggcgccaccgttgacgatagatacagcaggatgctgctctgggtggaccaggtggttgaggccatcccctcggcagattccgtacccaggcctccaccgatctcaagggtgagcacgctacaccctcttccatggtacatcccgaattggttgggggcaggggagcgattctttagcccattactgcgttacctaggttcttgcagccaagctccatttctggttgtattcttgcgtcagagttagcgcattagcagagtttcatcaattgcattgttcttgatgaaatccttgttgtgttcttgctagatttcgtcctttgttgttaatcatttgcaatgagtttgtggcggtgagattttttgtgcaattttggcttagggggtagattgagttcatgaaagtggttgttggttccatctgtagttcttttggtcgaggtgctgaaaatgtgtaacattcttgttcttttaggaacttcttgaaaacactttcattttctgttcttgtgttatccaaatcctactaattttcagagttcataggcaggttggcatcacataaccgttgctgttcgtgttgtcttgcattggattcttcaacgtatatcctgttctctctatctcaactaatttgcggcgaatctgtttcagcgccaggacgggcctgagataagaaccatccggtttgtgccagcagctcctaatgggaccattgccgaggattggagaacctttcaatttactggaagatcagttcagcggttaaaggaagagattacaagccgtgctggggaggcaacccagtactgtgttcaagcaggccggtacggacgtcttatccctttgacacatgagcttcctcacaacactgagaccattgatatcatcattatgatgactggtactacaggtgaggagtttcccttttttattttcatgttctcctcgtatttttggtgaaagaggctcgcttgaatttgttgcactgagctaggtcaatagatattattgctgctcttactttttagttgtgcatgatgtcttaagtttgattctagtcagcaaagtgttataatcttctgcttgaacagatagtccttgtctggttagaaaaatatataaaaatctcattctatagattatatgctcaaggtagtttatacagtattgaattttgttgcgcacttgcgcacattgcactgagctaggcaagtagatacagttgctctaccatccatgcatatttgttcataatattattttagttaagtgtaatcatgtgcaaacgtatgcttataaatacaggcatttctatataccagataataacaatcagtattacattgcagatccccacatggataatagcccaagaacacaactttctgctcctgagtccttgggagaacatcgtgttgctgacattcagacatcatactcgcaccgtctgcatacaaacaatgtacttgagagtcagcaacggaaaacaggtataacacgagctgaacttgaattgaaaactaggaatatccactggggagatttgaatttggaggaaaagaagaggacaagaaaggagttgaaagcagaatacaatgaactcttagctgcagaaaattgcatcagtaaatcgcaggaagatgatgtaattacaaacgaaaattatgaaagagcgtcactccgggatccatgagtccgaggtaaggagacaggagtagaacctgaaatcttcagaattttttcgctccctcaggttccaaaaataagtagctattcagagtttggcttgttgattttcaatctgcgtaaagttgctaaaatatggcctgaagctaattttatgattgggaacaatgacttgttagttgcatgcacactcatgctaaatcctaacatgaaaaatactagttttatattccagtcttcagttaagaaaattgagttgcttcttttattttcatgtccagaccatctgtcagctccttttcagtctaagaaatagtgttagattaaggcagtcttacatgcattgcacatactttaaatataaatagttcacttgtactgctgtattgtatcatacaaataaacaatagacaactccattgccattaaatcatgacaacggcttcagtatgctggtttctagatgagttatccctgttgattttagataatttatgaatattgaacggcttgtgagttgtagtgcctgtaattaacttgtctttaatttcttgtttgatcattgcaaattcagctgctgatggtctgacgagatagaagtcacagaactacaatagcagaacctctgacatcatctcttcagtaattttcgtatcttcagatcaaatgacagagattggatgtcttcttgttgttcttttttgttgatataggcttagaaagggaaaccataaactcttctttgctctgaagtttacagaactgttgtaaacaccaagtactagaatgtatgcatgaacaactgtgcgttctggcatttgctgtagtttcctactttccttggatatctgtatataatatgattgatcataaatttgcggtgtggaatgttatgctctatttttgacaactgaaatgttatgatcaagtctgaatacaaggcaactctttcataacctgttcctgtatttttatacagatgggcggttttgatttccccccttcttgtctgtggcaatatatccatgtaacgaagaacaaagtggcaaatcctttgccacctcacctctccggagtggcaaaaagttaaatatgccatttgctgtagtgctctgaacttcaacttctgaagcaagtaagcagaatgcctgaacaattttgtgctgtgacaatcttttgtcgggaatacacaaaagatatgcgtattattgaattacatttttgtgatgtgctgtgacatttgctatagtctccattttatctgtatgataggaccgaccatccatacatctgctgaagtgaatttttaatgccaattgtaaatgcatgaggtaactctttcataacctggtcctgtgttgtcattcagaaatcaggtctgttgtgttaacatgcacagagaaaagaagggttagtaatctcggactgtccgacattagcttttcggtacaaaattgtctccccagaactacttttttttaaaaaaaaaaactctaacattatacatcaaaccttacagaacaattcgatactacctggaaatgaggcattccatgcttcttttttttaaaaaaaagaaataaaacaaaacagaacaactcctaaatcctaattacatgatcgcgagcaccatgggacgaagcgcgggtgaggatggctcgcacgtcgtcgagcatctccttgatcccgtccagcgcggcgtcgacggcccttgactcgcggaggtcgcggatctcgtcttggagctcggcgaaggtgaaggggcatgtgccgtcgtcgatggattcgagcaggtcacgcacgtagcctctgttcctggctatcaaccgctcggtgtccgcgaggaggtccgagatccaccccagctggatcgccaccgcctctctctcagcctcgttcatcatggccctatcttgaaatgaactagcagacgatgatgacgacgatgacaacgacgacgactcgcgctgagatggaacgaacgatgagacgcagcagctgagaccgggagttcggttatataataggcgccgtgcgcacaagcgacgaatcggaatggggagtccgcgtcggaatccgaaagagccgttgaatccgacacggattgtgttgggccgctttctgtaggatgtaacgggccgagtccggcgagactgggccggcacggcggataggaatgcagatgggttcaaccggctccgatcatccgatggacttttggtccgccgacctcggtggctcgatcagaatgtttttttctttctgacatctagtgagaattcgttatttagttatcttctttacggttgctagctgttacttcattttttttcctagctgttgactaagagatagtctgatatgagctcttagttaataaatacttcatccatcccataatataaggcgcccatgcatttcaagatttcatcttcataatattttgactaacatttagtacaatatgaattgaattttacttactaaaaaattatatcattgaattgacatttaaatttattttcatatggttataattttgttactacaaactttattatatatgagaaattataagataaaaattagttttgtagaccgtgtcaagtttgactataccttgtattataggatatagggagtactcacttagtgactattctcctataataatagttgagacaacaattaaattttttaaaaatgttgagacaacaaaactttttaatcattaattccccccaaaaatatattactcttctttccttttctctatcccgtgcaacaaaatatcatttaataaatgctaagattccccccaaaaaaatatattactcttctttccttttctctatcccgtgcaacaaaatatcatttaataaatgttaagagtcgcctatgagcttttgtaggtcatatttaaatgtagagcccatatagactcttagataatgcatgtttattaaagactatatccttacaatggtagagacaccaaagactctaaaccattaatccacaaatattatctttttattatggttcacacactcatgcaacaaagttttcattttatagaggctaagagtcgttaagcagttgttaaccgtagcaacaatgtctgtctcttcttgcttctctctcttccatctaaccaaattcaattgcatgttaacgtaaagagctcgttaataagaatcttgtacatgcccttgctgtgaagtttacaaactgctgaaatttcaaactactaagtagaatgtgcgcctgaacaattttatgttctgacatgcgctgttagtttcaatggttagttttttagttcgaatggttattgtgcatgataattgatgcaaaccgatcatccacccattccagaagcgaaatatacatatcgttcaaaaaagaagcgaaatatacatatgctcaattctccaattgtaaattaattcatcaggcattgcctgtgtacctttttcactcaaaactcaatttgtcccaacataagtacataggacttgaacccagaaagaaaaaagaaaatcaatccctggcattgaggtgggcccgcccctggacggctggatcagatcgacgggcagacatccaacggccttgattaaactggtcttttttttttgaaaggaaggcaagaaatttgccttatatattgatagagaaggaggattaaactggtcttgcccctgttctgccttacggacgactacggtgaagaccgtcccggactcccctgtccgttatccactccgattcgacgatgatggttcatcgtgtcgtacgccgcggcccaataaaaacagcatgtaaaaatgtaccatcaaaacgtgaaaagctgcagcagcagcaggaagaagaaaaaaagacgccggccgaatcgtcgacttggcgcgtgttccgccgattcgcaaaccccgctcacctgcaggctgcagcatcatccgcagttcccgtgtcgatgtcgacggcaggttcgtttactatcaccccaatccttcggtttttaaccagtacaattttgttttttctatataagatgtactccctccatataaaaagtctaagacatatttcattctttgtttttttaaaagtctaagtcttatttgtagtcactatgtggtaattaaattgttgattggaaccgaagtcattttatattagtacttattggtttcatgctcattggttttatcacatggtgaataaattaattggtcattggtcttgataaaaaagaaatatgccttagacttttcaatgatggagtatttggtcaaaaattttcctaaatgggttattatatctttttaaaagatttgtttcccataatgggacataatttgatttaatttgtgcgggcccatctattttatgtgcatttagctgaatatcttcgaattcgtacgagatatgttacatcgtgtatgtcttctcagactcatgacgttttccgccctacttctacaattactcgtgcttgtctatttgtccactcgtgacggacctatgtttttttttcttttgtcctgggtgtgctcacatagtcccaatcagagttattcatatacacaaacacactaaaagatcttaatttatcaaaagtacattaattacaaatagtgcaaataaagtcttacacacataacgtataaacaatgaaaacaaaatatatttgtgtatgctttttatagcaaatatggcttgattacatcatgattagtgattcatttctaatcttaggaaaagctatatgaaggtgctaatctttacacacttgatcctcctcatatttaccttactaaaaagaaaaatgctaagatttccatacaaaattcttggctacccatgtacttgaagtctagaatttacgtccccgaaatgtttatattgagtaccaaatttgaatcatataaatacttatatttagcaataattggagtaattgaataaataatgtaggtcaaaatttaggaaaaactcagtagtgtcatatacgctccccccccccggccattaccaaatagcatttgtagtattcaatttttttaatataaaataagcattttttttgggacaacgattcgccaagcattttcagccaataagatagaatttgtagcatccaatcttttatacaaaataagcattttgagaacaatgattttccaaacatttttcagctaataatatacttagaagggaaccaagaaattcaaattcaacccatgaagtgactaaaaggatatattttctcgtatatgcgtgcaacaatctaaaaagttgagaaaattttctacatacccctgaaaagttttgtaatctcttctacgccccttgaattttgcatcatcccctacatgcccttgagtatttattttgatctcttatatccctactttgttaattggctgttagatttttctaaaatgaccatatcgcccatttcccatacttacatggggtctacttcataatttacaatgtgaaaaattgttattcctgataaaatcaaacgggggcataattatttattgtaaaattcgaaaaagaaaatttaaattgttgaacaaattattttttgacaattttagctagaagttataaacaaaaattatatatttgttgggctcaaattttgatgaaaacagtgaacgaattacataaaagttaattcaaaatttatttaaaaattctagatttttttataaaatttattgtcatccattgttttaagaattgtgtttttatcactaaactagcacataagtataagagaggggtaatataatcaatttaaaaaatatttaacggtcaactcatgatcaactaacagaatgagcatagagaaaatcaaattaaaaactcagggtatataatttatgaggcaaaattcaggggcacgcaaaagattgaatgaattctcaagggtatatagaggattttctctaaaatgttaggaacaaatagaagtatttaacatcggaggaactgaaattgcgcactgcatagccttgtaatcttgggcttagcaatatgtattccttccttaaaaaaagattaattctgggtatgaacctcgacatgcatgcatcaagattcgcagttaggatataatatttttatagcacagaggtgtaaatttaatgtgactataagtttctaggcgtatacaaatcaaccaaataccagtagggtctttgattcgtgcaggcaaaccattagtcgtcttcttccttcctcgcgtcgcggcatccgccatcgaagctttgctcgcggctttctggccttcctcctgccaccggagacgccaccgccatcgccgcctcctactcactcctctaggaacctacgccgcagaaccctctcacctccctcctccaaccccgcggctccgtccaccgccgcctcgccgcccccgaacccaaatctaggtttttgttttggttcgggaaatctatggctgtcgtcaccggcgccaaagaggagggagagttcgccggcggtggaataataagtcgacgtccctccggtgagctaccctctctcccttccccctcatcccgaggttgaagatgcttcccctaatcctgaggttgaagatgatgccctggcaattggatcataacaggggcgggcccactattgattcaagggtattcagacgtatacccaagatttttagacaaaaaaaataagtatatgtactctatacctcgtatatgtattcaagaaattaaagaaaaaggctaaaactactcattttgggccctgtttcatcgtttcttctctattgggcctaaatttcccacttccctcccctttcatctcagcccacaatcagtttgggccacaactagttcatttcccctcctcgcctaggcacagcaaaccaaagccctaattcccaaatcggccaaaccctaaccagaggaccgaggacgtgcgcggtgtggcggcgaggacgtgcggcagtgcggcggcggcgacttccggctgcgtcggcggaaggcggcgccaaggcgggtaggagcctaggcagcgcgtcgggcggcggcgactgcagtctagtctgcagcgtgctcgtcggcggctgcggcagaggcttccggctgcggcgtgcgcggctgcgtcggcggcaggaggcgccgaggcgtgcaggcggcgcgtcgacggctgcggccgtgcggcgttggggctcggccaggcgtgcaggccgccagtccaccaggccaccacacaggtacgcgatgcggcagccgaacgaccacggcttgccggcctggcatggattgcgtgaggggcttgattcattgattcattgcattgatttgttctaggtagttcaatagtagttatgttttccggtggcgacggcttgtttcattgatttgttctatagtagttcaatagttcactagcaccgaaggattcaacttcctcagttcctgtcttctttatttttcagagtgttaactgttaagtgtatatttattgacagattgatagtataaagctgtaaatattaggaatttagataacttagaaccataatatttaattttcagtgtgttaaatttatatatatgatgatagtatgaggctatatatgagctgttgttaggaatttagagaatttagagagggtgttttcttcgatgaactatataaaaacaagaagcaagatgagcaacaatctacatttattggaagagaattttttgtacaagttaaaggatgaggacatcatcactcatttttaaaatatcaagcattgaaaagttctcctctaaattgtaagttttttttatcattttaccattttctatcctttacatgttatatatgttgccactttcatatgtcgaacaattagtacttatatatgttaaagaatttggacttatgatcaattctatcaatttataaagttatggccatatgctataatattatacaattagtaatgtgtaatattataccaattaattattggacttctagaagtaaaaagaattttgttttacccctacctatttcgaatacccaacctctaaatcctgggcccgccactggatcataatccaacggccaggtccaggtgactgaaatgtgcctagcgaatcctaacatattcgttctttggccccggcgatgagtagcaagtttattactctctccgtttcaggttataaaacattttgactttggtcaaagacaaactgtttcaagtttaactaagttagtttcatcaaatcaataattgaatatatttttataataaatttatcttgggttgaaaatgttactacctttttctacaaacttgatcgaacttaaaacaatttgactttaaccaaagtcaccaaagtcaaaacgtcttataacctaaaacggagggagggagtacatgccaagttgttgtgaattccttgcggataataaaagtcatcatcagtaaattctatatatttttcatatatatccaaacattatttcttttatcagttctacacatacttattgtggtatcagtgctttgatgagacggataccatcctatggtcgtgtatcagaataattaggaaagcctagtgctaaaagctcgaatacctatcctaaaatttctgggaccctgcttgaaaaccaagattttgtctcaattcagactgaaaatattttacacagtgaagaaaaattgtgcagaaaccaaacgtaaactagatggatcatgcattgtttcagcaccttctaattagctagttgtcttgaacagtacactccttgattcttctgtatttccacttattgttccaattccatggataacagaggaaagtaaccttgttgcattcggcatagaaatgggtaacaatttaatacaccaaagaaaactacaagatcgtggccatggtaaacaaatcgatgagaatgcaagaccaggtgtaaggcttgaagaccttccatgggtatgttcatcttaacttcttttctgtttgagtgttgggtagaaatgggatttatttataatctccaaatgtatgtgatgcatttgctgcaggaccttgtagtatacaaaattttatctaaattaccactgaaagaggctgcaaaaactagtgttttgtctaccaagtggaggtgcatctggttgacgtgccccagattgtgttttgatggtcttgcgatgttcaaatgcgaaaggggtgaactgttcttacacgctcggcaattcattgctcaggttaatgctgttttgcaaaaataccagggagaagtggttgaggaatttcatatcagatttgattttcacagcataccagctcattatcttgataattgggttatcttttccttgtcatctaagatgaagaatctagctttagatctgcaaaccaatgatattgaacgatatcctgcacgctacaaattcccctttgaacttttggacagtggaagcttgtccggtctacaacatgtgcagttcagttttgtatctatcaaaccaccttccaagttcagaggtttccctaacctgagaaagcttgatctgcaacttctagatgcctcttcaaaggattttgaaactatgctgtcaaattgcaaacttcttgaatggctaagcatggacagatgccgcctgaatggtgaacttagggtaggtagtccattgccccgtctggtatacctacaagttgtgtactgccaagtaaccaagatacaattccatgctgtggagctagctaattttgtatataaaggagactttgtgcccatagccctcaagcattcgttgaagctggaaaatgcaaacatcaggttatatagtttgaatgatcggcatgctatcagtgacctggtaaaatgttttccgaacttgcaaaatctgaattttcacctttcttggaacgatgcagaggtttgttctcagaaactaaccctccatgctacagttttagcttgtttaacataatctagtgaatgatctttgtccttttgttttccagactaagttgttatcagatacaccttggaagttttctcatctcaggtacttgcggttgaaaaactttgcagattctgggatcgtggagacgaatttttttgtctcttttctcagggctgctccttttattgagaagttagagatccatgtaagtgctcttatcagtaactactactattctccaaactatttcttcacttgtatgttgacatgtcatgtaatactgatctccttttagtatcctgggtataccatgcagtaaaattaggtcagtctgctcacactggtcgttcatgtcttggttttagcatgttataattgactgcatatctgtgtattgtttctgagaatctgtctctgcacaatatatttttgtacttctattcagaaaacaatttcgccgttgtttacccaggagcgtttgcttaggccgtgtttagttcgtgtgccaaatcttttttgaagtatacggacacacatttgaagtattaaacgtagactaataacaaaacaaattatagattccgcctgtaaactgcgagacgaatttattaagcctaattaatctgttattagcaaatgtttactgtagcatcacattgtcaaatcatggtgtaattaggctcaaaagattcgtctcgcaatttacatgcaaactgtgcaattggttttttaatgctccatacatgtgtccaaacatttgatgtgacagaatttttggaagtttgaagggaactaaacactgccttagcaaggttttctttcaatagagtcaagtgagagtatacaattattactttgcagagtgggtatattatcgtatttttgcaaaatttcccaaacagcttcactgcttatgttacatctggatacacacaaacatacagttacattttcttttttttaaaaaataatgatgatgataacaatcactagatgcagtatgtatcatatcctaggtacacatatattaaaggatgtggatctaaacccagctgatcacatattgttatgttttaaccatgcagttttccatgaatttattaatactggatgaatcgcatgaggaccatcctnnnnnnnnnnnnnnnnnnnnnnnnnnatacaataacctgaagaacatgcgtatcataggatataaaggttcaagagatcaggtcgaatttcttctacatgttgtggagaatgcccctgcacttgaggttttaactctagaggcagctggaatagagtaccaggaggtttcatttgtgttgaatgaagcgtggatcgacagaattactcagagtgccgatagatctgctctgattgctcaacagtatctgagggagaaacttagctcaaagacacagctttgtattaagactactagttccagatagagctagcgctctatgcaagccatgtgaaaatagccattagtgtaagattaattaaataatattattataaacttgaaaataattgagtttatttgatttttctaaaggaatttgaaagttttttttaaataaaaaacacattgtttagcagtttggaaaacatattcacggtaatgaaggaattgcaaaagtaaaaggaggaaaaaacacacccttaacatttgttactctatccatcttaaattgatcatcatacacccttagcatgtacacattctctcttgctacattaattgtattcggatgaaatctgtgtccatgcagttatatgatgatcaatttgagaaattttggattttattatatgataatcaatttgaacagatggagtattggttagttttaaaacaaacaggtcctattgtttagtagtatatctcttctctacaacttaaaaagtataagaaatttccgtcgtccgtaaaaaaaatatagagaaaagaaaaactaaaaaaagaagtccgattccccttaaaaaggaaaaaaaagttcgagaaaaaatagcgaaaaaaaggtagatccgattcccctaaaaaggggaaaaaaaagtccggttcaaaaaacagaaaaagtggcgaaaaaaaatagatctgatcccttaaaaaggggaaaattttcctattcccacgcacggtttttctttttttcttcctttttttcgtttcttttcagttttttctttcccttttttctttttctgtttttttatttcttaatactatgtatgtatacaaactttatatatacacatatacaacctttgtatacgtgtattttttatatgtttgtatataaactttgtatacatctctatctctactctctagtctctatctctactacttaaaaaattcaaaatgtttccttcgtccgtccctacttaaaaaattcagatagtgggaaaaaagggtttgtaaacgagaaaaaaaagtaaaaagggtgggaagcgcagcaaaaaaaaagtccaatttcttcgttttaatagtccgtatatatctcttctctatgcctaatctaatctaatctatttaaaaagagatgttttcatcgtataactaaaaagagaagttttcatcgtacaacttaaaaagaaaaaaatgcgcgagaaaataaaaacggtaaaaatgaaaaaatgcgcaagaaaataaaaatggttaaagaaacacgtgaggaaaaaatgtcagagaaaagcgctaaaaaaaggtttccgtagtcctaaaaaataaaaaaatgtacgagaaaaaaaaatatttccatcatccgtaaaaataataaaaaaacatgcgaggaaaaaacttttagaaaaaacgcacatttctaaaaaatggtttaaaaaaacctcgcatgaaaaatggtttgaaaaacgctaaattgatggacgccttgggtcagataggatccatcgatttttccatctcctacacaacttttgtttggtcatctattctcctgtattagagaccctgcacgtctctatatgcaattatcagactatttttgttaagtatagctactattgttgataacatatgatatggatataatattaaaaaataaacatatttttaattgttatttagagaagagttcacagtgactctattttgtgtagatttgaccatgcgaggtaatgtaggatttgattgatcgtattattggttgcaagaataagattcaaagagtattttagattatatgcatgttgtcacatgaataatctaattattttaggtaaagcaagcatcagtgaggttgtcatcgttgaggttgggccatttcatttaagatgttacaatttttttgattgtcttagctacaaacgatccatacaaacattgtcattgacatcgttatgtatgaaaatcctattttattattagaagtttttcacccgttgcaacgcacgggcatttttgctagtattataaaaatgagacatgcatgaaaaaaggagaatgcaccgcgtggccgtaactaggggtgaaaacggtacagaaattttcgagatttccggctaccgtttccagcttgcaccgaccgtttcagtcggtatcggtaaccgattgtggtggaaatggaaacgggtgatatcttctggaaatggtagtggaaatgggatggaggtttttccgaccgttttgtcggtaaccatatttgtacggtaatttctgtcaaaatttcgaaagttccccagcggctcagctagctcaacccattggaagcccatgaacagaaaaaaattctggtaggcttgcagcccataaaaaaaggggaagtgaccagggaaaatgctgttaaacctatgacatggcgtgtggattttgctgaactttggtctcctcaacttatcgatgtataagtattgttgaactttgtttatattgtttgtcaaacttattatcatatcattaatcatcatataacggtgttatgtggagtgtgatgatgcaagaataaagttaaaaagtcatctacgtgcatagttaaatgtgtgttatgccacactctggtgattccgacatgaattttcgacttccgaccaatatcggtatattccgttccgatggtcccgtttccgatataccgatatcggcgatattgccgatatcgttaccgtttcaagtaccgttccgattccctttttgagaaaaaaaatatgaaaatgaaaatggtatatggttttttctggcactattttcatccctagacgtaacaaacttgtgtctcacgatgtgtgtggtgtgggccccacccccagccgtaacagccggataaggggaatttaactatttagcacttttaggtttgacaattatctaaatgccctttttagttagatttgcagttaattttttgcccctctaaagaggtggtctcttagggcctgttcactttaatgccaaaaaaaaatcttaccaaatgctaaaatttggtaaagttgccaaaattttggcaacttgccaaaattttggtaggatttcttatatagttaccaaaatttaacagcaaactaaatatagccacttttttggtaactttatcaaaatttggtaagattgaaaatggcatcaaagtgaacagtcccttaactatttgccacttttgcccacgccgtggcgcgccagggtggcaaactttggtgaaaaactccgtgggacccacccgtcagtctctccctcccttttgtctcttcccctgtgttcgttgccccatc

SEQ ID NO: 11237 - DNA, 24439 bp, Oryza sativa
ggggggggggggggtggaacagttcttcgtttcatctgtcaggttgccacctatgttcggttcttgaaaatggcgacatccccactgctgttctttcttactaagttcttggtcctcagttacttcgtgtttgtaacgatcttctttgctgcagccctcattcggtttctttgcgcgtcgcatcattttccggcgattaacacataatgatttacaatgggtttggatctggttcactgggaggtctgcgctccatctatggaaccagctgtcgagacgaatgggcttcgaaccagaccccaactccactatgtgtgttagagcaggaacctacggacggctgactcctctggtgaccgatctgcctcgcaacaatgcgacaatggtgatattcgttctcccacctgagtcattaggtgagatatgtacctgtgcaagacttgctgtcgccttcttgttttatggctattggctaatgttctatagattacatgctcatggtattcatttagtcttgaatctctcgtgcgcattgcagtgctctagatcagtcgtactgttgctgcatgtttcatgaaaatttctgtgctgatttctttctaatgaaatgctatcaataaagtccaatccacttgtcctcagggaaaattcctatagataagaaaatggactcaagtaagaataagtaggtattcagagtttggcatgtggattttcaatctgtgtacagatgctaaaatatggcctgaagttaattttatggctgggaaggtagtagtgttgaggggtttaagcccagaccatcccaaatcccaatgagatcttttcagtctaagaaatagttgtttttttttaatttaaggcaatcttgcatgtgttgtgcatactctcactgtaaaaaagacaataagttaatcttgcatgcgttttgtatcatacaaatatacgatagacagcactgctgccgttaaatcattacaccagcttctgctcattatgctggtttctagatgagttatccgttttattttgctgttcattttcttatttcacaaaaaggtgacctcagatgtttttagatggtttctgaatattgaatggcttgtgagctgtaatatctgtaattaacttgtctcatcgttttgtttgtccctttgcaaattcagctggtttggggttgacgtgccccaatgttcatgccgcttagaggaagacagaagaactacaggagcagaacccctgacagtcacttgttcattcgtcccttcagaaaattacgctgcttcagatcgaatgacagagaactgaatgtcttctctctctctctctctttggtatcaactcttctgtttcccggtcattagatattactggccattgtgctctgaagttcacgaactgcattaagcaactaaggagaatgtgtacctggcaattgtgtgttctgacatttgctgtagtttctccatcgttatctgtgattctgtatgacacgagtgatgatcatccatacatttgcagaagtgaaatgttatgctcaagtctgaaatatagatcaggcaactctgcaaaagctgatcctgtatttttcatgcagaagggttgttttatgttttcccttttgtctgttgcaatgcatccatccacgtactgaaacttttatctgttaatgatatcggatttgcaccttgtttggtagaaaattgagccctcccagactcgagttatagagtcatctgggtgcaggttccaaattaattactaattaccgctgcagtgtatttcagacttgggagctgcagtatttgtgcttcccttcatgtccccagttttcagataggagtatgaatttactgttctgatcagttttcgcagtcttctttgcgatcatagaggatcacagcatgaaacattttctgtatcccagtcagaagtgaaatgttattctcaaatctgaatacatcaggcaactctttcagatatattgctctgtagttcctgtgtgtttgtatagaaagattgttttgaacttctgattttccccttttttttctacaccaaaaacgcagtcagatgaacaattggtggttggttatggatatcagcagctgcagtgtttcagactttggatctttgagcaaaaacaatttattttaattccattcacttagatacagtgcattgtacataagagtataacatcagaactaaaaaaaaaaaatcaaatcagtactgtactaagtgatacttaaccacatataacgcggctcatctggtgttgtgtcccgtcgccgccgaatcaccgatgccccttcctcaccggcggtgccactccaatcaccggcagaagcgtagtcgtcgacggcgcgtggaatgggccgaacccaccgactagtgcagtgcggcagcgctcgccgcgccggcggcggccgtcgtggcggcgttggacacacctgagcaatggcaactgccgccgccgccgcgctcatcggcctgtggccgcttgcgccgtcggcttgggttccacactggtgttctctgcccgcgcggccggcgacaggacgggttcggttccgaacgcctcagcacggctgctactcgcacaccaggtgttcgttgaaatgcttcggaatcgttcgctgctaatctggttggtttttgtcacagggaagcatgacagcacgacgcgtggcattcctagtcttcaccgacgaccgtggcaacaggcagcagcagctagctctcgttctcctctgctcgacgcctccggcgtcgcgagcatgacgccatcggcattgtgggccccatggcccacctgtcagagaagggggaggggaggtgcaggtgtgggcccacctgtcagcgaagggagagaactccttcaaattgcggccgccttggcgctgtgagccgtaactgtcgcaacgaactcctcccctccctccgctctcccctcgccggaaaaccaagaaatcaagaaagcaagagaaccctcgccgcctccgccgctcgccggaggcaatggagaagttccacgacgggcaccacgtgtggctgcggagccgcgtccacggcacgtacctccgcgccggcgaggacgggagcggcgtctccctgcacgagggccgcgcgtccgtgcacgcggcgtgggcggtgcacattctccacctcgacggcggcgacatcctcatgctccacagcgccgcgaacgggcggtacctcgcggcccccaggaccgggtggtcgtggaacagcgtcgacctgcgcgacctcaaccagctcccgtcgttcaccgtcgggtggttcgccgtcacggcgggttccggggactacgtcatgctgcgtcacagtagtagcgggctcttcctccgagctgatggcgggaacctcctgtgcaatagcgtcggcgtcgtcgtcgacatgttcgacttccgccgcagagagatcaggcagtgggtggtggaggccattcccccgagagattccatgcctatcctccccaatccttcggtgagcttgtcatgccctgtttcctttcctgatgcttgcagaattgattgcattactgggttctccggggatcaattcttgttcttgatcttttcttgtgtctgattgctgcgaattgtgttaattcctttctcctggatgcgattctttgctctgtttttgccatagttcaaggtgtccattctctatggtgcgcattcgtaggtggagcagttctctatgttcttcagttcttggttgctctgcatttgcttcgctccgtggtgcagttcctaggacggttcttgagaatggcgacatcattattgctgttctttcttactactcgtatgttcttagtccttagtcacttgtgcttgcaatgacttcttgtatacttttgttttgaaacttgacttcttatatgccatctaattctttgctgcagcccacagctttcagctggtgccgcatctggtacgtgcgagcatctcctcaagggaatttccgccgagaagactggcgttcgttattgttccatgggaggtcagtgttccatctaaggaacaggctggcgagtcagttgcgcatcagagagtcctctgacgccatattgtgtgttcgagcgggctccactggacgggtgactcctctggttactgatctgcctcgcaacactttggtgatagacattgtcgttatcacagccgggacgaatggtgagatttccttttatagtgatagattacatatttacatgttcatggtacttcttaagtcttgaatctctcgtgcacattgcactgagttaggccagtcataatgctgttgcatgtttcatgacaacttttgtattgatttctttctaatgaactgcttttaacatagttctatccacttgtcgtcaaggaaaatgtatacatggtttgttgagagaaacttatctgaaaattcttgtagataagaaaggagaaacaagtgaaacttcagagtttggattgtgaattttcagtctgtgtacatatgctaagattcagagttcagtgccttcgggcatccatctgtaaataacataaaaaataaaatgacttgttagttcagtgatctttgtaaagcttctttgttaatgaattagacaatcctgaagctagttcagtgattcagaacatgacttgttagttgcatacatattcatgctccttttgttattttgtcttgttagtagtgttgatggatttaaaacccagatcatctcagtcagctctttcatgtctaagaaaaagggtttttgactttcagacaaccttacatgcattgtgtatattcactgtaaaaaggttcaattgtacagttgtttcatacaaatatacaatagacaacactgttgctgacttacagttaaatcatgacaacagtttatgctcattgtcctggtttctagatgagttaccccttttattttgctgttcattctcttctttctcaaaacggtgaccccagattttttttcaactgatctctgaatattgaatggcttgtgagttgtagtatctgtaattaacttgtcttttttttttttttgctcctttgcaaaattcagctgccctctggttgaggtaccccaatgttcatgccgcctagaggaaggcagaactacaggagcagaacctctgacaatcacttcttcattaatctcttcagagttattcgctgattcagatcgaatgacagagaagtggatgtcttcaatttttttttggttgattcaggttcagaaagggaaactgtcaaaaaccttctgtttcccggtggttaattagctataggccattatgccctgaaagtttacgaactgctgtaagcaactaagtagaatgtgtgcctgacgaattatgcgttctcacatttgctgtagttttccatggttttctctatgattcgattgatcatctttttgtagagtgcaatgttatattcaagtctgaatacatcagccaactcgttttcataacctgtgaaaaaaaaaaggtgatgggctagacgtcctgagttcgaagcctcacccattctaattatttgatattaggtcattctctgatattcgtgtttttttttcataacctgtgagtgattctttgcttccatttgctagctgttggcctaacgctctgaagtttacaaactactgaaatttctaactactaaatagaatgtgcgcctcaacaattttgcgttctgatatttgctgtagttaatttccatggttactgtgtatgataattgatgcaactgatcatccacaaatttcagaagtgagatactgagatatatgctcgattcttcaattttacattaactcgcatcaggcattgcctgtcatctaacctggagtagtaaatttgacatcaaaactaaaaagaaaaaaaaatcaattccttcagtaattggttacatgcgcgattgaggtttcttcggcggtgggtgttcccaactccttaccttcgttttccacgtgcacgtttttaaaactgctaaactgtacgcgttttaaaaaaaaaatagaagaaagttgctttaaaaaattatattaatccattttcaagttttttaagctaatatttaattaatgagaacttttacggtacaatatactactagtatatactgccaatataaatgatctaacggtgtagattgaattacttaccacttacagtataaaattaaaaagggcatatttgtctttctattttattgcgctggggcaattccgttaattccagcagacaagcacactactgggtgttccttgcaagatccaatagtgattccccatgcccgtcattcaccccaggctaaggccgtcgttcacccaggcaaaggtgcaccggtgtgaggctgtcagatattgattaatttcctagtttgcattgttgatatgatgttcattggatgtttggaagatgtagattaagcgtattaattaaaggaattaatggtgattaagtactacatgcggctaccctgcttaagattgctgtatgttggtagacggtacagcccgagcaccggcctcgggttgccggacctagctccgccactccctataccattgccatcttcagattaaaatggcatagagtatttgtaagaacatgacccctcttgcagattgcatgaacgaagaagagggtaaagagtaaataacatacatctgtagactgcacatgtatgcatttttatgcacagatcagggcgtatgcttgtagagtgcgcatggtgtttaattctactccggctcggcagagggcactgcgttgccggctggcttgccgccagtatgcgggactgcatgtggccatgccaccacagggagatggcggctgttcgctttggcgggaagagggacaccgaggaattccgccgccgacgaggacgaattgcgccgccggtagggctcatctctccctctcactcgcacgacggcatcaacagatagggattgatctgaaaagcgaattactaaattgcccttacatttttttagcatattcctataatacccttgaaaatacttgcagtatatactaacagtatattgtactgtaaaagttctcttaattaattacttgttaatctatcgctccgttttctatatggaggggaacacaagtagtgttcggttgctgccgaacgctgccgacgtcttcctcatcgccggtggcactgcaattctcgccgccaccgacgtcgtcgtcggcgtcgaggtccctgcgtatctgatccaacgagcggcggaccgcggcgcatccctcctcccggatgtcgcggataatctcgtggatctcctcgacggggtacggcgagtagccggagtcgacgatcttgagcagcgagtcgacgatggtgttcatgtagccgatcagctgcttggtctcctctaggctcatgcatctgggctccggatcatctgccaactcggacacctgcaccgccgacgactccctctcagtctcagtctcatccatggcgattcttggctcgttcggcgacaacgacgatggctgatacggtggttcgattgagtcgatgagatcgagaatttgagacggagcgttggtctggttatattggcacgcacgcaggccatgcacgattcgtacatggactccaagtcccaaaggaaaaggatttgtattggccggttctaaaaagaaaaggactcacgtgttcgacaaccgaaccacgatcatgcagtgggtggtgttcatggtccaccgtacagtacatatatgtatgagaatcagggtttaatctggcggaaaaccgacaaatcccgaaaaaatttcgcggaccaaaatttgaatacaaatccctaagcttactgatatgttcacaaaagccggtcagcttcggcaaaattccaatagaaaccatcaaaatttcaataggaaaccaaaaggtaaaacgtgctgaaaactgtccggttttatcgaaaagccgataggtatcttcgaaaaaccgataagaaaaccaagtttgttttttgttagaaaaatatagaaaaaaatgtgataattgggaaaaaaaatcgtgaaaacgttatttcctataaatttgataacctcccatcgacatacccacgatatgtaatatatattcataaaagacagttcatatcactcaccaaccatcggccaaatagaatgcccatcaccaaatacataactctgtgaccgatatattgcaagaattaatatatttccagttgtttttcttccctgaagaagcatgtcatacaagctgctccttcagaagttcactattcgccgggcttcagaagttcactatggggtgcattactgacaattcaaatttgccgcagttaattttgaaatttggatttgggttatgaaatttggatcgtagttacatcatgtattttcttggacctactgaaagttgctctactgccaaagtgccaatgctggtttgggcctctctcagcgaagccttcatttgggcgcaattttgcaaatcccccaaccaagccatttctaccgccggccgtcgcggcgttggacacaccgaacccccgagccgccgccaccgtcaccgccgccgccacgcgaggtcggcacgtcgcagaatgtatctgggacgtcgacctgcggccgctgcctctgttgaggcctctactacagctgttcgccgtcgccgcgacaggacgaattctcatcttcttccgctccgttctactcgcgcatgaggtgttcgttgaaatgcttgggaatcgttcgcttgctaatctggttgttttttttttctgtcacagggaagcagacaatcgagtatgtgtatggctttccttctcctctacttaccagtagtcgtggacgacgaaactggctttttcgccgtggcgccatggaccttggtgagcgcgccatggtcgggtgcagccggcagctagctatcgttgcttccggcgcaacgagcacatgacgtcatcgagcatgtgggcccggaggcccacctgccagcgaacgcggggactgcggccccacctgtcagcgaagggggacaactcctttaaattgcggccgcgcttggcgcctagaatcccgagccgttaccgtcgcaacgacctcctctcctcccttcgctctcccctcgccggagctccaagaaaccaagagcgccgcgccgcgccggctctgccgctcgccgatcggagctccaagaaaccagagccccgcgcctcctccgccgctcgcccgagtggagcggcaagaagccaagaaccgcgcgtcgcctccgccgctcgccggaggcaatggagcagttccacgacgggcaccacgtgtggctgcggagccgcgccaacggcctgtacctctgcgccgacgacgacaggagcggcgtctccctgcagcaggaccgcgcgtccgtgcacgcggcgtgggcggtgcacatactccacttcaacggcggcgacgtcctcatgctccacagcgccgcgaacgggcggtacctcgcggcctacagggccgagggatcgtggaacgtcgagcggctcaacctcaaccggctgccgtcgctcaccttcagctggtacgctctggggtcgagatacggggacgacgtcctgctgcgtcacttcaagagcatgttcttcctccgagctcttttcaggagggatcgtatcagcaatagcggcgccgtcggcctttgcgcgatggaccggggcaccacgaccatgcagtgggtggtggaggccatacccccaagagagtccatacctacccttccagatcctttggtgagcacgtcatgccctgtttcctttgctgatgcttgcagaattgattcttgatcttttcttgatccttcggtgagagtcgattgcattactgggtccttcggggaccaattcatgatctgttcttgcgtcagatttctgcaaatagtgttagctccgttcttatctgcaattcttggctccattcttgccatatttcctcctctgttgctgatttgctaatcgtacatcctgcgttcatgggaaagtaattgttagtagcattttagctcaaggtatccattctgtatgttgggagcagttcttggttccatgtgtcatttcttcagttcttgccccctctgcatttgctctgctccagttcatgaaattggcgagatcacaattcctgttttttttccttactactcatatgttcttagtccttagccagtgcttgcaatgactggtgtgttctttgcagccgcccagttctttatccggtgtgtaccgcatctggtatgtgcgagcaaatcctgatgggattatctccccaaacgactggaggctgttcttattctacggtaggtcagtgcgcaatctaagtgcattgctgtcgattgagttgggcatcagaaggccctccgacgccattttgtgtgttcgagcgggcttctttggacggctgactcctctggttactaatctgcctcacaacaatatgttgttgaacttggacattgtcgttatcacagccgggacgagtggtgagatatccttttatagtgatagatttacatatttacatgttcattccttttgtcttgaatctctcgtgcacattgcactgcgctacatcagtcgtaatgctgttgcatgtttcatgacaaattctgtactgattcctttctaatgaactgcactagatcagtcataatctggaaattcttgtacataagaaaaagaaatcagctgaaaataagtagctattcagatttggattgtggattttcagtctttgtacatatgctaaaatacctgaagctagttcagtgccttcaggcatccctgtaaaactcctcttttattaatgaattaggcatcctgaagctaggtcattgattcagaacaatgacttgttagttgcatacatattcgtgctccttttgttattttgtcttggtagtagtgttaagggatttaagcccagaccatctcagtcagctcttttcagtctaagaataatggtttttgatttaagacaaccttagatgcattgtgtgtactcttttttgtttttgctgggccggcggaagagaagtcgtctgattttttgttaaaggatgaccccagatgtttttagatgatatctgaataagtgaatattgaacggtttgtgagttgtagtatcagtattaacttatgttattgtttcgtttggtcctttgcaaattcagctgctgatcggttgagataccccaatgttgatgctgcctagaggaagacagaacaacaggagcaaaacctctgacaaagtgacaatcacttcttcattaatctcttcagagcttttcgctgcttcagatcgaatgacagagaactggatgtcttcttttttatggttgatataggttcagaaagggaaagcgtcaaaccttctgtttcactgttgttctgaaggttatgaactgctgtaagcaactaagtagaacgtgtgcctgaacaattgtgcgttctgacatttgctatagtttccatggaagtgcatgattcgattggtcatcgttttgcagagtgaaatgttatgctcaagtatgaatgcatatttctcatgaccttttccctgtattttcgtacatatgtactgctttgtgtatggcaatgtattcatgtgccaaaagaacaaggcttaattttcttggctttgcattttggtagagaattgagcctcaaatttcagagccatttgggtgcaggttttcaatttcagatttagagtaggcttactgaataccttacttttgcgtaggtatatgttctgaaaaaacggagcaactcttgtgtttcctggttgttagcttcaatgcagacatcaaatcatctgtttgttatccctggtgctgtttctccctgacaagaagctgtgtatgttttggcctttatgttatgaaactttcagactgctgagtgctgacagcattaggtactagaacatatgcctgaacaattgtgtagtggtattggttataattttcaccttcgtctctgtgactgatagcaagaacatatggctgcttgacaaataaattccgcagtcaatttttcgaagttggatttgaattgtagaatgtggatcgtagttaacatcatgtataccaaaagctcagcacagagatatcatcctgtgtatttgttgtcgttctagctacagtagtaacaatgagtattttgtccttcaacctgttgaagttgttttcagttgttcacaaataggccatatacatttgttgagaaaaaatatcatccgagggcgtttggtctagtggtatgattctcgctttgggtgcgagaggtcgcgagttcgattctcgcaacgcccctattttactttctttttcataatttcatttagtgctgactttgttgcaactttgaactttcatcatgtagaattttcctgaatcctgatgtctactcacaaattatcttacgagccagtctttgaaattcatttggatttgaattttacgcaattttatactgaatcacttcctactttcatttagtgctgacttgttgcaactttgaactactttcatcgtatagcattttcctgatgtctactcacaaattatcttattaccgtattacgagtcagtctttgaaattcatctggatttgaattttacgcaattttatactgaaccacggaatcagttcatctttttttagcattgaaaaagttcaggcctctcaagcttggactgccacttgctccacccaacgcgcgagtctgtgtgccgccgccgccgccgccgctccgatggaaaccgccgcggcggcgccgccgcgcgtgcaggccctagccgacgccggcgtctccttcctcccggcgcagtacgtccagccgccggaactccgcccggaccccaccaccaccacccaccgccgcgccccgaccgccgcctccctctccgtccccgtcgtcgacctctcatcgcccggtgcgggcgacgccgtccgccgcgcgtgcgccgagtggggcgccttccacgtggtcggccacggcgtccggccggggctgctcgacgcgatgcgtggggcggggctcgccttcttccgctcccccatggaggagaagctccggttcgcctgcgaccaggccaggggcgccgccgccgaggggtacggcagccggatgctcgccaacgacgactccgtgcttgactggcgcgactacttcgaccaccacaccctcccggattcccgccgcgatcccacccggtggcccgatttcgtccccggctacaggtgattgcttgatcagttcatgccttgaataattgcaactggtacagatttttgcatgcttgaaatcattgagaaaaatgagagtcaatgttcagatatgataacaaatagaaagtgggcaaggaaaatttggtatcctacattttgggttgcctacttgcctctgttgttgattcggggttcatgttcaccgtggaggaatattatgtcatgcagatgatatgattatgagacttaattttgtactttcatttgaagcctgatagttctgcgcgtgtttgaaggatttttcggaatgctgtttgctgttgcattggcatcattgcatcatttctgtgtgtagtcattgcattgagaaaagaatgactcaaaaacatctagtgtcattgactcattgtacagtggacatatccatggaccatcacatattcgcatgagctgcggctttaacagataagctaataacttaatgttcgcagggacactgttgtgaaatacagcgacagcatgaaagatctcgctcaaaaattgctgcgcattgtctctgaaagtctgaacttgccaccttcgtatatagaagaagcagtgggggaagtttatcagaatattactgttagctactattctccttgcccacaacctgatcttgctcttggattgcaatctcattctgatatgggtgcaataacacttctaatacaagatgatgtgggtgggcttgaagtactgaaggacgggctgtggatacctgttccttctttgcctgatggaatccttgtaattttggctgaccagacagaggtaatattccttcacatgctttaatatatgctataccttctaatgctatctaatgtgtaatcaatatgctccaaactaccaaaatacattttgctactccagatgattttattcaagtattatttttatggtacaaattatctgttaggtaatttttgactctttaagtagtattaatctggcatttgcaattcattttagtttcattgcgaacttaagataagaatatggtcctgtgatacttgttcttgctactcatcctgcttgtattgtttcgaatagcttgtttactgttgtattccgagtagctgctaccaatgcgttctttccatataatttggctcctgcaatccaaatgctactaatgtttgcctttctctagatcataaccaatggaagatacaagagtgctgtgcatcgagctattgtcaatgctgatcgtgcccgcttgtcagtagcaacattctacgatccatccaaatctcgaaaaatttgtactgctccacagctcgtttgcaaggagcatccacagaagtaccgggatgtgatatatggtgactatgtctcatcttggtatagcaaaggcccagagggcaagcgcaacattgatgccctcctgatcgagcaatagaaccagaggcagcattatatagacagaatagagacattcatgcgtgttgtgatgctgtccaagattgccgatcttgattaataaagagaataacattgtaccatatgaatggttcctggtttttgaagtttctatgattcttatcaatacttcccttgaagcaaagctcacaattgtgatttctgaccaactgaccatcatattacaacatgacatgaacataggaaagaggaaaagatactgattcttaacatctatttcttgctaatatgatcatgctgtggagtaattcccagcttcctggagcctcacctccagtagctaagtttgtggtagtgggagtattgcactggtagctggtcagctggcggtagtatgtttcttcttgggatcagtgccattatgctgcagcctctcaggactctggaatcaccagtcaccaacagcatcaagctcctaagttcatcgctgaggtagtactgcactcatgcttatttctaataatgtaaatacttcttacacttcattgatgtgttgttataagttctatagcatatacgatcacttgtagaaaaaatttccatgaaacccatatggaactctttgaggtaaagtgattttcaataccggttcttctgcaaatctctttgcatcaataatgtaaacctacaaaaatgatgttcaataattaaggatatgcatggaaaacagggtgaagtcatgtcatgtgcttcctttaccagtaaatcatctaatgaggtttaaatacctgagacacattagttaattcatcatggacatatgttattatccatccatcatcttcatctattccattttcctttgcaacaaactgaactccagagcagaaggttttctcttttaaaacgtggtactccactgatttcagttgtttgttttcctgcggttgttctgaaacttcagtccaagtaaagtcatagacaaaaaacagttgatacttgtgcagtattttctgaccttatcttgcctgtcgaagtgtacctttgctatcctattatacttgaataaacctgcagcattacacacaatcgtacatattcagtatatgaagattgcatgagtaacttaaaatgaacaagcacatactgtaacaagacatgacataagcaattaaactgtcgagaacaattatatatataagtctcttttagtctttctgcaacttcactggtaggcaattacctatttcactggttgctactgagtcaacaacctgtgcatatccgtagttgtttttgaccccaacaaagtcttcattgataacaggaaaatccattgcaactttctcatctgtaagataaccttcttttgtagttccgcttttcaagtttagcctccattcatatggacgagaaaagagagtgccatctactgatggatcaaaaccttctgaattcttatctggctggagaaatgctcttccagaacattttgacttgtcgtcatcatgacttgcactagagagtaccgaatcaagtgttcgacaacctctgataacaacctgtttacaggcttttgccaatgagtataaatagacggaaaaaagcatcgctaatctatattttctatgagattatcctcatgtatgtgacataaacccttttatgttgggaaaattagaatgtttgaaccacaagaattacacggaaaaattgttctattagattgattttctgattttgtttctgtactctaaatgcatctatggtaaattaatgattacataactaggtccatctgaagtttctataagcgtaatatcgataggatttttggatctcgtgtgataatttaatacatgaatactgattttgtaaaggttctagcgaaaatactggaaaaatagccaaataggcagtccatagctaagtaaagctaggtagttagcatgttgcacactacaattttgattcataaggcaaaactacagcagaatataaagctttttctggataacagctaatcatatctatatatttctctggacaaaaataataagaccatcaattgaaatagcagaaagattaatccagaatgtgtattatagttgcctacagatttttttaaaaaacgatttcagtatggtgaacatatatacaagtgcagctacatgcctcatgcaccagatccactcatcccacctctagtatgaaattatcagtagtgttataaaaaaaaagaagcaatgtctgttctgaacctccaatgaccattaaagctgtttcatgatccttaattttatcttttgttaaaattgaacaatcacctcatttccatcctcaaagcaattaaataaatggtaactgcaatgattctccacatcaaaccagatgatggaatcagcatcaccaaacctaggcatcactccaatgcgtgatatcccgcccatatcattttggatgaatctgaagagaaacataaccacattattatggattattaagtcagtatgcatatttcccacagaagtggttgtcatagtaaagatggtgtatatgtatgggacccacggtttgcgtaaaattgtccttattaagccgaagtggagaggatagtccattataatattgtacctacaatataataattagtagttacaagaaaacgtattgttgacagcaatataagatctcataaataaaagctagcatactgtgcagttactccgatgtcatgaatgagttttccttcctcgaatttgagatcgaccttgtgaagaagcctctcaccatcagctagttcatgtgaaagaacatcacttaataatattgtaataaaatctaaaagatcatttttgcccacaataatagcaagcaagacacgtgtgtggttgagaaatttatattggttcttttgatacaatgtttgttgatatttctaatcttatctagctgtctttttttttcatgtaactattgccagttactatagtaatattgtgttccgtttacactttatttttattacttatatgccactcgataatttgcaaaaccccagcctggacaggcgctatcaaacaaggttcaacatggtggatctgagtgcatgtgctagttaaaaatacgagttgcatataacaaatgctacaaaaggttggtgtaatatactctccctgacccaaaatgtaagggatgttgggatagagggggtagcccattttcatgtattgttttacacttgtctagtgattgcatttatgttccaccaaatcacaacttacaggaaattactccaagcacatagtggggtttttcaatattagttcccatcgtcacgagttctccacttccacaaatcttctgtaaataaaatcatatgcatgtaagcccttgctatagatgaatgatgctgctcacaacagaacattatgaacaatttgagtaactttagttggcattaaaaatattccaagaacattatgtgtttgaactttgagttgatgatccatgcttcagtaatcattcaccatgtgaatttgtgaagttaagaaatggtggctgatggattaattgatgaaagatctctactgaaaattattgaataataatattaatatatcactggccttgcctactgttcatactaaaacatcaaacacacatttaaagaaataatgagcaagctgtaattgcataatagaatacctttgggtggctagtgaaaggttggtcccaagctccattaatgttgtaaggtcctagggtgcggagattattgatgtcaatttcgtaaggtagatgattttctgtggcagcaaaagctcgtccagcatgctgaaatatggaagtatttgcactgtccttcacaggctttccaaatctcacctataaatatcaccgaagatgatatgtagtgttaaccatcctcaagaccaagtttaaacaaaaaaatcatgtgcatctgacaattatatagctactcaaattccatgagaaaatgattcaacagcggcattcagctttttccactggagaaacaactaatttgttgagtttcagatattatgtaaatctattccactggagaacagtggaatttttacatctttctcatgtcgattcttcttgtattgaaataagaatatttttttactatgcagaaaaagactgtttcttatttatttgggtatgtatattggactgccttttcttatgcaatgcttatgtcacatccagtagttaatctgttctagatattgatttaacctgcacatcatattttcgccgtgcatctgcacatcatattagagctcaattatcctatccacctagtgtttacacttgatctaatactaaactatttaaaattaggaagacttacggtattaagaagaaaagcaaccagtgttgcacatggctcgccttcagcagatggaaggaaagctattttgttcttctttctctctaattcaaaagtgtctgtgtccacatatttgttcttgtacgaaatcctccattctcctaaattgctcttgctaaggtagatagcatgcaacattccatgtccttcataatacatgtatgatgttgggccaaagatggactctgcagctgtctgtgatgcattaagagggtttggacctgttcaaatagatcaatgttacacgtgcatagaagtttagcataaatctgattcattattaactttttttggttggaaagatgtatataagcttgtgagcctggaagtatcagaactcaccatttcttatatagacaccctcaggaaaatcttttggaacctctccattgagatcgtcaatgaaaacctcatcaccaatttcgtttacaggtccaaaattcccctgtagaagactcagatgaaaattatgccaaattgatgagtcagataaattggatactacaaaggagatggaaaaaaaaagttgctcgtcgacttcacaaatttgatgctgaacaatgtcatgtttgcaaattatatagtagcacatgcatacattaacaatctttatatttacctcattcagataaggctgctcagaaaacttgtacacggagtcgatgaatcggtccagcagatctgaagagactgatttcagagcttttgtcaattcctgcatcagtggctgcttattccacccagtaactgaagattgcacctgaaggatggtacattttgaggtaacctatcccttcttatattgcacaaaatattgacttaagaaaaacaaacgcagagatctgaaggtcctattgaggtagatgtagctttatctcaactgaagaacacaaatttgttacaacacattgaaaagtttctttgttttttttcttgggagaacttacaacacgtttcaaagttagtacttgaactgcttgctggatacatgtaggcaggcatgttccatccattggtttgtctggagacatcaagttaataaatcattattatttccagattagttaccttgacggcattaggtggagacaatgaggaagcttgatcagctgggctcttccctagatgaatgcatctagtgacctgggagctgcaccctccagctctgaacatggcttgctcaggttattcgatcctctcttgtcagttgtaaactgttactggatgttatgcctgctagttcgagcttgttgcattataaagtggaggagcagtaagccagtaaggcatgcaagaacacagacaaatatggtttatcccttgctatgcatcggccatggggaggaataaaatggtctgattggttcagactagcttaagagcaaacactacagtagataaggagcatattcttgatggtctgtgggtgcaataagacagggttaattaatcaagaacaagttgattaatatatggtcgcagaaatcagtctggaatcagctcaacaagggatgcaagtgcaactaggactgatttagtcatgtagtgatgtagatcgtgatttgtgacctgcgacctttgtgattgatttgctgctgggttggcagctctgtccgtgctatgagctcgtgaatggaaggaacaccagtggcgaatcacaatgacgctcatcaggtcaatgtctttttttgatgtaaaatcaggacatgttaatcacgatgatgctcatcaggtccatttcttttttaaaaagtaaaatctggacaagttaatcaccacaccgctcattaggtcaatttctttttttaaagtaaaatcaggacaagttgtaccacatggaatttcattacggaagtagttcaaattaggctggcttttttgttgtctaatcactcttgttgatatgtactccttccgtatttaaacatgtcattgttgattttattagtttgtggaaatataaaaatcgtatgggtccatttttccttataattttgttagatactatcgttatatttaaatacgaaggtagtggcataattgcagtgtaaaccccccaaaaaactgaagagatgcaggttttttgtacttagcattcgcaaatacagtaagagtttggttttgttcgtacatacatgcacgtatatacaagttcacaagaacagcagtcaaatgtggaccatgcgcaatggacgatgggttccaacttccaaatcttagtcgggccgttgcttcaccatgtgggctaaagatgccacgcgaccaaagcccaccaccacaagtggaccaaaagcccacataaaccgagggtaattggaccgacccaacctgggcttcccacatgggcttaaacttattcgcgccttctccttaccaggcagcccatcagaataggccagccgcgtacattcccaatgctcagagagatggactattattacgcatcatcaaaatgttaaacgaccactttcaaaagaaaaaaaaaagagcattgtacttgtacgaacacatataccttcgttgcaatcacaaattcgcaatcaaaagatccaagttcatcacatggccaactgcgcgagagatgacacaacacggctgaaccgctaaaaaaccgctacgaaaatgttttaggatcatctgtgcattcttctctgtttaaggttggtaacagagcatgcagtgctaccttcgtctcgggctcgtggcacgaaccgccaaaaatcgacggcgatatcaacctcgttttgtttgtgaaacttgtatgtccgtggtaggttgtagcggagctggaacagagggaaatacagattatcatagcaggaacaaaactggaaacagaaaacatatgttttgacccgtaaagccttaaatgtagaataaactcatctagaaaccaatcaactttttgccggatttcaagcaaaactagaattgctagtcaagtgttatatcccggtatttcaaataatataaagaaaacaggtgcaaaaatggtttaaaaaatcataggtagctcaatatcgcatttcaccattctatttgcccagatttcctacagctagcaggcactgaatacatttggtcctccaaactttactcatacccaaatgtctgattcagtctaaatggaagcaagaaaacaaaaaaaaaattaacaggataatttatttactacttccccattgaaatactgaacaacatttttagggggtagatgcacaatacaaaatgataagcgcctagcatctatttagttacctcacatagaacctcggcacttatggcattgcagttgcgcaaggctaccttcttgatgtgctaaagatcagacacaaaaaaggtggacaaaaaatcaattaataaaacttccatgctaactacaagatggaacattgataaatatggttacttcttgttggaaatacactgttgcaaatagagaagggaataatcaaacatttatcatcagaatctaataaaataaaagagagattgtttctgacatttgtaatccccttgaggaacacttacttctctggtagaagtcttgtgtagcgaatagacagctcgagtggcaacctgcaaatagcaatagatattaaaaattttaaacatcatgcaataatctcagtcatgtgtatgatggcaactgctgcccagtgccctcaccttcatgcccatagaaatgaattccatgtcagctccttttctgcttgtcccaaagggaggattcatgacaacagtgtcaacaagaaggcctacttcaacaggtagctaaaagatcagggaagcttttcaatgttgaaagcatctacgcttatgtgtataaatatatgattttgtttcaataaccattcacattttttttgtgacactatattatctttcttgacctgaacaatggtgcacaggctattgaagtactggagagaaagtaaatagctgactcgtatagtagcatcagctaggatactactctggatatcttctctaggtgctatctacttatgtatgaaataacaaataaataacatgcaacagaaaaaaacagtgtgaaaaaaaaactatgagaagatcagaagcaataggttatatagaaaaataattaaaaaaaaaactgaactaaaggtgcacttaaactaggtagagtatgtcatcatttaaggacaatacctctcaaatttaaattctttatatcacactgaattaagtcgatatccagctgcacatcaaacatttaacaaaagaaacatgtcattcacatagtcaagtattgttactgatcctagaaataactatccctgtgtccaaaaatatagctgtttatggctactatattttgggacagagggagtgatacattaaatctgagtctctgctttcagccctactttgccaacatttgcttagccatgcaaatttgaccactaatactaaagaacatgaatagagacagagacagtaaaacctatatttaaaaggataatctagacagattagtagatcaattgaacagaacaaaattattgcatctttacaaaagaagggaagcatactaagccatttatgaaatttctatgatgcattgataaaaataatccatggcagtagtacatataaagaaatgcaaactgcaatatttgaatataaaaaacatctcagatgtggagaactgaaaacaaaaatcaacacctgtagtgcatttcagtagttgcagaaagctgatttaagcatacaactttccacaatgctatttggcaggaagacgccattaacaatttgcactacatacagatgagaactatcagaaaattatgactacaataacatgcatagtttggtggtgatgcaaggaggatgctggaaaaaggtgaaaacgagagggtacatagacaatgtgaagatttttcaacttcaggctaaaccaatggttatattcggaaccaaaaaaatgctatacctctagatctgcagcattttcttgagcaagttcaagggattgcgggtcaatatcaattccaacaacatgcctgtgatttcacaaccaaagggacataagattagaaattgtaactgaacaaataacaacaaaaggcataaagatactgagtgatgaacctcattttcttgtttctaatactaatcgacgagcacttaagttctgtaactaatgtggtgagcaagtggctaggtgaactaatgtggtgatttactgtccactaagttctgtaactgatggtatatcaacacacaagcatcatggacagatatacttattaggt

SEQ ID NO: 11238 - DNA, 1624 bp, Oryza sativa
tatatattgcaaatatacacaaggttctactccctctttttcataatatggtatggtcaaacttggcatgtacggtctacaaaactaattttttatttataatttctaatatactataaagtttgtagtaacaaaattataaccatatgaaagtatattgaaatatcaatccaataatattatttctatcaaataaaattcaatttatattatacaaatcgttagtcaaatgttttgaaagttgaatcttgaaatgagtgtgcaacctacattatagaatggagagagagtattgctttaggaatttgccatggaattgaaaaggacattttaatgattttgtgctttgttccccatggaattcccatcgaatcatcccgtcactatcttgagtgagctagccctcccgatccgatcccttcagtgttgtgttggcgaattagagtgtggtgccatcgatggggacatggtatgttgcagaatccaagcccaagccgacatatcatggcagctggctgatcgaggcgtgtgatcgtggactcacagcggcaagtgatggcgtggattgctcgcggtgtggctaactgtggtgctggtggcacgactacctgcagggtgcgtggactcatggcggttgtcggtgcctcgttgtggtggtgaacttgttaaaaattatttggaggagcgtatccttctccaaatcacttttttttttgtggtggtgaaggatgatggggaattaatgcggcaaactgggggctcgcgagtgagggaaaatgctcaacaactcactgccccctgcccccccccccccaaacaatagtatggaaagacaatttacctctgttagttttatactgcaatgtatttaagtgggaaatcaaatcaatctaaaccatttgatcgtttaatactgaccaaatgacgctgcagtagtaccaggaatatcagtgaccaacctgtggacaaacaaattaagatgatcaacccatcatgcagtcaagatgtggttatgtatgtaaatcagctagcagtgattattttgatcattgcatgaaaacaagtgcgctagcttaacattagtgtgcttaccaatgtagatactccctaaggttagggtcacttgggcttggtgcatctgggtctaccatcaccttcaggtacacaccacaaaaaaccatgacaaacatcaaattaatgcattttaaagtcatcttgggttaagtaccaaacaaatttttctataatataataatgaaagaaagtataacttctggtctctgcaccaactacgacacatggtagagctcacatacaagggtgtagaatgtcctcatgtcattgccgccgacctcgaccctaggctggtgggtgaccatggacggcttgagctcgcagccattggacacggtcttggagccataggtgaccttgaggttggtgctccggacgaacgcgtccagcacatcacccacaaccctaccaaccacaagagggtccctgtccctgccacttccggccatcgatcttgcaaaaaaccctgaaggtttatagttttgcttactagctgcagctgctagctattgcagcagcagcaagttgcagggagcaaatatactgtgat

SEQ ID NO: 11239 - DNA, 775 bp, Oryza sativa
atacttttttcactctatttgtccaatcgtaaatcaattcatcaggcactgcctgtatacttttttccctctatttgtcccaacataagtacataggactaagctagtaaattttacatcaaaactgaacccaaaaaaaaatcaatcccttcagtagttggttacaagcgtggctgaggttgagcagcgttctgctgctgccggaggccgatgccttcatcaccgccgccgccgccattatcatggtcgaggctcgagggccgccgccgccgctagtagcgcctcagtgtccctgcgtatctgatcgagcgagcggcggaccaaggggcatccaacctccctcatgtggcggatcatctcgtggatctcgtcgacggggacgggagagcagccggcgtcgacgaacaccagcagcgcctcgatgatgctttgcatatcggcgaccagctgcttggtctcctccacgcggatgcggctggtctccgggtctggcaactccgacagctgcactgacgaccgcgccgccgacgcctccctctcatccatggcgaccttgtagctgctcgtcagctcgtgcgtgtgcgtgtgtccatgagaccgtgactacgacgatggcgatggctgatacggtggttggttcgaggggtcgatcgatgagattgagacgtagcgtggtgtggtgatatattcggacgaatcggacccggactccggagtccgaaaggaattctaaaagaaaaggaaagggaaaaaaaaaaaaaagagagagagagag

SEQ ID NO: 11240 - DNA, 528 bp, Oryza sativa
acccgacgcgcaaatagatccacggggtgtccatagcacgttttgggcaatcacgccagtcaccacgcttggcatatgctggtaaatattccacgaaactctgctcttatatcacgagcactcaccacgcacaaatccaccaaacacagatttagctaaccaatgctgttcttgctacaagattaatcagttatctgtaggtattgatcagtgatcagttgcagagatgaagtttgggaagctgctcaagaggcagatcgagcagagcctcccggagtggagggacaagttcgtgagctacaaggagctgaagcgcatcgtcgcctccatctccggctcgccggccgacgaggccgccttcgtcgccgccctcgccgccgacatcgacaagatcgactccttcttcctcgagcaggaggaggagttcgtcatccgccatagggcacgtacaccaattcgcttcaattcgttgtgaatttagataagttttctgatggcgaaatgggttcttgccttcttggttgcagg

SEQ ID NO: 11241 - DNA, 690 bp, Oryza sativa
  unsure (1)..(690): unsure at all n locations
cccgtcgagtcaacctgtgaagagaggtaaattatatggctcgatgaagtaattatcataaaaatttagaaatgaacaatccgaactcacgagtggtcggcagggaggacggtcggctgcacgttgcccggaaacacctgcctaagtccgaactgtctcatcacacgctgcgggcagtgaggctcaacgaaaatgtcgaacaccatcggcaggatggtgagccagtaagcctggtcgcgtgtgcacaaggacgaaagtcctagcggtgctctcgcagcgacggcctcttctgtgtacggctcccagatgacgtcgctcggctggagacggtcaaactcgaacacgaagtccgggtaacctcgtctcacctggacgtgagcgtaacgacgctgcaataaacatgatcggaattagacatgttatgtgaagaaaaaaaaagaagacgactgataaacttataacgcagcgaagttgcactaaccccacgtcgacaccagtaagtccccatcgtgggaccgtcctctggccactgcgcgctgcgaccaaccccgtagggtgcgctgtcaccactggtcgacctatggcaaacctctcggnctgcccaaagctgaagcaacatagggcagccagcgatgatcgctcccgcgtcagtcttcgtgcacgcctcacagagggcacggtacgtggctg

SEQ ID NO: 11242 - DNA, 738 bp, Oryza sativa
ctcatgatgtgcttccacaaatctttcttatgactgatggatcagttgatgatgaacataatatatgccaaactgtgaaaacggagctcatcagcagaggatctaaatctcctcggatttctacttttggactaggtaatgttaaggagagcgtcaaatatacaattatctcattattcaaaactcttgacttatctcctggatcacatgaaaattctcctccctactttttgcaccaacgctcatgtatttctctatctccaaatatcctttcttgtgtaagagaaaaatgcttacaccataagtcaacagaccagtcagtgtggtgatatatgctgccagcttgtgatgagacgaaccatattttaattactctgctgttttagttttgtactacttcgttactgattgcttacagtttacctgatatattctttttgctcttttcattttatcactggaataacaggtttgtattgcaaccactatttcttgcgcatgctggcatcaataggcagggggcattatgatgctgcatttgagacaggtaccaagcccctaaacccttttgttctcatcatagcaaacagtatgctcttacctttatgttggtctttaaacttgaaggttagaaaatgatctacacagtctaccctttctccatggatttcttagcttttcctgagacacacgatatatactgttatctcaaccacattataatagaaaaaccaaact

SEQ ID NO: 11243 - DNA, 1773 bp, Oryza sativa
ttttgcggcatgtatatgtgcctctcgatttgcagttttgattctccattgagccgttagttctattgttttcttcacagggatgctttgtgggttttgtaccttattgtggactgtgctgttggaatggttggtggcaacattattcaggtgtttgcttaacccagtgtttgtccaagtggaatatgttctcttttttttttttgttcatatggttcgtttgattgagttgtcttgaggtggttgaccgcaattcatggcgtgctctgcactaaattctgtactttctttataactagtttatgaattccagctgactaaatggatgcctttggttatattacaagagcaattttcagtaaaagtggcattaagcaagtgaaagtaattccttgctttgtcctatggaaatcaaacacaagaaggaatgtgctggtttagcagagtggtaacctggcttgtgtatcaaaaatgaggcagctaggaagaagaaatatgttgatgtgtactgaaatatgttgcttcgtgtcatttggaaacatattgtatagcttgttctttacttcagcatctagaagtacacatgatgctccattgctccttttatgtctggttgtagaatataatggcttgcagaatggagataattcggtggtgaagttatttgtcttggatgactatagcatattattcattggtgttgggtggttgttatcttgcctagcgaagttgattaacaacaacttggaaatttgtaataaataactcacatacactaatatttgatattttgaaacatctgattctactttccatccgtaggaaacatcaccattaaatgaacattaggcatctactagtatattatgtttaattatgttatatgagttgcattaatttccatgtttgtcttgttctcaacctatgaacggtttggctaatagggttcaattctaggagccgaggttaccgttggaagaagatcatataatactcaagtaattgaagtagaagatcacactacagagaatgctccaaaagctgatagtggcggactcttgaaaccccaattattttatttgacaatatcacaggtacatgctaaatgcagaactgtcttttgttctcttctttgaacttttggaattggagtcttactttgaagattcattgccatcttgccgataaagattgagggtggggcggatatttctgccacaatcagatggtctcagaagctacactatgacaatggacgattctcagtggacataccgttccgttttccatattatgttaacccattgccaaaagtattcatgaaaagggagaaaattcagttgactgtgaatagtggtttcagtaaagaggttttactgcagggaacaagccacccattgaaggtaatcatttttttttgctagaactcttttgatttccgggcaattggcatcagtgcttttacaacatttaatcttcaaaagagtttcccttactatttcaggaaaaaggtaggcagggtgagaagttgtctttccggcatgaagcaactgttgagaattggtcaagcaaagatttcaatttttcatacagtgtgagtttcccttttgtgatctctttattagctgtaatcggtagtcacttctttaagtagttatgagctcactagttcctgtgataatctgactttccaagacttctcaaatttttctttttttgtgagcatatgttagttgcagatgtaactgaaatctggctcgagaactgtttact

SEQ ID NO: 11244 - DNA, 2282 bp, Oryza sativa
  unsure (1)..(2282): unsure at all n locations
tatagggcgaattcgagctcggtacccggactagtctaagaaccacgtggatcggatgcgttgacaggtggatgggatggattcgatcgctatcgagtttttcgtcacgacttggctcattgctgattgggagttgtgaacacgtggcaaccaaaaacgtaggtgttgttgagattttagataaaataaacctttaccttaacaatgctatcaaaattttgacagaaatgtttatatgtagaccaaaatttggcaaaactaaactaaatgtgtacataactagataactttattaaaaaattgtatagtttaaaatgacatccatatgaacagcctcatagttgtctcgtcacgcgtttatcccccatcgtgtcacaacataaaccggagagcgtaagagcatgtctaataggccaaccaagatcggcgatagcgtgatcacgtcagtctcactgatatgctggaggagggaatggtagagcgagaacacgagtcgacgaaagaattatcaccggctgcaacacgcagtacaataaagaaaaagaaataagcctgatggagattggttcatgcttaaaaatatattatctgttactacaaatgatatgatagtaataaagaccattgctatatgagcagcctatactaacaggctatagatgatgtggttgtcttatagtcagcaagttgacgatattattaaatctgctttaacaagcgaaaacgttccccagcctcgcggccgccggctgcaaggacgcaggcggaggggctttctctcccgcgttcacggtcaatacggtcgggacgtcggccccggtaagagctcagggccatggcgtcgaccgcggactggcggcagtccagattcgggtgctggggtgcccggatccggtcccccacggacggacggcggcgtcctggtagctcggcgccgagttttggcggtgggtttggccggtgacgacctggcgggagacgctgctggagctagctccggtagccgagcacgaaggcgtggccggacgacgggtgtggtggtggaggtccgccgagagccggtggtgacgtcggcgatgcgggaggaggcaatgacgtttctagccagatctagctggcggcggcggcggctgccgacggcagcagtgacggtggcgacggctgtggcggcatcgactgcgacggttggctggcgagccaacggccgtggtggttgaggcgtcgtggaggcggtcgtgcggccctcgtgggtggcgaggcctgctgtgcaggcgtcgtggaggccggcggcgtgtggttgtcgtggaggccagcgtcgtgcggcagcggncagggcgtcatggaggccggcgacggtgtggagtcgcgaccggcgacatcgggtgctggtggctgcaggctgcgatggcggacggcttgtggcattggccgtggcgaccgtggacgtggctgcagtggaggaggtgaggatggcgacggcgaggtggctgggcattcggcatcagcggctgcggtggcggtgacctcggtctccggaggcatggcggcttcggacggctagtcgagggtgtggcagacggctgcatctggccagcgtggcatcgtttggaggaagtagtcgtaggccatgcttggcgcagataaggcgcagctgatggcagcggaggccgactcagcgcgagaggcgcgggcggcggagaccgaggtcggcttggcgtgagaggcgcagccgatggagggaggccggattggcgcgagaggcgtgtccggtggaggaggccgacttggcgcgagaggctcggccggtggtggaggaggcgacctcggtgtgaggaggagctgccggcgggtgtggcgcggtcttcggcacacgaaagctggccggctggggacgccggtgcaggggtctcacatgtcggcagagcttgagtggtggtggagcatcggtgcgtcagccgtggattcgcagatggtgagcggcgggtgaaaacctagcccggccttagccggaccgacaacgacggttcattccccctcctgagggcgttgtcatgctgtctcacccctcaagagtggttgccgggtgaaagccatgtcttggctcctctgagccccgacggacggcagcaacggtttttctgtcacttctcttcttgaagacgttgttttggcatccctagggggcgatcttgtatgtgttcatttgttggtctaacggcggtcggtcacgcttagcggcggccggttcggtgctagccttcttccggattgtgtgttggcgc

SEQ ID NO: 11245 - DNA, 636 bp, Oryza sativa
catggaattttgcaggcggcccccttgccgccctgggggagggcgattttgtactgtgctctatatttttgtataaatatcaatagttatcaaatctttttatattgaaaactatacaagattaaaatctccaagactgataaaatacaattttatattttttagggcatatttggattgttaccgtacaaatattttattaatttttagggcatatttggattgttagtgccaaatttttcttcacgaccaaatatttggtaaggtaaaattgcatttgatcatatttggtttgctgccaaaatgtaaaattgtagtgaagaatgttctacataatctcaaatctagattacgtattaccaatgaataggcttccattttcgtgtgttgtgtgctagtgggaaagaagatatgaagaggttgccttcagattgtcaattatatagcgtcgttttcactgcaatatatgtgaactcaatgagatacattattcattagatgtgacaagacgatcacgcgtgggcgtgattcactttatgtaaacaggcagcgccgaaagttgatagtgataactcgagctgccgcttttcatgtgtgctgttgtggactgtgcgcgctactggatctgacactacc

SEQ ID NO: 11246 - DNA, 502 bp, Oryza sativa
caatgaaacgccaactaaaacccgtacttgcgtgatcagtcaaaatccttctgggatggaatttcttctcatgtgtcatgactcgatgattccgcaccttgcaggaagctgtcaaactcgtcgctgaagggatttatcgcgcctgaacttggacagctgagcttcttgcaagagctgtatgttctgttttattgttttttcaactggttatgatgaattagcttcaaggtttctgaaggtctcctttttgggcaggtatttggatcgcaacatgctttttgggacaattccgaaacagctaggttcactgaggaaccttagggtcttggatttgggtgttaataggcttactggtcctatacctcctgagctggctggattgagcagcgtaagcgtaatgtaagatgccaattgatttgcttatatattcagggttttcctgtctctggtgcttctttgctattgaaactaaggctgctttcattcatctgctgtagaaact

SEQ ID NO: 11247 - DNA, 527 bp, Oryza sativa
tgcagccggcaactcagaggtacaataaagaacagtaccattggctacctttacttgaattggagtaagtaaagatttcacaccagtgagatgaggtaaaaccactgaactaagaaaactgcaagagctgcctgaatccaccaaaattaacacatcaaagccttgaatggacccttgtaatcgcaaagtatgtgcagaaaccgtgccttgaatggcctgtaaagaaatagccatcagactagaggtagaatcagcatcctgttcaccatcagaaacatcagctgccaaaacactgaaaagttcttgaacagcatgtaactgtactggtcctgaacacttgtgagtaggagaccacttttcagcacaaacataacaaagaccttgagctcgtcgataggccttgagagcaaccaatttgtcagaagaactggccactttaggaacttcagctgctcttttatcatctcccttgccagcatgcacaaatttgggtggtggtaaaggtaaagggtaagcgcctttaattc

SEQ ID NO: 11248 - DNA, 2212 bp, Oryza sativa
tttaaggcctctgaggatttccgcattggcgcgctccacttggccgttgcttctggggtgggcaggtgaggcgaagcagagcttgatgcccatgtcttcgcagtaatcgccgaaaagttcactagtgaattgggtgccgttatccgtaataatacggttaggcactccaaaccgggctgtgatgcccttaatgaatttaagtgcggagtgcttatcgatcttgacgaccggataagcctcgggccacttagtgaacttgtcgatcgcgacatacagatactcaaacccgcccggggcccgcctaaacggtcccaggatatcgagcccccagacagcaaatggccatgaaagtggtatgatctgcagggcctgggccgactgatggatttgcttggcgtggaattgacacgctctgcatcgccggaccaggtcgaccgcatcattgagagctgtcggccaatagaaaccttgtcgaaaggctttgccaaccaaggtgcgcgaggcggagtgggctccgcattcgccttcatggatatcggcaagaagctcgacgccttgttcccgaggaatgcacttcaggaggattccgttagccgcgcgccgatagagggtcccttctaccagcacgtagcgtttggagatgcgctggacgcgttcactcccttcgcggtcctcgggtagagtcttatctgtgaggtatgcttggatctcagcgatccaagcaatcaatctaagggagctgggagcgctcccctcgggtcccgaggcctggactccgacgggcctcgggggcctgtcaggcgcatccgtctcccctaaggggtcgggtcgcgccgacggctgggcaagcctttcttcaaaggcgcccggtggggtctgggctcgcgaggaagcgagccgtgagagttcgtcggcaatcgtgttatcccgtctgggcacgtgccgaagctctatcccgtcaaaatggcgctccatacgccgtacttggcgcacgtaagcgtccatctgcgggtcagagcaccggtactccttacatacctggttaacgaccagctgggagtcgcctaacaccaggaggcggcggattcccagtccagctgccaccctgagtcccgcaaggagtccctcgtactctgccatattattggtcgcccgaaagtcaaggcgaaccaaatatctgaggacgtctccgctcggcgaggtcaacgtgacccccgcaccggcgccttgaagagacagggagccgtcgaactgcatcacccagtgggcggtgtgaggcagctgcgaggggcccgagctggcctcggggactgagacgggctcgggtgctggggtccactctgccacaaaatcggcgagggcctggctcttgatagcgtggcgtggttcaaagtgcaaatcaaactcagaaagttcgattgccatttcaccacccgtccagtaccctctcgattatgcaagatttggccgagggggtaagacgtaaccaccgtgacccgatgcgcctggaaataatggcgcagtttcctcgaagccatcagaatagcgtaaagcatcttctgggcctgagggtatcgggtcttggcgtcctggagggcctcactaacaaagtagacgggccgctgcacctttcggtggggccgatcctcttcgctaggggccacatccctggggcgctctttgtccaagcggccttgcggggtgcactcgtcttctgtgccgacgacctcggggtcggaggacggcaggggcggccttcccacagtggcctcggggccgtcctgggggtcgggggctcctggcgtcgttggacaagcgggcaaagggccaactccggccgtcaggggccttaggccaccgttcggctcgggggcctcttctccctgctgtctcccgggtcgagtcggcacagggttagcctcggggtcagagggcgataggtgcggccttcccgcagtggccctcgggccatcctgggggtcgggggcacctggcaccgtctgacaagcgggcagagggcctgctccggtcgtcgggggcctctcctccctgctctctcccgggccaaaccagcacagggtgggggtgcgcggaatgaggattgtcctcatcgcgctccacaaccaacgccgcactaaccacttgcggggtcgccgctaagtagagtagcaagggttcatttggctccggggcgaccagaactgggggagag

SEQ ID NO: 11249 - DNA, 2024 bp, Oryza sativa
cacccatggacagaagctgcacgcctgcaccagcaccacatattgctcaaatttcggctaatgacagatggcgaaaatgtgcatttttgtggcactatcatctcatcaaactccaacataccaactcttctatgagcatgaatacagatttctgcctctgttaactcttcagaaactgaaagcatgtgaaaattcacctaaacatttccactcgatgcgtatgaccagtactccttgacgagctctcggaaaagagaaccttctgtttccatgagcttcgtaggtttgtcatactccaccactttacctggaggtgaatacagtttagtatagaacaattagccgaaaaaataggcattgtaagtcttttttttccttttgttgttggtcagtgttcactgtacgacgttaatacagaaagttagaagggatacattgttgggaaaatgcaaaaaagttaaaagcatcacacatcagtgaaaattggggaagcagaattatccacgcagtttcaactttcaagtataatccatatattccagaataagtagtgctgatccattagacaatgatcacaggataaatatatttctaataagttggcggtaagaaagacgtaccatcgctcattgcaaggaccattgtgcagtccataactgttggtatacggtgtgcaacagtaataacagtgcaatctttgaactctgttctgattgttttctgaaggatagcatcagttgcattgtctatagaggctgtcgcctcatcaagaactaagatacggcatcgtctcaaaagtgctcgtcctaaacagaagagctgcctttgacccatgctccaattcgacccatcttccacaactatatggcaatatcacagttagcatatgaataatgtagcttcattatatcatgctagaatatgagtatggcaaaagatatctacgaaaagaatggtatatgcagcccccaaagtatttctagctacaatttttgtgatgtaaatgaaaagacatattttgaaaaatacattggaaacagaggaagaggttctttaggcaactcgaatctcatttacaaagtcattttccgtgacgattcggcaatagtgctaaaagagtggaatttctaattggttttttaaagttcccttcatgaactccaatatatatcacaagtgtgttttcagcatttttagtattgactgcgaggatgtgctcagtgctatggatgtttttgaaaaagagtctgggactaatattggttccagattttagtgacatgtatttttccctcatgtggccaagctgttaaggaaggacacagaatgaattcaagaaatcaaagtacatatgaagcaatgtcccctaccaagtgaatccaatccctgttccttctcctggacagtctcaagaagttgacatttgtcaagaacctgcaagagacaatagcaaacataaggaatgattcctataaaggcgtccatatgcaaaaaaaggactaactaaatctgatgtagacttccaaagcctttggttatttaatcacataaactgaataaatcgccattgtcaagaaaagtaaacgacttccatgatttcaacaatacatcatggtaagcttatctaatcattgattacaattaaaaaaagtgaataattgtgtagggtacacatcttacctcccatatctgttgatctgagaattgcccaagggggtctagattgtatcttaaagtaccctggaaaagtgttggatcttgtggaatgatgcccaaccgtgatcgcaggtcatgtaagcctattgtggtgatgtccacagaatctatgattattttcctccagcaggttcaacaagacgaaacaaaccaccaatcaaagttgtcttgccacttcctgtccgaccaactataccaatcttatgtccaccttcaaatgtgcaagtaattccatgcagtacaaggggagcatcttgcctgtacttaatctgttgaatgaaagtcagtagcataaaaacttgttagga

SEQ ID NO: 11250 - DNA, 590 bp, Oryza sativa
gcttctgtcaaacttcccagcaatctctgtgatattaggtcttttgattattggaaagacaatgttggttacatttattggtagagtatttggaatttccaccatagctgctgttcgggttggtctgttgcttgcacctgggggagtttgcttttgttgccttcggagaagctgtcaatcaggtttggccctggttctttctgtttttttgtattgttttaggtgataagatgtatatgtcacacacatctgagttaagacaaactcatggacaatatttttgcagggtcttctatctcctcaattatcgtcattattatttctagtggttggcatttcaatggctcttacaccatggttagctgctggtggccagtttttggcatcaaaatttgagcagcatgatgtgagaagtttattacctgtggaaagtgaggtatcttcttttcactctcatagaccaacccatgttttaccttctgtttcgatgacctttttttttttgctgcaatagatgacatttgcaaaaacttagtatttttcccagtttagtttgtaatgaactgtcaagttcacagattttaacaaga

SEQ ID NO: 11251 - DNA, 4871 bp, Oryza sativa
tacgcgctgcaaaattttaatgttggtgcgttcaatgattaaaaaaaaagtgttccttcatgtgctatgttcgtggaaattctggctctaaggagaaccttttcctgaattgttagcccctggctataaaccagctaacgcaagtatctgtttttgaccaatttcaacatttttcattgcgggtagcatctcaactaagtttgggcaggatggagtcagcattaactgttctcaggcactcctgttttccctttggaaaggcagcaaattagtctacagtgttcagatgtgcaggtaaaaatgttagtggattgactctatccttgggaaacagtcacacttaatgagttgatagtgcgcatcacaagtccctgcatttttagtacaaggatcttgtttgcttgactttgtgtggttaggcctaccctaggattgatgccttggtagaatacttatccaacatccatcgtggccctattgctgttctttcacatgtagaagtgttggatatgctaggttgttgatttgctattctttttactcaccatgctgagtaatgaaattctgcatgaggaatagtgtaaccttaagtttcttttacatattgtttcttgtgtcatcatatgcatttctttttagcagaggcatactatgttccgcagaaacttgtgctctgatgatttgagaattgagatactcaaggcctcaagggatgatatggataccacaatatacaacaaaaagttcgcatggcaattggatctccttgatgtaattggctgagatcaatataaagcttccattatctaaaaaaaatatactacaaaaaaaatcaacaactagatgatgcttttgaaaaactcatgatctcctaattctgaagtcatctacttttttttcctgttgttcttactctacgtaacattgacaatagtcatggtagccagatagcttggtatggtagctttaagatcaccccgtatgagtatgaggtataatgcatcttgttcatatggagataatcaatatgttgaaaacttggcactttgcaatttggcattgtaaaatccagtgctttcttagcaatattatatctagtagtacagtagttactaatgttaagatgtctttatctttttcttgagatattatgttatccttttgcagtcgaacaaaacatggaattgttacctgaaaattcatatacatttgcagtaatcttgcatcgcagagaatctattcttcgatgctgtcattcactgtaccagacataaacagtacagttacgaaattattgtcgctgggagctgagttggatgggcccatcaaatatgagatccatggaaaggtaaccaatagcccataactatagaacatgtctatttccattgtttcttcaaaaaaattttgtgatactagttttcttttttatacaggttgcagccgtacgatgcatcgatgggcacatgcttggccttttcgaaccagcgtgaagaacctacactgcaatgtacataatgaaaaaattatttcaatttcttgcagatggtatgttttatttctgtggactgaagttgttgttgacagaagcaactgactgggcctgtagtgtctgaaacactgatgaatagttagatgggcatctctttctgttaagagaaaccagtatgagaattgaggtgctgtagctctttcgccaccgtttgcctggtaattgcctgtcgtattgcaatcggtagagagccacactgtcatggctctgctttataatggcctgaactattgctaacttggcaatgttctcatataagctttcaaaatctaatgcatggaatattctattaatgttgaagtcaagatgatataatttagtatctactttgagcaactggcataaaaacaacggtatttgatgcaagcacttaaaaaaatctgagctaaacataagttgttaattacgaccttaatgtccggctgactgtctgtagataggagcagatacatataccagcctttgttgtactagccaccagaaaccagtgatcagaatatgatcaagaatctgctggaatcctggctggagaagagaggcaaccagcttggttccatgcagaaacaacaatcaggattcagtacttgctccgtcccaaaaaaagacaaaccctaatttccatgtccaacgtttgaccgttcgtcttatttaaaaaaaattatgaaaaaaattaaaaagataagtcatgtataaagtattaatcatgttttatcatgtaacaacaataaaaatactaattataaaaaaatttcatataagacggacagtcaaacgttagcatggaaaaccagggtttgctttttttttttggaacgtagtcatcaacaacaaacctgcacccactcgcatgagcacatcaatcaacaagaccttttcttttgtcacatctattcatatagtaccatgcacaagtcaacctgcctgcaaagctgctctcccccaatcaatctcctgcacatgcactcaagaattccctatggttatttaacctttcaatccttgcatgtttgatattttgattgatatttgattgataaaggtttctcttttttttttctcttgggaactgattgagtgattggaaaaaggttagaactcactgcaattgttaatttgttatcaactgctccatgataaactggaaaatgatggttttattatgttgcaacttgcagtcagattagttgctgattaacagccagtgcctgctaaatatagcaaagcacacatttcctcttctctgtgctgattaatctctccctctctttgttcctcttcttcctcctcagacatcatctccaataatattccttcaaggaagccgcttcgattcccacatcggagatggcggcttcctccggccgccgccacgcgccgccgtcgggttaggaagggctcgaggttggagaggcaacaatggcgatcgcttcgtcatcgtcgtcgttgctgctgctgatgtttcttgcgttcttggatcatggcgccgcggtggcgaacctgtcgtccatcgaggccgccgtccgcgaccgcgcgttccagctgttccgccgcacgagcgagatcgtcgccgtcgacgtcccggcggtgctcgccggcgccggcgtcgaggcctcggcgacgcgcgtgcgcagcagcgccctgtgggccgatggcgtcaacgccaccgtgcccgggctcgccgtcgccgtcccgccgcgggtcgtcccggcgccgttcgcccgccgcgtcgccatcgtgttcgtccgcttcctcggcgacgcctcctcctggctgttcgacgcgccgcccgggtacgcgctggccgcgccggtggtcgcgctgctcgcgttcgacgcgtcggggcccaacggcggcgtcgcgctccgcgcgctcggcgcgcccgtccgcgtcgagttcagggacatctcgccggcgagcgggttcaacgccacggcggcgaggtgcctgaccttctcgtccggcggcgggaaggcggtggcggcgcacgccgtggccatggagcccggcccgtcgtgcgtggtgtccggcacggccacggggcactacggggtggcggtgcgcgtggagacgccgccaccaccgccaccgccacgaccaccgccggtgagggagcggtggtgggtgtggaaggtcggggccaccgccggcggggtggcggcggcgagcttcctggcggtcaccgtggtcggcgccgtgaggtggaggaggaggcggcggagggaggagatggagcggcgcgcgatgtgcggggaggagctcgggaggatggcggtgagggggagcaggatgccgtcggcgaagatggtgaggacgcggccggagttggtggaggagctaagctaacctccgccgccgtgagttgcaccggcgagccgccgtagttttcgtaaggttttttttttctcctttcgttttttaggtgtaattttttcttttcagattattacgagacaaatgtacagtacattaaactctttcaaaaaaaaattcacgtgcaactcaaactcaaattcaaattggattggaatgtacattgcagttgggttatgttaaattttgagagcaaacaccgccttcctttttcgaatactacttgcatagtttactttattcccttcagctcataaccaggatgggatttttgtcactaaaatgaacaaagagaaagcagtatttacccactttgatttattggctataagaaacagagaattattgtattttgatttgttttcacttcacatttcacacaatcttggcttgttcagtacctttaatactagtctagtatcccgccaaaaaaaaaaaatactagtctagtagtaagtagtacactctctgttcatggatttagtacctttaatccgtgacattgttaactttatttggtctaagaatttaaaactttaactattaatagttaaaaaaatatttagcttgaagacacaaaatcatatggatatatttttctttataagtacttctacaatattataattttatatcaagtattgtcgttatatactaatacaagaataatgttccaattcacacgccatgcactgaataaagtctacagtgccatatatttaaaaacaaaggtagtatataaattcacgaaaatgcacatgaaggggctgaggagacaccattacaaaatatacacacactttgatttactgtggctatggaaaaacagataagataccttcaatccatttatgagtgcataatatgatttagtagatatggaaaaatagatcacatatattgaatacttttttctctaagcagtttgcagaatttccagttgcacagt

SEQ ID NO: 11252 - DNA, 6114 bp, Oryza sativa
aattcctgcagctttggcaatatcacaattcaatgacagaaaggacaaggacatatagaaaggataacatagttttatcgtggataacctggtaactaaagttggtagaaaaaaagaactccatacaatttagaaagccacctaactgcctgaatgaaatgtttcacacgtatgcccatcccaattagtttactgatgcggcccatattaactaagtgaatctccctctacaagaagtgaaccccaggtaagatcctatataaagaattaaacattactgggacagaaagggaaaaccgtcagatcgcgccaactgtacaacggacaaacaaatcgccatcagtcaagaagtcctacaactaagaaagaactaacaccaatctccatcagacaaagatgatttatttcctgtcagacgtggcaaccacaaagcacctaaactgctacataagatatgaggtttggttgataatatgctaacaaatcaatgaaccacaaaatggcagtcgttatagcttgtttgatactttgacataacatgacgcaaagattaaatatgtcaagagaagccaagacactctaaaagagtgacgcaatgcaggctacatggagaggttccatacgcttgcttagcattcaccgagcgcacgttccaaatttaataacaagtggtggttgtgtgattattggatttggtttggatatgaacatgaatcagaggggggggaggaacattttggataaggactaagactatcatcaaacaaccaacacaaccaaatcacagcagcgtaccatttgatcttctcctcgaagattaaactaatgagagcaagcatctccctctgcgaccattggggtgattagctcgatgattcccttccagagttgaaacatttgcaaattgcaaaatagtttgcattggatctctttctcttacctgcatcggcatgtcgtcatatcagtgacctcaccggcaaagctatctccatgcccagactcggtgaggcatttcatcgaacacttgaacctcacaccgcagaggcgggttgccgccggcgaagtgaaggactcgccgccctccgctccgagcgaaggagtcgccgagtctcgccgcccttgaccgatcatctcgcgtgccctcgccggctggttcgcccaaccgcggcacccccgtccgccgcctcttggggtaggatggaaactgcagtctccgttcccgttgggcgattagcctcattggttgtcatgaaaagctaaagtaaaaaccaaattttatattggttttaagatattttcaatgtagttttattttccagcattgtctttattttctttgtctataaaaaacagatatgctacatcctaaaactagaatgtgttatatctcgtattaggtttgttttttattggacggagagagtaatttacttttaaaaaaacatatataaaagttttacaaataaattattttattttatggttagtggtcactaataaaccattacggcttattatttgttctggataaccgatgaggcccaacgttaattggattgaagtattttaataacatgctaactgtagtaataaaatgtttaaaagtattttaataagatgctaactgtagtggtaaaatgtttagccacaaaatattcgataaaatgtttatactaatggctaatgtttgtcaattttcattcgttttaatgcttatactttgaggtttttatttgctttaatgcctatattttaaaacagaagatgcatgccattgccgatgtttgccagtttttctgttttaatgcgggaacattcatcttttccattttaacgtttgctaggctgtgtttagttcagcgcaaagtttggattttgattgaaattgaagatgatatgactgaaaaattgtgtgtgtatgacaggttgatgtgatggaaaatgacttaagtttagatccaaacacagtcctagtttgccatttcgtttcaaatgtcagacacgtgaaatgacaaaaaatgggttcattaatttgccaggatgatacatgatctcaaattgtaagctagctcttaacagctactccctccatcccataatataaaggattttgagtttttgcttgcaatgtttgaccactcgtcttattcaatttttttttgcaaagataaaaaacaaaaagttgtgcttaaagtactgtagataataaagtaaatcacaaataaaataaataataatttcaaaaaattttgaataagacgagtggtcaaacgttacaagcaaaaacttaaaaaacttaaaatcctctcttatattatgggacggagggagtactatcaaaagcgccaagaaatcggttttttacattgacatgctacacgttaattgagaacaagggtcagcaaaagatagcgccttctctttcataacaagtaaattcaaaactttgcttccttccagtaatatcctcattcaaatggcatagacacacgaagaaggaagcaaacacatctcttggatctcgataacagtaatatcctcatgaggttggtacaaaactttgaagtggttacaattagcacagctcactacagcatttgtttcaaaaggctactacagcagtattcttggccagcaagttgaacagtgaaacattccccattttttatgtccgtgccgatcagattcttggtgctgcattacatatcgaaatgtgcctcaggttaaaggtaggagatgattaacatagaagacggatttgatagagactgccaccagcacaaaatacattacctcctccgattgtagcttcagggagtcgttctatcgagtacctgtgccgagtgatatacatgattggaacaccaggaacctaccaaattgagaacacaaacatgtaattagcataagagcaaggctgctgcaatgttcaggcttaagtgcttgtaaatgtacctttcttatcctccttttcaaatctctatcacatgttgcgacgatgtagcacttgtgctgttacagaaaagttgcagtttagcaaaattagcgaaattttttacacacaagctacatagatccaaatgattatcacaaaaactagtcttaaactttcagtagccaaccagccttaatttaaggccctctttgtttaggcttataagccaacttataagtcgaaaagtctaagccaaaacaaacaagcagctttttcatttggcttttttaagccataagccactctaacactattaatccaaaagctaggtttgagaagctttttttggcttatatgagatagatgtatgattttaccattaaacttaggacattaaatccactggcttataaatcatataagccaataagctgacttaaaagtctaggccaataagcctaagcctaaacaaagagggcctaagtgttcactaaaatgtaaatggaagctgtaaagatgaagagcagaaattggcgagactaaagaaagttatattagtaatttcaaaaggagattgcgaaaatttcagtaacccatacatgcatcatattctctactactcaactgcaagtaccgtcaagtcacctaacatctgctatccaaaacaatgctgccacttgcacacataaaaactcaattcgaacaatagaagttcaagtaggcagaattatacctgagtaaccctctctacgatacagtcatcagcataagttcccttgtgtgtgcatgctaatctctggaacctagggtcctttgcaattctgtaagaggtaaaaatagtatttattgatggatgaaaatcatagaaaattatattatagtaccaaacatcagaactatgtccaactgatactaatatgcatagaagacaatagctacagatactgggatagagaaacagaatgaataacggaatttgcaacaagtgaagaatataaattaaaggaaatgcatgaaccaattaccacagtaattattgggaatgaacatacctcaatgctacacgatacttttgtcccagcttttcaagctccgccataacacaatccgtgatacatggtgtgccttcataacaagatggtagactttgtcagcaaagccgtatgcatttcaaaatatgctaaaaaggatagcttaaaccctactcgttccattccatattataatgtgttttggatttgtcctaagtcaaacttcttcaagtttggccaactttataaaaaaatgtagtagcatttccaacacaaaacaaatatattaatttggtattgtagatgttgctacgttttttctataaacttggtcaaacttaaagaagtgtgacttagtacaaacccatcacttcttataatttgaaacagagtgagtaagaagatgcatgcttacattttgcataaaggcagtccatcattcctttctccaaatccaactgcataggtgtcaaagaagcatttagctattacccataagcataagctcagagaaactgttagttagctccataatccagtaaacccacatgaaaggaatacactctgaccaagaagggatgtagctagcacttgcaccagggatgggaaaagatacgatgatagatagatagtcaatgtatttctctgtcctagaaatgcaagatttctgttgtgtttgaactgtcaatatggacaatcacttggtcatctacccctataccctatataaagcctcataattcaattagttttcaatatggttctagcatctaataagtggctccaggttggttatgaaccttcttgcactcagatggatgtaaggcactccaaatgttatgttattccctctatttcacaatatttatccagtagatagagtagtactaggtctatctaatagatgtgatcataatccatattggttaaaaaatgattttaagtattgtgactcatacatctgcataccagaaaatattgtggagcagagtacaaataagttaaatgatgtgccagcgcttgttacacatgccctatactatatgcctcttattaagtgccaatgggcaataccattctgttatttgagggctgttgaatgacacttgagaatgtccaacagttacatactcgacacaattgagattaagctaggcttcacgaaatcattcagtggataaacagaagagcacctaattcgaagcctcaaagaacaaaccttgttctggatggagaaattgatgaagtttgtatccacaataacccggtatggcggcccgagcgctgtgttgtagctgaagaacagcgccgaagagacctgaggcctaaaataataaaccaacaagacttgattaatccaatcatcccaataatcgttaaacactttaaacaaatggatcccaaaacgcggtaggcactcacacattccgcccgagcttctccttctcgttatccttcttcttggggttcaacacatcctccttgtacctagaggagacaaaatttagggtcgcaacaaaaagaaccgaatcaccaagaaaccaataggagagggagatggtttgcctacttctggatggtcttcttggtgatgatcttcttgacggcggcgaacttagggcccttgctcttcgccctccccatcctcagactaaaaatcccagataacactatcaacaccagcagcagtctcgagcactacgcgcaccgcgggcggcggcggcgttagctctctcggtggagcgggtcctcgcagctgactgctcactgccggcggcgtgaagcggtggaaggggccgcgtgagacgagagcctaccgaccgagagcggcaggggcgcagagcgcgacgccaagtcaccgaggcgccgagctaccttctcctaccggcgggaggggcgacggcgacggcgacggcgacggcgaggcgggaagtgcggcgagccggagactctggcggcggcgtcgcgcgttcgaggagagtgagaagcctagggttggcgttgctgacttgagaggcctcattggtgggcctggaccgttgagttgggcccacctgtcagctaacactatgatgggccttttcaagctttgggccgttggatgcggcgagagatctgggcctctgggccgtcggatctgagagaagt

SEQ ID NO: 11253 - DNA, 821 bp, Oryza sativa
agaaaatattcgtattcgtatccgaactatctgggaattatccgatctgaaaggtatccatattcgttcttattcagagcatacagaaactatccgctccgtttttatcccactgtaaagtatggggtcgcgtcaacgagatactacttggctctaaagaagcaatagagttacagtcatttgaaagagctaccgagggacaggcgaataatttgaaagagaatatacatatttcaactttgaataccaacgatacaacatgtagtatatgtaagaaataccatggcctgctcacaagacctagtctaagtcaacactatactatgcatagaggtcaccccatcattatctatcagtatgtgatgtaaagtactaatcagatatactcccattgtttcatgttgtaagatgttttttttatcaaatatagtaatatttatattaccaaattagttttatttaattaatagttaaatatatttttataataaacttaccatgattcgaaaatattactatttttcctataaacttgaaacagtttgtctttaactaaagtcaaaacatcttataacctgaaacggagggagtatattactatctccatatcattttaagtgtagttgtaggttttggtgtccaacgtttaaccgtccatcttatttcaaaaatttatgaaaaaataaaaaaaatagtcatgtactattcatgttttatcatatagtaataacaataaaaatactaatcataaatttctcaaataaacctgtagttttcaaataaaacggatgatgaaacgttagatataaacctgtaaaact

SEQ ID NO: 11254 - DNA, 1841 bp, Oryza sativa
tgggaaacttaggtagattcttccatcaagtttagatcaagccaccaagtggcctgaagtgaatggtgctagacgattgaacgccttttgtggccacctcctgactgtgcaaaatgatcctttgaacaagcttgagaagcattggacccaccagtacatttcttggagatggcatgaggctcaaagccaggtggaccagcccaagctgttggctgtgactcagaacaattggcaactttgttcgacgcagaagagcaatctttctcagcaaccaaatcgactgatttagatccaggcaacctttccttctgagatgtttgagcagcagaagcatcggttgcagatgtagtggtgacttggcccaggttctcagctgttgtattgtatgcggattcatcgtaatagtgcggccaataggacgtaggtattccgacagccgcctttgcgggatcatgcattgtgaagtgggagtagaaatgcgccatgtaactgctcatagcatctggatgaacaccagctatcctaacctccaacacatgcccatccagagggtaaccattcatgtgagtgagagccacagcagcagagtaagcatcagcaaacttgacaaatccaaatcctttgctcacaccagtgtatctctcaacaactacttttgcttgagtgatttggccacatggtaggaagaggtcgataagtctttcgttgttaacatagctcgggagatggctcacataaaggtagtcatgtcgatttgtccctgctcattagaagacatctgtgatgtcagagcacccttggctgcattggattctgctggaagccccgcgactctcacagccagtatgcttacaccaatctggtagccatccaaatgatcaattgctgcagcagcacatgaaggattatcaaacctaaccatgccatacctctgaaatcgaaacattctagcttgaacaactcgtccaaatgggcggaagagatcgatgaattgatcttcagttaaacttgatggaaccctgccaacatagagattggccatgtcgatttccttgattggcttgccacctgcttgtgaagcgttggttgtacataactctgatctcttgaccactaacctctttccttcaaccatgtatccatccatgtgttggacagctttggtagctgagggtgcatctgcataccacactagactatactccagattcatcaggactttagtgatctgaccaaagggcgcgaaaagattaaccatcttatcggcagtcatcgaccgtggaagattagtgatgtatagtctagacttgttgatgtcttgagtggtctgtacagctgagatggatgctgatggggaaaggcctgcaactctgacaattatcatttctcctccaaccaatgctccattcattgctgcaatagctttggtagcagattcagaatcagtaaacttgatgaaaccatatcctttggctgaaaaggtgtcaggatctgccaccactcttgcatgggtgatcttaccaaatggaaggaaaagctcaaccaacttcttggtgtcaattgacgatggcatgttacagacatacagattagacatgtcaatttccttgacggttctggtggtgctgggtgattcaacagctgaatttctggtggtgctgggtgattcaacagctgaatttggcagtgttgaaggtatgccagatactcgaacctctatctttcttcaatcgacaagacgtccattcaaatggatgacagcctcagctgatggtgaggactagagtactgcacaaagccatatcctttacttaagcctgttgtgtgatctttggccacct

SEQ ID NO: 11255 - DNA, 567 bp, Oryza sativa
aacattggctttgaaccaaaatcaattattaggcacatcgagaacaaattcaagtacaccataagctatgcaaaggcctggagagccaaacaaaagattattgagatgaggtatggcacatttgaagcttcttatgataatttgcctcgtttgttagccaccattgcccagaggaataataatacttactatgacctacatacatttacatcggttgatgatcgaacaaagagtgtgctgcaaagagcctttttctcattgggtgcttgcatcaatgcttttgtgcattgtcgacctgttctatgcatagatggaacttttatgacaggtaaataccgaggtcagatattgacagcaattgggtgtgatgggaacaaccaggttctacctatggcttttgcatttgtagagagtgagaacactgaaagctggtactggttcctagagagagtgcacattgcagtggtgcgtatgaggcccaacgtttgccttatacatgatcgtcatgcgggtatgttgcaggctattgactacttgcagaacggttgggatgagaagggacttcca

SEQ ID NO: 11256 - DNA, 666 bp, Oryza sativa
gtcgactctagaggatccccctacttgtgtttgtctcgtctacatagttcttttcattcatatggtgctagaacaacttatgctcacgacaacacactttcggcgcttcacggtagtgtcagatcactcctaattgcagctcatgattttctagaaaaaaaatatctaagcgaattcccacaggggatttcaccctagccaaaccgtataacaataataaaaaaattataatagcattcacccgttacaacacacgggcatcttttcaagttataaatatatatattattcggtcgtagatttaatgaaagtaatctggtgttctatatgttaatatatttttttttgaaaatctttggtttaataacttgaataaatttggcttgggataggaacgaagggagtatataattattttttctagttgcacacatacaactattatcttctttttttccgtttacatcaaatgcgtactcaagtgcttctcctaatacacgttcagggaaccggagatgaacaacaaatcccaacaaactgaattttattcaaatccacagcgattacaatggtaaaaccaagttacaacacaataattactgtattccagccagagaaaattgtccgacaaatcaattgcagcacggtacatctctgctagctctt

SEQ ID NO: 11257 - DNA, 1116 bp, Oryza sativa
cggcaaggagtgaccggtctgcatcccaccgcttcgctgggtcacggtcgtccgccgccgcctcaacaagcctacaaagtggtagaaggcctgccgcacgcaacctgtatagagcaaacttcaaacataagtacaacacaaagcaaagttgagttgaaatgtgaacatacgcgtaccaaggaacgtgacgggggtcgacacgcaaccactcgcgcgacgtgcgtggacggaaggtgccgagctgtgcaccctcgactgctgacaggaacgagcggtggttcctgtcaatcccacggttgaacagcgccggtgtgtcgtacgccatacctgcatcaaatagattgatcagaaacatataactaattagttcaacataagtaataaatgttcataagcgaattactaacacatattaaacaagagtacaaacaaacaaaagtgtcaccatacggaatatttctaattacaacaataactgcagttacacgatatgagtacttagtccgaacactcatcacgataacattatgatacaacaccgaatagttcgcaatactactagtacaacaatagtcggaggtactcattacaacaacattcaattgaaattacacgatagaagtatttagtccgaacactcatcacatcacaacagcattttatttcctaaatcgatagcattgttacaccatggaatcgcctgctgcgcgacgacgccttggccttgcgcgcctgcttgttgttccttcaccaggtggtcgcctaccatcacttgcctgtccagatggactagcatctgcgccgcttggaacttctgcattcttcgggcatttcttgtaagtatggccgcgcagatcacacttgctgcagcgtaaagtcctcccacctgcttctgactcatccatatcatttctgatgcgtctagtttggcgtcaaccctttttcacccttaacttagatggatctggaatataaaaaacttgggcactcagcgttgtgtaagatcctgagatcccgaacccatatatctcctcactccatgtatgaaagattgcttctttcctaaaataatttgagacgtacacattgggagatatgccacaatcaccggcagca

SEQ ID NO: 11258 - DNA, 1737 bp, Oryza sativa
ctgctgtacatctcacttgccacaaaagctgaagtgatgtttcggtgatacttctccaccccttgtaagtagcacttgtgctcggtcacaatgctaactttccaataatcattccatttacccttatatgcatggacacgccacggacaatcttccttcatgcacctcacttaatacacataatttgttgacttgaccaccctaaactctctctgcaaggaaactgcccaatgcttcaccgcctccttcatctcatccttatgagcataccttgcaccctcaattacctcgttctccttatacttccagggtacatgatcaccctctgatataacaagtccagagaagtcctcatttgcccaatcagtggccattacatcaccttcctcatcggatgatgcgtcgtcgtccgcttcctcattatccgaatcttccctctccatttcatcaacaattataccgactctctccccctcatccgccatgcccatagcctgctcctcccttggttgattttcctcattttgcatcgatggtccaacaacatcccctgcattgataggaccctctacatattcggtttgcattgaaacatttatatctttctcttgtaccgacacaaatataacgaggggccatgaccgttcaaaagccatttccacataccgtctccaagcatcagtgctgtccatcggcattagttcccaaaaataaccttctgttgcacgactcactacaactgacactgacattgtgtagacttcttggtctattctaaatcctctcaacaaccaactataaattgactgaaatgttctctccgcaggcctatcgatgcccttagatgtcattacaaaatctgacagatcaacaccatctggaccaaatctaatatttccttcaccgtgaactatctgaaatgtgaccttatttgacattgtgcctgatgaaaacaataactgcgttaacctcgcatttctgtactacgccctaagttacattctctacaatattgttctccaaaattctaaaagtaggttacattctctagatcaaactaaactacatcttacaattaacactattgtctatgtctcaattcatactattatattctatgctctggatctacacatatgtgctgtgtgctacagatctgctaaaatatatggaactaaaactaaaacgcaacatatatactcaaacataacatattagtacaaatgcaaaagatgtatgggagcaaacctgtgatgaagtgagtgaaccagcagggcttcgccgctccccttctgctgccctcccctctctctctttcgttttttttggatttttacttaatataatgaaatttcagagagagggctgggctttatagggggaggcaaaaatcgccctcccccagggcggcaagggggccgcctgcaaaattccaggccccccgccgcccatttgcaggcggccccccgcacagtacaaaatcgccctagcggagggcggcaagggggccgcctgcaaatttcgttgacggccgttgcccgagagcgaacggccgtctgccacgtcactttcgccgccctctgggatggtgatttttaaaaatcgccctcccagagggcggtaggcgaccacttctgtcaattttcaaaatgaaaaattatttttgtaaaacttttaataaaaaaaattaaaaataaaaaaaattcacggggagatggactgatggactatgtacag

SEQ ID NO: 11259 - DNA, 1232 bp, Oryza sativa
cctcttctgtgtacggctcccagatgacgtcgctcggctggagacggtcaaactcgaacacgaagtccgggtaacctcgtctcacctggacgtgagcgtaacgacgctgcaataaacatgatcggattagacatgttatgtgaagaaaaaaaaagaagacgactgataaacttataacgcagcgaagttgcactaaccccacgtcgacaccagtaagtccccatcgtgggaccgtcctctggccactgcgcgctgcgaccaaccccgtagggtgcgctgtccaccactggtcgacctatggcaaacctctcggctgcccaaagctgaagcaacatagggcagccagcgatgatcgctcccgcgtcagtcttcgtgcacgcctcacagagggcacggtacgtggctgctagcacggcagaaccccagctccactgcggcacgtcctgtggctgagcatccgcgatggaccgtgcgtagtggaccagccggaagtccacagcgtgcccgtgggtgctagtgaacatcacccacccgaacaaccacaacaggtacgcctcaagggagcgtcggaccgagtaatcatcagcgtcagggtgcagaaggtccgcctacaattaagaatgaaatgttagtacaaaacactctgttgatcgcaaataagcatgtatgataataacaacttatttacttacagtgaactggagcaaccaagccttgctaggcccgactgtagagtacggaggaagggtgttggccggtcctaggtgtggagggcgcatcacctgttcgaagcgcgcagtgatatcctccttccacccaaaaacaccgtccacgggaccaactggtgctcccgccagcggtagcccgagcaggtacgacacgtcctgcagtgtcggagccatctccccacagggaaggtggaacgtgtgcgtctcaggtctccagcggtctacaagagcggcaaggagtgaccggtctgcatcccaccgcttcgctgggtcagggtcgtccgccgccgcctcaacaagcctacaaagtggtagaaggcctcccgcacgcaacctgtatagagcaaacttcaaacataagtacaacacaaagcaaagttgagttgaaatgtgaacatacgcgtaccaaggaacgtgacgggggtcgacacgcaaccactcgcgcgacgtgcgtggacggaaggtgccgagctgtgcaccctgggtaccgagctcgaattcgcc

SEQ ID NO: 11260 - DNA, 1484 bp, Oryza sativa
caagtagtactgcagtagtaatagcaaaagtagtactgtttacaagtttgtaagccaaaagaaacggtcacataaggactgaagaggtagaacactactgacgaggcctcttacccctgtccctcctaccctgcgccctaatgtgcccctgggagtacgtgagtcggtccgggggtacggcacggccaacccgtcctgcctgtacaggtgtgacctctggctgctcctgagtgtgcgcctctggagctcctccaagctgagaggagcctagtacgtcgtggtggtgtgcaccgtgcaagtcgtcgtcgtagaactggctagtaggaccagtcctaccggcgtgagaggaagaggccccagtaccgaagatcccggctgcaaatcctgctggacaaggaccatcagtttcatacaggtatttaatagtattaataaaaagtaaagtaccgtgtgggcgagggatcgacgctccgtgagaggaagagctggcgaacacgcccgaagaggtggcgaacgcccctgcggagctcgcggaagcgccggtcgtgcctgcgaacgcgctcgaaggcagacgaggtcctgcgatgaggaaacgtgcagttaaaacatggtgacatattcgtgcaaaagctgaaacaaaaatgaactaatctctgggctgaactgtaccgtgcgaaaccggtgctgtaggtcgcactgctccgaaggtaggggcgctcgaaggcaaacgaggtcctgcgaggatggaacatcaagttacgacggggtgatgttttcgtacaaaaacagaaacaaaacttaagaaacctctgggctgaactgtaccgtgcgaaacaggtgccgtaggtcgaggtcctgctccgacggtaggcgcgcgaggccgtggttgtaccggaccagctggaggtacgacgtccacggcgctgcgacaggagaagacgcgcatgaccgcatgcatcttctcctgcatccggtcgaaggtcaccctctgctcaacgtcagtcaagtgcaaacctctgttcaacctcacttggactgcggtgatatcggcactgatatcccatgcggcatcagcctatgcaagatggaaataaaaaattcagtaattgtcctatattatgcaagataaaggaaataattgtaagaactaatacaaattcgacgtacccccacgaagtagtctcggtcacggtgcgtgggatacgcgtccgtgacagcggcaacgtgcggctctggggcgtctggagtgaaggtcacacgcgcacgagtgcgaggaaggtaccagcgaaggtagtcacggtagttctcctccgtgtgtgggaagagctcgttgatcacctcctctgtagctaacacccagtcgtcaacgtactgctgtacacgtggagcccaaagtgcgcctgcaaactgtccccgtcgagtcaacctgtgaagaaaggtaaattatatggctcgatgaggtaattatcataaaaatttagaaa

SEQ ID NO: 11261 - DNA, 3593 bp, Oryza sativa
ctaatttgttacttagcaagaacaaaagtacaagactgaacttatactccaaaaaaaaaaattctccacaaaatatagatgacgaaactatcgttgaaaaaaaacttgataaagagacgcggtgatacctcaagcaaatgttgtcttcaaaaaagggatacactcaacaatgatatgatgatcaggggtacaatgggcttgaccagtatgtgcaaaaatatcaaatatctgtagcaagcatgaacgtggggcccacatgacagctccaattgctcataataaaaggagctcataatttgcatgccacaatataaatgaaaaataaaggctatatcacaggacatgctccagagcatgaaggttttatgatgcaaagtatcaattgacctcctgactaattttaagtcactgtaagcaaagtttttttgccaaagttttggactggacaaaaaacacaagatacctacttcaacccccaagataacttcagccaccttgaagggaacaactcatgagactaactttcagttgaaatcactgaggtacaaaacggctgcagaaatgcattgttgagcactcaagtaatgccatggacatgatgagcaatgggatgtaatcctcggcacgaagctggctcaatgaagctcctgacgatcgcctcccacatcttttctatgcctcaatatctcaacacccaaataatcgacgattccacgtacagcaacatgaggtttcccaactttcactctgatggttgagatttgagggaacttaagcaatgcgttacttgcgattcgatgagctactgcttccaaaaggttccgcgatgggccttcaacaacatccttggcaatcctgtaagtgcagagcatgaacatatttcagttctccaatgattggaattagtaaaagaacaataaaataaactgaataatcctacattgctgaaatggacaagcaagatttaatatcttaaaaagaacaatcaatcaagacatttctagtaaaatggtgaaataaaaacaaatcgggattaatttgttactcctacccgtagatatctgtgtagctaaccgtatcagatatgctgtcagtctccccagcaacactcaaatccatccacgcatcaacatccacaacgaacttttgacctagagttttctcttctgatttcactccatggaaaccgtggaactgcaaatctataagcacgagtttatccctgtcgattaactccctctccgccataatggtccttaaagcacggaacgaatccttagtccggcagcacacgggtatttggatcgattcatcggtggtggtggtgctcaccggaggcggaagggaagggaagcagcagcaggacgacggcgcggcgcggtgcggtgggagaaccagcgaggagacgggagcagcaggacgccacggcaggcagcgccgccgctcgccggcggcgtggcgaggagaaggatgggcgtcgactcgacggggagagaatttttttatttttaattttttttattaaaagttttaaaaaataatttttcattttgaaaattgacagaagtgatcgcctaccgccctctgggagggcgatttttaaaaatcgccatcccagagggcggcgaaagtgacgtggcagacggccgttcgctctcgggcgacggccgtcaacgaaatttgcaggcggcccccttgccgccctccgctagggcgattttgtactgtacggggggccacctgcaaatgggcggcggggggcctggaattttgcaggcggccctcttgccgccctgggggagggcgattttatattgtgctttatatttttttataaatatcaataattatcaaatctttttatattgaaaactatacaagattaaaatctccaagactggtaaaatacaattttattattttttagggtctatttggaatgttaccgtacaaatattttgttagtgccaaaatataagcaagttttggcactaccaaatatttggtaaggtaaaattgcatttgatcatatttggtttgctaccaaaatgtaaaattgtagtgaagaatgttctacataatctcaaatctagattacgtattaccaatgaataggcttcaatcgaaatcaaacacaagtactattcaaattaccaaaatattggtagggcatgtttttggtagcaatccaaataggcccttagtcttacgcatacaaaaaatcaccaccataattaaacattgtaatgataagatagataagaagtgccatcgatacacggtacaaatttgtcgatcccgacgaatcaagcatgcggtaacctatcggccccttctaggtcggtcagaatgcattgcattctcgtggtccttcaatcgttgatactctacttgtgtttctgactctgttatcttctggccatgatatgatggagtgacattgtcgatccatcgagtaaatccacacatccttggattgccctgtaaaaatagtaatgttattcagtttgggtagtaattttgtgcaaatcatagcggattttgtaaatggttagacatacaacgaaatcgttgtctacattggggcagacaaaatatctccttccaaatgtttgttcagcaaaggatgtagccacctgccagcgatctctgcacccacactttggacgctcggaccatttaggtaaccctaatggattgttcctccagtctaagcttgcaatttccacccgacgttcgtactccatccaagcatgaatgaactgtatggtcggttcaggttgcgttatcggcccgccacttgaagtaactctgactgtgtcaatccattgtacgaattgacatttccttacatcctcctatgtacatccattttgggatagttaagttaatgatagtactgaggagtgatgaaaagaatagttgtaattaccacgaaatcatcgtcgacaatgtttggacacacgaaacacctttgtcctcgagttcggtgccttacggaccttatgacctgacaacggtcaccacaacgacactccggacgctcacgccacgtggggagtcctaggggatttacgtgccattctaaagcctcagcagcaattcgacgttcatgcttatccttccgccttaggtagtccgatcttgtttcactacgtgggtaagcacgtgttccgtcgttttgtgggttctccatgtctacccactcgatgaagttgcacattggacgatatgtctgcgtaagatgttacaattgtgtacgaagaagttagtttttttatccatttgaacttcgaatagatgaagcatacctgatcaaagttcgcgcattggaagaatctccttccccgagtttgtatcatgagggaagacttgtgttgtgtgctagtggaaaagaagatatgaagaggttgccttcagattgtcaattatatagcgtcgttttcactgcaatatatgtgaactcaatgagatacattattcattagatgtgacaagacgatcacgcgtgggcgtgattcactttatgtaaacaagcagcgccgaaagttaatagtgacaactcgagctgccgtttttcatgtgtgctgttg

SEQ ID NO: 11262 - DNA, 1383 bp, Oryza sativa
ttttgtccacaaaagcttttttttttctttcgcacagacgtacagttgaaaataaattagtgaaacattattattatttttattatttagttaggttgcattcttgcattattgagatacgacgcagatggagatggcattacgagttcacaacctacacggctataccaactccatgaaatgataatgtggccagttcatacaccacattttatgggatgtagcgtacatgagtttttgagtttggctggagagaacgtgcacgcaagcaccagaacatcgcattataacgtaaaaagaagcaatgaaataattggcaaaagactagaataatggatgagggagtctacaacttagaagaatctcgaagtaatgttccagtcttacgatcaactccaaactgccaccactgaatcaagagtcaatatatcctcttccattgaccacgtcttacaacatggagcattaagtaaaaccatgagaaatccatgaatcgacaagaaaatggggaatttgatgataaccgcagaatttaggccgtcatcgttcatgaactaactcttcttacaaaagggactaaaaacatttaagatggaaaaaaatcccacattaaacaacatacataagcataagaatggcatagcagctacccaggaacttgatcacaaagtacatttctactcttagaacaacaccttcagctttgaaccagggaggatttttcaggtgaggcaattatttacaactagtgatcactgtcggcgaccttttgtggcgcaggaggaaaaaactccatatgaatagaatcaatccaaggctgaaatagaacaccagctactggtaatcagggttgaacgcaaggccttcttggtagattagatccttcatttgttcctcggacaatgcatgctgctcgaagtcaaagctgaagggtgatgagcagactggctcatcacttatgtcatgcagtgatgccaggtaaggatgtgcaagggcaccttcaactggataagaagaaataggagaaaagataagggggcattcagtaatatgaaacatgcagagaaaatcaggtcaaaagttttgacacagggaacaatgcattttcaacattagaaaacaccacaaggcaatgactctttcaacattcccacctatgagttaagaatgatgctcaattcacgcattaagaataaagtgatgacacacctataccacctggattaggttagggtggatcaagaggtaaaaaggatcgacatagtttttttttttaaaaaaaatatttaggtttgcatgtgatttagtaatatagaagtcatgcacagatgctctacaaatatatttaagtatccactgcagttgttactttctatcttaaaa

SEQ ID NO: 11263 - DNA, 2170 bp, Oryza sativa
aaaggactgccttgcatgtctaggaagttggcgaatgtatcttcttgcattttcatttacaaaatccagatcagcctcatttggcgttccgatgagctgcaattaagaaatttatgataggaaaatcaaacacacaataatgtgaaacagatagtatataaatcctctagtgagaaatgcgtttgtattaatagccatgactcagaattcagtatcctgcatatcagccagaaagccaggaccttctggagcaacataaattctctcctctttgcattttccttagttttaacatattcccataggataatcaacatattatatatttccaaaacagtactccagttatgctaaatatatgaccacacaacataacctgatcaattcaatataaaataaagttcaaaagataagagtgtgttctaacctccattagtagacgtaattgatggacatgatctcttccaggaaacaaaggtttacgatccatgagttccataaaaatacagcccacagaccacacatcaattgctgcagtatattcagaggaattcaacagaagttccggtgccctataccatcttgtgacaacatactcagtcataaaatcggtttctgaggtggtacgagcaagtccaaaatcacaaattttgaggtcacaatttgcattcaaaagtaggttgctgggcttcaagtctcggtgaaggacatttgctgaatgtatatacttcaagccacggagaatctgataaaggaaatactgcacaaaaaggtaaagaattacgcaagaacagttataccaaacatgtattatttctcagaacatggtagatgcatgcacaaggaaaatacaagagaacacaatcaagttatctggataaggaaagataggtgaggcagccattctagagttccactcaagaaagggagagatctatctgtagcattgatcataagagcttgcaagctgcaatacagcaagacctctccagtgtgattgggcattgaacccttctcacgttgaatgtgttatgtggggaatcctttgaatgtctcaagaacacgagttcggtgagcgtgcatggcacgccacagtgtcgttctcgccgttatctgttgcttgcattagataagagttatcccttaagatttgaggtttgtttcagttagttctgattcattagcagattgtaatcgcctatataaggccactcttttttctgtttctcctcaccatggctttgtgggaggcgagggcatcggcatcaccctcccgtcaagcactgctacaaccttcggagctgcggtgccttgccgccagctcctaacagtatgtggtctactgataaatagcaatcaactcattattcgattttatatcggttagcaaataatatggtatctccaaagaaaacgttagtttgatccaatgatcaatggtgcactgagataacctaattgtagcactttgcatatatgctttgcagggcaaaggtacgttcaggtatattagtaggtcgctaaattcgtttcttaatttcaaagattatgcatacctgcagaattcttaaaatgtgatacaaaattaccataaaagctttacattcaaccttttgtaccaaattccttatagttcttacacaaaacatttataaaccatcaatacatacttcaatacttcccactttttaggtcttgaaaactcaatttgagcagaggcctagacaagcaagagaatccaagcagaccagaaaagccatttgtatgaaataaatgctaaagtggaaataaagttgtgtttttcttttgaagaaggtacctggcagtgctcctctgacaatgcttgatttgagcgaataatttgatgcagatcagtatccatcaattcatatgcaatataaacgtcattgaatgaattcctttgtggaggaggtatgatatcccttatggcaacaatctgcatcacataagtaggaagttgagacaagttattgccttttggagcatcgatgtgcaaacacaagagcttgctggatatgtgaaatacaacagaccagctccaaatatcttataggagtagataaaataagtaaatcaactatgtccagaccaaccaaagcaagaacaaacatattgcatggaccaggaaataccatatgaaaatgacttg

SEQ ID NO: 11264 - DNA, 2988 bp, Oryza sativa
tacgaatcatgtgatgttgctactctccaggtcaggtctgttcacatcactcgctcccccactattcaagaacacaatgaataacaacatccccaaaaggcagatggcttctttaaaggcatctccaaagttacctctatttctgaagctcgcagcactcatcatcagcagcaagaatggagggaaaagctctaccaaattaggccgagcagtgacgaactcaatcatttggtaacctaaccctcacctcctcctcctttccccatttaatgcaaccaacttaactaaccagagacaagagcattcaacgagaatctcaaaatctgcgcctaaaaatcgagggtgggtgggggggaagggaattccgtggtcgaaacaatggagcggatcgggagcactgacattctcgtggtccatgtggcggagcagcttgatctccctgagcgtgcgcttggcgtcgatcttgttgtcgaacgcgttggcgatcttcttgatcgccacctgctcccccgtctccgagttgagcgccgagctgtcatccaaacccaaaatccaaaatccaaaccaaaatcaggccgccgccgccaacggaatgggagagaggggggagcaaacgaaccagacgatgccgtaggcgcccttgccgatggggaggatggggggcttgtacttggcggtgacctcgaacacgttcccgaagatgttgtactggatgaacctcccgccatggctcagcgtcgcctggatgttctccatcatccccgcccctgcccccgcccccgccgccgcagccgcagcaggcggctgctgcccgccgccggcctccgccatctccgtgtccggcggctgcgccccggcgtccatggccggattcggatttggatcgctaccaggaggtggaggtggaggaggaagggaagggaaagtggaggcggaattcgtcgcgagatttggtcgctttcggcctcgttttgtagctctcgcctcttttttttttgtgtgtgttttttttgtgtgtgggtgtgtgtgtgctcgcgtgtgttttctcttgggctgtggaggtgggggtggtggcccaccggggtataaaatggttggcacgcggggctacgggtactaggcgtggcccatttttggggtgggtgggtgtggggggacgtgtagcaaaatggagatgctgtgccgaccctaacgactgatgacgtgtcatggtgacgacagcgtgagggaacactacctctgtacctagtacctttacacccataagagcaagtttaatagtatagcccactactaactccaatttatctatagccaacataatagtcaattcatacaatagttgcttactatattattaatatatggtctcacctgtcatacacacactgcgtcttggagtccgtgttgcagctggctacagatctaagtccgctattcttctctctcatcttttatctcattaaaatatgtttatagctggctaatagcctgctattgtacctgctctaagagcaagattagtataaccaactactagctccaaattatctatagttactttaatagccaatatatacaatagttacctataaacatatactacactattaatatatgatctcacttgtcatatacacattgcgtcttagagttcgtgctgcagctggctacaaatttaaaaggaaaaaaagaagaatgagaagaaaatggaaaataaaaagaaaaataaaagaagaaaaaaaagaaaaggacacatcatgtccatgtggcatgctacatcaacgccacgtaggatcctagaggtgatgtgtcaatttagaatctagatgatacactttgataagttacgtgactcagatatgtattttgagagtttagaggcctatataacacaaccctataagatgaaggaccgccaatgcactttactcaagttgaatggtagagctaactacttataaactcatattacaagtataagattggctataacatttgtcttcaccttttcttgcttatgtatttagtgcatgtaccttgaagcatatgactagagctttgtacttttcttgtcttccttctccatataaacttatagtttactattatccttgcttaaggtggttgcttcagcaacaccaaacacgagggcggcgaatgctatctagcgccagataatggtgtcattttcttccatatttttttttgctcgccatatcttcccgctcatgtcattctaccaacacttttttttttcgtcgaagacttcatactcctacaaatgattgagacagaaaggtgttttttcttgatccagtggagataaagaaataagcatcagtactaataacattgtttactgcttactttaaatgccaatggcacgtgttgatgtagaattacgcatagataacctgccagcggctagcatcctccaaggaaattgtaccatgagttaggcaaagtttgatgaaccagagcttagaattttactaccctccggtgaatgtgacagtgaatgctatggacaggaactctttgcgatgaatgcttcaatataaggacaagaacaaaacattatctagtcttgcaatcctgattaattaggattttttttatggatactagggacttgctggaaatttggaatatatgaggcaagtggtgtggaaatgatagggcaatagataaaataatgatgttctagcatctttatggaaacaaagttaacaggacaataattaattccgcaaacacactgatattaattataatacaaatcaggtctaacaaataaaaatgagagtttatgctaaaagagtttataagtaccatgaattatttgaagctcaaggaaacctccaatgcaggaagctattgtcatatctctggtagtagagcctcaggagaagaagaaattataacccctgtgcagagtttggatgagaagactttgataaatctagtgtatgtcttcacagctac

SEQ ID NO: 11265 - DNA, 561 bp, Oryza sativa
cctatctgttttaagatagaaagtaacaactgcagtggatacttaaatatatttgtagagcatctgtgcatgacttctatattactaaatcacatgcaaacctaaatattttttttaaaaaaaaaaactatgtcgatcctttttacctcttgatccaccctaacctaatccaggtggtataggtgtgtcatcactttattcttaatgcgtgaattgagcatcattcttaactcataggtgggaatgttgaaagagtcattgccttgtggtgttttctaatgttgaaaatgcattgttccctgtgtcaaaacttttgacctgattttctctgcatgtttcatattactgaatgcccccttatcttttctcctatttcttcttatccagttgaaggtgcccttgcacatccttacctggcatcactgcatgacataagtgatgagccagtctgctcatcacccttcagctttgacttcgagcagcatgcattgtccgaggaacaaatgaaggatctaatctaccaagaaggccttgcgttcaaccctgattaccagtagctgg

SEQ ID NO: 11266 - DNA, 533 bp, Oryza sativa
gcccgatcagctgctccacccccttcccgatcccgtgcacgatggtgccgttctggcccgtcgcctgcttcggcgtgtacccgccgaacagctgcgcgttgtagtcgttgcccccgaactcgccgagcacgaacagcgacttggacaggtacgtcttgcaagctgcacgcaccagcagatcagaatgagatgatcggagttcatggcggctcgccggcggctaggttttgtggggggggggggggattacatgacccccagatggggggcatgagctgctggaaccactggatatgggtgttgagggggccattgttccagatcttgtcgccgatgccgagcgactgaaagaagccggagtccatggtggtggcgccgatgatcgccatgttcgcgcctcgccggaagtcggagccgcccctcttcgacggcggcagcaacggcagcccgaacttctccgctgcaaacgcacgccaaaacagcagtgagcaaagcagagtttgctctgcttttttttggagggaaaatttgaa

SEQ ID NO: 11267 - DNA, 1494 bp, Oryza sativa
cctttcttcctcgtctacggcgcgaaagcggttctcccatccgagctcacccagaagtcccctcgggccaccatgtactgcgaggctgatcaagatcagcttcgcagagatgacctcgattacttggaagagtgaaggcgacgtgcggccctccgagccgcacgctaccagcagagcctgcggcgctaccatcagcgccacgtccgggcccgatcactctgcgtcgacgacctcgtcctacgccgcgtccaaacgcgtgctggattgagcaagctctcaccaatgtgggagggtccgtatcgagtgatcggcgtcccccggccgggctctgttcggctggccacgggcgacggcacagagctgcctaacccgtggaacatcgaacaccttcgtcgcttctacccctaaaggggaatcgggtgtcaggtttcgggctcgggccaaccccgcacccccctcgggtgtgcagggttggccgggggctaccacatatgcatattcttatttctcttatatctgtatttcaataaaagcattttcgatttcctaaaggctgtatctgtgctgttgtttccttttgaaggatcttgacttgaaataggtcactcgtgttcaatcccgccctcgggggctcgggtcggctaaaatcgccaaacggggcccagaacagagccgtgccccggggcgtggtgaactccgggggggaatcggcaaaaacccacaatcgggtcacccataaccctcggtcatcacgctcccggcctggccagtctcgacatgtggatctccccaggcactagccccgacccgagccatttgaggactaggacctgggcatgagcccttgttcaagccaagacacaaaaggaccgcggcacagaccatcctcgtctcatacacacaacaaatagaattgacacaaaaaatttcctctttatttgattgcagattaaattagtctatacaagaagggggcccgaaggcctcggaagaagaaaagaagaaactatttaaagattggcgggggcctaggggctcactccgatgcacccgggtcgccagcctcgtcgccactgtcgcccactccgccgtcatcgtcctcctcgtcggagttgagggcgaacgcgagccgaggggccaaatcctcgaagctatggacgatatggtcggcggcgtcccggacctgcgcgcgcgcgccatcctcggtcccgggagggaactcgtccagcgccgtccatggggagaagtcgggatccctagcttggtaactcgccagtacgagctccaccgctcctcgggcgaggtccctcgaggatgacttaatcgtcctctcaagctcctcggggagccgttggagagtcccggctatctccgagaggcgctgggcgaggcccccctggttggcggcgtacttcgcagtccgcccgccccagaggcccacctgccggccggcgcggtctatacgggagacggcgtcccgaagcatgccgggcc

SEQ ID NO: 11268 - DNA, 8572 bp, Oryza sativa
  unsure (1)..(8572): unsure at all n locations
ggcttcccgaagccgatccgcggcttctcgccggtcagattcccgcctccgggcctctgtggtcgccgggtcctcggcctcagactggccggacttggaatggcgggagggacgcgacgggatctcgctgaaacagaagaaagaccagaagacaaacaagatggatgagtgaaaattcgcgttgaaggaatgaatacggccacgatgggcgtgggacgaacctgcgagggggtcggttaaacgaccaccttggaggggaaataaggtttccccgggatggttctgtcccccccatcttgcggggccgtttcttcttccgctctccctcgggctgcgacgtcggcgtggccccctccgggcgcctgctgctggcacgcgccgccccgccccctcggggaggagatgggggaggggttccttcctgcttcctctttccccgggcgtcggcagggcggccgctccccgggcccccgacgcggggcccagaagcacgaccccctcccggggtagattgttcccccctgcggctcccgcccgcgccatcgtggcctcgaggagcccgctcctccgacgccccgaccgcctgcatgatggtcaggatggaggcgcggtctggatcgcagcagagggggaggactccttgaggaatgagggatgcctccacggagctgagattcagcacccgttggaccactatcttgaagtcctcaggagcccagtcccatctgaccccctggtgggtcctcatacagtcctcggacccggtgtactcccaggcgccccgggcgcgccgctggagtggcgcgatccggcgacgaagatagtcgccgaacaccatggcccctgtgagcccctgggatcgcaggcccgccaggcggtcgagaatggcgtcgtagccatctcccagatctaccggcgcccgccagttggaggcctgcgctggaggctggctcggaagtcggaggcgcgcttcgtcggcgaggggggtgtagaaccagtcgctcttccagtcatcccacttcttgcgaaggacgcagggaatgtagcggttcaacaccggcccccgcggctggaagtagcaaccaccaaccaccgacggcggcgacaccggctgtacggtgaagaaccaccggaacagccgaagggatgggcgcaccccgatgaacatctcgcacaggtgcgcgaagatggccaatgtcattaccgcgttgggggtgaggtgcgccatctggagatcgtaaaactccagaacatccatgaagaaagaagaaaatggcggaaccagccctgccatagcaaaagggaggaagaagacagaccgccccgggtagcgtggcgccgggcgtccctcgcccagcgagactatctcccggccggtggcagattccggcatgaagcggcgcggcagtccggcctgtctctcgctcacgatgcgggaaggcggcagcacgctaccgtcaagcggagcggagccccgtgccatgacgccggaaaaactatttatttgaggtcgcaaaccacatttattgcggtttggacgagcgcatcacgccgcatgtaacgcagtgcagcgcactcgtttatccggtctgtgaccagtcacagaccggtcagatcgtgggttaggtggcgacaggcggtctgacgcacgcctcgccccatcccgttaggacgagagcctccaagcactcgtccctagccggagccggcgtgttagctcctggagatggcacgttagttccggtcaaatatatgccaggcttcatcctaaccattacaggcaagatattgtatgaagaagggcgaacatgcagattgttaaactgacacgtggtggacaagaatgaccgatttgtgaccggtctgacaatggtcatgtcgtcagcagacagccatgttcccacgtcgcgcctgcttccggtggaagtggaggtaggtatgggccgtcccatcagaaggtcattcggacggcaaccatacagatctccgtccattaatgaagagaagtcaagttggagggaagagaggagaagtccccacaaaaaagagagagatggtgcatgtggtatccccttgaggtataaaaggaggaccttgcccacttagaaaagggggggatgatttttaggagaaaacgatcccagaacgatcggaggctggctggcactttgtagcttcttcatacacagatccaccaaaacataggagtagggtattacgcttctcagcggcccgaacctgtatacatcgcccgtgtcttgtgctttttccattctcgcgaaccttccacacacagactaggagcttagaacctcacccagggcccccggccgaaccggcaaaggggggcctgcgcggtctcccggtgaggagccccaagctccgtcagctctcatttatgaaattagttttttattagtctatgtttagtactctaaattagcgtccaaacatccgatgtgacatgggcaaaaaagtttttagccccactaaacaccccatagtttccaatcgtttttatcaccagctgaaagcgaaagggaactactgcacacgtggactagtagcttggggaacagatcaggtcagggaggaggtggccttgtctgtacttcctcgatcgtcagagattgatactgcctgtccttgatcagagtttgatattaaattcgtcacatgtgcaatgatcctggcacagcgtaaagcatggcctgattacaattatcacatgtaccccgtagtttggtgagatttgtccatatgcatgaatctgctggaggctttagatcagatcttcaaaatcgtgcagaatctggctggctagcctgagaagcaactgcaaaagaaaaggagctattgcatttggtctatatttctttcctttggttttcaaactctagaaaggacacggagtttctcctatagattaaaaagaagagaattgattagtttacgagaaaaattgacccaaaagcattgcaattatataattatatagttaaaaaaatagacgtgaggatcgccaaaaataacaactaaagataaaacgccatcatgaaccgcatgaataaccatgatatttattatctatccctttgcatatagtttgatctctttattctcttggagaaaaataatgcaaaatttagtgaaatatttattatgcattaaaaccgacaatacctaggaagagctatataggcatcgatgtattatgcatgttatcattttcggccacacgcatattcttctactacatgatggacggtcacgctcacgttttagtaggaccattaactactcagttctccttcaatctaaaaatataaacaatcctacttctcaagactaaggttgaaggaaaaaaaaactttggtactcctcgttaaacgagggttgtttaggaacaagatgtacaaaatttaaacgagagatgattgatgatgcaataagtattaatatgcggatgaattttaaatgttttgaaatgcttaccactggacccatggcaaatagttaaatgcccgagtaccgctatacggtttatttaggtaatggaatgaaacattccggcctttgctcaagagctatagtcaattattacaaggttcacacagtgagtaccgctatatatgtatgacctatttttacaactcatgtacaactagagacgacgtataatcatagatcaattaaagccgagcatgttcataagcactatagccgtttataaccattgatccaaattcagttttacgagagttatacatggtcgtatgcatagcaattttctaaatgcccccatgaattctagatagagggagtactgtttcgtctcatgtacgctccttgcacctaaatagtagtactctgatcttagtggggaatattagcatatacggtgttgatcagtaaccttgttttgggaagccaggaaactcggaaaatatactagaaaagcaaaaaaaaggaatgaacaatattgctaattacgtacgattatatacacccatgtggttccttttcaacgcatcgaaatgacggtacagtatgtacacaggtgatcgattaacaataaagcatctttgcaaattgcagctagctagctaagctaggaaggattaagatagcatgagcgctttactactactggagtgtgggctgcgtttagtgcgtcccaccaccatgtatgacgccaccatgctgatatcctcatagccagcgaggaatcaaccatgaacgacacaggtcattaatcaggtagctactgcatgcacagtggagtacataggaaaaaaaaaagctttgtatggtgcagtactgcagtattcagaagtggattccaaactctcgaggaaaaatccgcttattatttatatgttatctaaataattataaaaaattttaacaagaaagattaatatgtgataaatcatttcacaaatatgcaggttaaaatgggaaactgttttaaaatttaacttctacaagttgcaacggaaaaacagattaagctgtaaatatatgcttcctccgtttcacaatgtaagtcattctagcattttccacattcatattgacgttaataaatctagatagatatatatgtctagattcattaacatcaatataaatatgagaaatgttagaatgacttacattgtgaaacagaggaagtattaattagctagccgtagtttaattttggttgttcgacatagtgttaaacttgcgatttcatatgaccgagctatatttttataattttctctttagaaaagtactatctctaaaaaaagaattcccaattaaccgtgcgccgtgagctagcggctctcgtcgtccctggcctccatccatccatcgctttccctcacgtcgcagctcgacaccgaccggtggatcgatcgtacgtgcgatcatctcgacctcgcgtcgtctcttctcggcggctcgacgccaatccacgacgcgcgcgccgcttgtcgcgcgcgcgcgcgagagctcgtttcgatctcctgtgtggctctacgctcatccacgcgacgcgatgcgccgctttcaattcgatcgacctcgtcgntgtcgcaattgggcatcgatctgtacctgtacgcatcgcatgtactgcgtgagagcgacgtcgttctagccatggtatagctacttttctttcttcgttgtggttttaacttataagctacacgtaaaatgagaaatatattattagcataaaattagttaagtattaattattaaaaatttaaaataaattttatttgaaatttgaaaatcatatcctgtatataaagttttttatacgaaacacaaccacttatccgtttgaaaaacatattaacgaagcttatttaggccgggcgctagctacaatggtgagctttaatttgtcagcctcttgctgcatatatgttctttttagagaaggatattttctatccggcctctatattcaatcggatatatctatgcagtctttttaaattaaaaacttagcctataaaacagagaatttactcatcaaataatccaatctgaaattcgtttctatagatatttgaactcacgacttagagtgttactcgagttactgtaactaatatgctacatgaggaactaggcactgcgatcgcgatcacacgtttatgcgatcgatcgaccgggcacgaactgacagctccagcatgttgaatgcatgtatttacctttacttttgccaaagggtaaaggttaagtttagagactatatagcttaattagggggcattgcgctgcctggggtgccactagcacgtactagtgtgtcaattagtcaaattgcttcatctgtcgtgtgtactagtgtgtcaaattctagcatcaaattgcttgggcaggggaatatttggctctatatgggtagaagtaggccttgaaatgtcatgctatagttaagtacacatcaatcatctatgttgattcttatgtttgccggctgtatctgctttctaatttgtcgatcaacaatacacctaaatttaattaaggaaaaagtacgaattacacccctaaactatcgaggtcgtccgaattacacccccgaactcaaaaacgggacattctacacccccaactattaaaaccggacgaattaccccccctcgatcttatccgcggtggttttgatctacgtggcatacacgtggctgtccagtcagcattttatttttttaaaatggtgggacccacatgtcatacactctttctctcttcctccatctcccttcctctctctttgtcggtcagcagcgggcagcgccgcgcacgccggcacgctatggcggagaggcgagcgccggcggaagcgtcgacgagaggatgcgatgggcagcggcgcgcgggggcaggcctgcggtcggcgcgaacgacggcgcgcggggagatggaggggatgggggagaggcgggcgcaggcgtccatctcggagaggcgggacgtcgtggcaccgaccgacagcatcttgaggacaacatcgtgaggccgcggcggcggtggtccaggcggagcacgagcgcaagctctctgctgctggggacggcagtcgcgacggcgaggaaggggaaccaacgaacgaatgcttcttccaagagattccccgcggaagacgcctgggccgcacggaagcggagctcgctagggcggcggtcggctgatgcaaagctcgcggtggcaaggtggagacggactgagcgggcggcgacttangcgaaggccgtcgtgcgactacctcctcgcggacctcgcccgcggcggcggccggcgctacgacggcccacttatccgccatggccgccggtgcccacctctcccccatcccctccacctccccgcgcgccgccgtgcacgccaaccactggcccgccatccgaagcttcctctccgccgcgccccctccacgccgaccgccggcccaccatccgaagcttcctctccgccgcgccccctccgagccgctcccgcagccgcctggagctccctcccatccgcgccctccgccgctcgccgccgaccggttcccctccgccgctgtccgcctgctctgcctccgccgctcgctaccgactggttcccctccgccacttgccgcccggggagctctgccgccggccgcccgctctacctccgcctctgccacccgccgctcgaggagctccacctcggccgcccgccgcccgaggagctccgcctccgccgccggtcgccccctccaccttcgtctcagccggcgttagtgagatggtgaggagagggagaagagagagagagggagacattgagtagagagagagagggggtgtggggatctgacagtgggtcccactaattttttttgtagagagggaggatgaggtggaggctgacatgtgggggcagtgccacgtgtgcggccacgtaggattaaaaccgctctggattgagccgggggggtaatttgtccgggggtgtaattcggtcgacctcgatagttcaggggtgtaattcgtattttttcctttaattaattatatgcaacgcctaaatttgcataccactagtttggtttcatttacatgttcttactatgtattcgtccatgaaagactaatagttttaactagctaaaagacaattagaaaactactgtagcctttattaatgcgaagagaaaatagggagagatgatgaagtactactgcttctatggctaaaatgagacaaaataatgtagtaagtagtccagagaatttcacgctaaaatctagtctttgtggtataaatttttagattaaaacaaaagtttaatttgttagggatggaggaggtattgtatatgtgtttttatttacgcttgttcatcatgaaatgagttaaagatggtgttctccaaccttataattagaatatctccccaattaatagaaattttatagttcttaataaagtatctcgagatatctaaattttacactaaaattttttgtgataggtatcaaattttaaacaaaatatggtaccttcaaattccgttctcaatgatgctagaattactcctctcccctcccaaattaaccactacaggataacaggaattaaaatgatccacatgaacatgacttgaaactaagaggataataaggagaccccacaaatcaaacaaggtatagtattcatgaaaacgagtgttattatttttatagttcaccgaacgatggtattggtgcgtgtcatatccttgtgtagttttgtgcgtgcgtgtaacgtacttttgactagttgcgcctctccctctccctccttttaatctctttccacgactttatcatattatatatataactccatataataagttatatagtagtagtatagcaggataaacaggagaagaagataacagagaggatgggggacgcatctgctgcgttgtgatggatcggcttatccacaacaccggcccggggcccccccaccctccctaccgccgatgatggggatgtccatgtgatccatccatccatccacccccatgcacttg

SEQ ID NO: 11269 - DNA, 752 bp, Oryza sativa
aaacatactatgccaatactgacctgttattctctgtctaggatcaaatgtcagcatcttttcaaccagatcaattgctaaaggatgaacatgtggaaatttttcaggaaaggactgccttgcatgtctaggaagttggcgaatgtatcttcttgcattttcatttacaaaatccagatcagcctcatttggcgttccgatgagctgcaattaagaaatttatgataggaaaatcaaacacacaataatgtgaaacagatagtatataaatcctctagtgagaaatgcgtttgtattaatagccatgactcagaattcagtatcctgcatatcagccagaaagccaggaccttctggagcaacataaattctctcctctttgcattttccttagttttaacatattcccataggataatcaacatattatatatttccaaaacagtactccagttatgctaaatatatgaccacacaacataacctgatcaattcaatataaaataaagttcaaaagataagagtgtgttctaacctccattagtagacgtaattgatggacatgatctcttccaggaaacaaagatgcagctaatagaattcgggatctcgaaggtggactagtggagaagaggtgctaattaattgcatgtatgcataaatgccttatattatatatgaaaaatctgaaaaaaaatagttgggccttgtattatgaaatatagggagtatctattatctacatagggtat

SEQ ID NO: 11270 - DNA, 757 bp, Oryza sativa
agtagtccatcatgaggctgatcaagaaaaacttgacgcacacggaaaagcgcgagagctcagaaaacacacgctgagccccctacctggcgcgccagatgacggagcgcggtgctcctcaccgggagaccgcacaggcccccctttgccggttcggccgggggctcagggtgagatctcaagcttccgtgtatgtgggaaagatcgcggcctctcaaaagagcatgaaccacaagcgatgtatacaggttcaggccgttgagaagcgtaataccctactcctgtgtttggggggatctgcgtatgaaggagctacaaagtgtgagccaacctctccctcgttctaggttctgaatctggaaaagatcatcccctttctctatggatgcacagaacattttacatgacccaaataaacatactaatgacactgattaaacaataaagtaatgcgtaaaataaatagataatagtaataagcataaagatggcatcccatcgaaccaagacatgacttaatgcatacctcccattaaataaattctcgactaactatcaaatgaaattccaattgaccccaaatctatttacccaaagttactaataccctaaactgacctaaattttaaatatctcattcgaattagcgatcaagatttttccttgtaaaccaaggaagaaaattctcaaattttccctgaaacaaatccaaatgccaaagaacatatgcgtatgaaagagtttaagtgagctctta

SEQ ID NO: 11271 - DNA, 628 bp, Oryza sativa
atgaagataaaaaaaaagaaatattaagaaacaaatcaatatttaagcactttgacactaaaaggagattcatatcaatactcagaagtagatcctaggaacacaaagaagttaacataacctaaaaaaattcaaaaatatttttcaggtctctgctaagagtctctgactactgatctaaaactttatcttctggacagtagatattatgaaggcaatggagaatggctagcttggattttctatagatgaaaaacatggatccgcattctattacaaatggttgcagtgtatagcctttcaaacaaaggcttctgcgaatgagagaatgagagaattagggccaattgctaccagataaaagatacataacgttttaaaaaaaataaaaaaggaaataacaggatctagttaccacatgatgcctcttaacaccaaaatggaaattatattagttcattttaactttgaagtatactaggacaataaaagagacaaatgaaatgtacctccacatactgatgccattgatgttgaaccatcagaagccatgacttctgaatttacccgaactgtatatggaaattcacgcttctgggggaagcacagcgagcaatgctttctccgc

SEQ ID NO: 11272 - DNA, 8429 bp, Oryza sativa
cttggtttttctcaacgcacaagctgagatccgcgccttgaaagagcgtggaattcagcgcacttcgccgagtcgtgatgtctattgtcctattcataagacaaaaaatcacgacctctgaagctgcaagattcttctcaacgccatgaagacgtcgcctcctaaggtccagcagtcacgaatctctcctagagatgtgaacaaggaatgaggaacgatggtcatctcagaccgattcgttggggtgatcgacattgatccccacgagccatcagtcctacactcgctcgaggaccagggttcatcgttgacaagtacaccacgcgatgtgtttgctatcgaagggaccagcgcgtttgcgcgcgccgacgcggaagcagagaatcaagtggttacaccggcccagcatattggggccatcaacgcaatactgagggaaaccccttatgatcccgttctgaacgatgatctcgcacggtggacagaacgactacgggaatcagtaaccaacctcaacaacgcatttgaggaggccgctgccgcggcacacccagaacaaccgccagctggcggtgcaaatggcgcaccactagaacagcaggcctcaccccgacaagccacccctccacaccacggcaccagcgatctccgtgaccatttaaatggccgccgagaagcacgacgcgcgcaagacaacgtaaatcgttcccgacatcgtctctcttcacgacgtcgagagaacgaagagcgaggaggacacccgagcgagaaccgagaccatgataaccgccacaaccaccatgaacgcgatgatcgcgaacagcggatgccgggcgatactggtcccggacgccgccatgacgatgacgatgatggagatcggcgccggaacaacaacggtgtacgacgagaggattcccgagaacccgggcgtcatcctcggaatcgtacaccgaagccgagtgacccatcgtcgtcgtcatcatcctcttcatcctcatcatcagagagacatccgcgaaggacatacgatcgccgacaacccgccgcccccagcgctaggtgtagagctttcaaccgttcgctacgtgatgtccgatggcctgagagattctgaccaggagcaatagagaaatacgatgggagcaccgacccagaagaattccttcaggtctactccacggtactctacgctgccggagcagacgacaacgcgttggcaaattatttgccgacggcattgaagggttctgcgcgttcatggctgatgcacctcccgccctactcgatttcttcgtgggcatatctgtggcagcagttcgtcgctaacttccaaggaacttacaagcgccacgcgatcgaagacgatctacacgcgttgacatagaatccgggcgaatctttgagggactatgttcggcgctttaatgagtgcagaaatacaatccctgaaatcaccgacgcctctgtgattcgcgctttcaaaaccgatgtcagagatcactatactacccaggagttggcaacaaggtggatcacaactactcgaagattgttcgagatcgtcgatcgatgcattcacgcagacgatgcactgagacgcaagaacgacaagccgaaaacggggggagagaagaaaccagccaaggacacacctgaatcaagcaagaagaaaagtagcaagagtgggaaaaggaaagctcaagcggaagtcctcgcgtcagaatacgagcgccctcccaagcacccagacacacaaggcaacgtcacgaagagaatatggtgccctatacacaagtcggtcagaaattctctgaaggattgcctagtcttccaaaagtcgttggaaaagcaactggcattagagaagggcaagcgagtacgtgtagtcgagaaggccgttgaggcaaccactcaggactcggactcggcacacccagattccgatctccatgtctcgcacatgttcgaaggttccacgatgtactcctcaaagcgagaatacaagaaagtggagcgtgaagattgttcgacatggcagggggctgcacccaagatgaagtggtccgaacagaagattgagttctcagatgaggaccatcctaaggctgctgtcatcccaggacgatatccgatcatggtcgagtctactattcggaatatcaaagtcgcgcgagttctcatagatggcggcagctccatcaacctcctcttcgccagcaccttggacgcgatgggaatcccatgaagcgagttgactcccaccgatcaaccaggtgcacaaagactacaagtgctctagcccagagttattcaagtacctcgcggaggtcaggaagctggaaaaaagatttgatggaatcgaggtccgacatgtataccgcaaggacaatatcgaaccagacgatctggcgcggcgtgcgtccagacgggagccactagaacctagcacctttctggacgtcctgacaaagccatcggtgaaagagtcaaacgacgaaaataacatagtcgccttcgacatcagcttgggggctacagaggtagaacgcgccgttgccgacatcgagaccacagacgactggcggatcccactcgttaaattcataagtagcgatgagttgcccgacgacgatgcagaagccaagaaaataacccgctaggccaaaatctactgtatgatcggcaatgatctatacaagaaggcgccaaacagggtacttctcaaatgcgtctcgtccgacgacggcaaacacctcctcgtcaacatgcacgaagggatctgtggatcacatgccgccggtcgtacattggtcagaaaagcctttcgacaaggatttttctggccaactaccctcaaagacgcttgtgacatggtacaatggtgtgaagcttgtcagtttcatagcaaacacacaaagctaccagcccaagcactgcaaaccatccctctcacttggccattcttgtgctgggggctcgacatactcggaccattcccacgaggacagggtggctacaaattcctgttcgtggcgatcgacaagttcaccaaatggatcgaagcaacactcacaggggaaatcaaggccgacaacgccatcaaattcattaaagggatattttgcagatatggattgcctcaccgcatcataacggacaacggcacccagttcatcagtgccgacttccaggattactgcattggactgggagtcaagatctgcttcgcttcggtctctcaccctcagagcaatggacaagtcgagagggcaaacggcatagtactacaaggaatcaagacccgtgtctacgacagactcatgtcacatgacaagaagtgggtcgaagaactcccttctgtactttgggacgtgcgcatcacaccgacaacgtccaacaaggagacacatttcttcctcgtgtacggctcagaggccatgctccccaccgagctacaatatcagagtacacgagtacagaagtactccgacgaggatcaggaggaacaacgaaatgatgatgtgaacctactcaaggaacatcaagaacgagttgccgtcagagcagctagctaccaacaggctcttcgtcaataccacaagaagcgcatccgagcacgtacgctttcgatcgacgactacatcctccgacgggttcaaagccaagcagggcgaaacaagctctcacccaaatgggaaggaccgtacacgatcacgcaagccctacggccaagcgtattcaagattgcagacggcgatggtcgcgagttggcaaattcttggaacattgatcaattacgtaaattttatgtataaatcaatagcatccattcttgtaagacatcttacagcttcaataaagctatttttcaggaaaagattacaatcaaagtgttccttcccgatgatcccttaacccgatgacacctagcgttgaaacctatcctcatgtccctttacgccatcttgacaaggcctccgaggaacctaagggaacttcggcttgggacgcccagagccgataaggtcttgtcggatcctgtagaaacaaaagaccatgtaagatctggtcgtgtaagagttctcgccgtgcgtattaaccaagccgtgtaatcggaaatcgggttttccaacttcacggctgggggataggatcagtgcttgttcaaccaaggcaggtcaaaggtccaaaagccatatcttccaagaagaattctccgatgacaaggctgggggttagggagagtgtatgactcaagtgactaatcgaagtcacaaagtgagaagacactcgtacacacagcatccagagtaagaaagcttagttagatagatttcctttctatttcacaagtacttcttacagtccgcaaaaaattccaaaatatattacactttttcctaagatatttgtcacagatatataaagactaccaggaaggccaatgccaatcaatcgactggaagactttctccgccagcggcgccatcgacttcgctaggttgtatatctctgcaggagtcctccgagaacgagaaaacccttcgcggatgaactcgaggtgcagctgcggatgacgatcttgtatacaggccagcacgtgccctccgacataccggctcgatcgacgtcactcctgctttaggcctcgtcgatacgcttgctgatgccttcgagctgagcgcaagccccattcagccacgagatgtatccggccgctgactcctcgggatccccgcgaggtactcggagttccctgcagactatggccatggttttgcaacaactcctgaggtacgagttgaaccacacctcgcgacctcggagtgcttccagggcccggtgcttcttgacttccagcatagtcctctcgagttcggcgacctcaaacttcatcctccagtactggatgcgacgatcacgatcggcaagcgcactcacaaggtctgctcggcatggaaacgactaagttaagctgttctcctctttcgagaacacagcaaattaagccaatccagaaagaagagcaaaggggatggaaacaaaaagaaccaacctaaggaagtcgtcgccatgcccgtttccacgggcagattctggtccacgtcgtcctgcggcacatatggctcgagcgcaagtgccggaacgattacaggcaactcaggctgcccgcgctgctggacatcctcgacatctacatctgtacaaacaacaacacaaagtacccggaatcaaaatgctaaagaaaactaaggtaatgactgcacacacaaaggcagttggaaccgacaaaagttttacaaagcataattgattaaggagtacagccgaactgaagtcctactcttcaaaaagtgggagaacagactctcctagatcactgacttcttccatcacgtccttacgcgcgttgttagccgccccctgatccaagatcctctggaaatcgagttcagggtgcgacaaccttacgcacgcgaggaagtggcacgccccggtgtagatcccgttggacgtctcctccccgatcctggccacatgcttggagcgaatcacctccatcgccgtcgccagtttcgcgagcgaagtcgtcagcaagaactcgtcgggattcgccaggatggtgctcatgacaccacactccccggcgagctggtgtaggcctgtgtaggtaacccgcagcgaaccacggatctccgacaggttgttctcgagctccgacatgcgctgctcgagcccctgcctttgtcgctcgttgccggccaccagcttcctcatcttcttgaggtcctcgcgaacctctgccaggtcacgcgccagcttgttggcgcgttcattcgccgacgacgccgccgccgccctcgcctccgcaatctcgcgacctatgccgcgagcgccggcctggaggatgcgccccatctcgacttggagctcctcccaggtgaggacgtcagcaggcgggcctcgagcaggcacaagatcgccggcagggccactgggcgtcgcctcacggctcctgggcatgactacgacatctgtcgaggccactgcaggagacgcactggagttccctccggacccatcttgcgccgctttcgcccgcgctgccttgcaaaaaattgccataatggccatcaagacaagctgccagaattcgatcaagtgaaggacctcaaatttgtccacttacttctcaccaagtgtcaccagcctctgccgtcgcggaggcgggggagacgcatccgatgcctaagtaaaacgagtacggtgtgaggacaacatcttccgactacgcaataaatgaccaaaggggctcaccgatggagtgggcgccttccgatgattgccgagcatggaggagaacttcctccccttctccacatcaatgccacctaatggggaggggaggggggcggttggaagatctagcacctatgggccattactatccaacaccaataagattgtatgtagtagtgtgtaccctgacccttctattccttgttgatagcaacacctcatggatgccctgtcaatatatctatgtttatattataatagaaaatagttgtcaattttttttaattgtgtcctcgtactatcaacttggagtgaatatgtcagttttgtatgatttgactctcctctacatacaccagaggacaaatatctaatgccttgtttggttcacataattcttgatagaattaaactcagcatatatatggtcttgcatgtgcttccatagtgtgcttctgtaccatctcgtaccacatataatcaaattaagaagcaatggatggaactctctcataacccgatggccagaagcccagcactactgctacctcacgaatcgcgcttagggttaggaagtatcaggaattataacatgtccatttctgatcattttgacaacgatctggactggatagtacgtagaggggcattgttttttcaaaccaaagagttttttcaacctttggtatgctgaacttcggacttttggaaagaaacagataaacacaaaagatttctgccatcgagatgtctagcttcaacgttgttcttcgatcgccaaatccaaagacggaatgtggacctacatattagcagaagcattggcagcttaagacaagccaaagaaatttcatttctattttatttctctatctgaatgccaactcttctctcttgtaattaattaattggcaattctcctgctaagttacagaaatcatttccacaaatatactggttcaaactgaacatcagtatgataaatatatttttttatgatgtcaacctcttctccatcataaataactgttcagcataagaaatatattcagacaagtatgtacttttaataattagggtttgatgggtattggaaaactatccaatcaactgcacggacaaacaaaaccaatcgttttctctacatgtcgattgtcgactattcgtgctctgatgaaaaacacaattagagcgatcactgccaacgattcgtatgatgttaaacactgccagtctaccaccattttaccctcaccattttatccttgctggatatatatagcaatacctcattctaattcatctgataataaatggtaacacaatatgtatcaaatcatccttttggatagtttggtttttgatcactgaaggtaacttgcatcacccgttttttcatgtacgcatggcatgcatactgcagataatgtatgttcgcaagtccaatgtcagcgtgcatatgcgattcctaaccaatgaagatgaaggtgaaactaaactgctgaagttatcaacagatagaaaacatgtctacaaatccaccctgtttctgagtccagaaagattatttaaaactgattaaaggatctgttattatagctgattggacatctagagagtgatttatgaaataacctagatgagatgaatgttcgttgctataaatgtcccagaaaatatatccctcaaactcgaccatacgagcgcaagcaacagccccaaatcagatacagtagattatttctgcttttgtgttggggttgggggtagcttaattaatttggcagcaaattgaagtttctgacagtagttgtcacatgcattatatatatgctagctaatttgcatgtgctttccatgccgtgcatgattctgtatatataatctcatatatataccatatatggaggagtatatatatatattcaggaagcaatcgatggatcaccccaataacccagatggccagaagccctgcactgttgtcacctcacacgtcgcacttagggttaggaagcatcggaaattttactgtgtcgtttttcaacaattaggctggaagtttgatgaaattttgaagtacaacaatttgtaccagattgtaggggaaaatagttttttctgtg

SEQ ID NO: 11273 - DNA, 2424 bp, Oryza sativa
tatattttactctttttagtatgctggccaaacttgtgatgccttcaacttaatttgttctattacagatggaaatggtttcaagacaagtacaatgagacttggtgctgatgttttagttttctcccgtagtggtggaaaaggtggcaaaaggttaagttacacttcatcttgacaaacatttaaaaaaaatcattttagaagatgctgctaacatgatatgtttacaattccctaacaaccaaaatttctttggacagatgagctaccagaaagcctgtgtagttcatcaaacttgaaagcaccaaatgatatttgttcaatttagttagcaggtcaaattaatttccctggtgtaatgcatggtcaagaatttgatttaaatctatattgcatgaccattgtgttctgaaaagcaaatccttttacactgtagggaatgtataatcatgaactctctgcgtttccagataaatcctttttagttagtgtatagtttatatttttctcccatatgaccaacacttagatattaagttaaccagatttgctatatggaaatgacaccattagttcaatcatcaaaagtgctattatgcattatactgaatttatagttttatcaacacaatgtgataagaattgataattggtgatcaaaattttagtaaaatactttagtttcttaacagttgaaacttgttcctttaccattgcacaactacatgtggcatttctttcattatttgttgtgtagttttgtagtacgtgcatacaattttagttattttcctttatcaagaaattgagacctttacttttcctttatcaagaaattgagacatttacttttgtttggcatgaaggcttacccaaagtgttggcatgctatcctacacctttctgaggagcaccaacaaagaggatattgttgttccaatggtaggattccttctttggtgcttttcattagtttcaaatttttaattttctctagacctttttttgccctcatataaatttttttaccacccacctgaagcatccatcctcattttttttgaatatttatgggaggatactaaagatatttcctgtcatacctttctcaattttgtcaactcatatcattatgcaagttaaaataaacactatagtactgaatggaggggatactcttggaaaaatatttatctggaaattagttatgtcgtgtgtaatgtctttaccttctgaattttcctatgtttatgtgacaaattcagattgattatgaaaatcaacaaggttggaaaagaaagccacggactacatttgctgattggaacacaagcttacagactattattacatggtcgccatattcaactgaagcagaactacttgagcaggtataatttatgcaagatcactaaacaaatatgtatttctactgtaattatcaacatgattattggttcagttgcttgaagtttctttgtcatgacctttcctttcaaaagaaaagggcatctgtgcatactcgacaatggaagatgtttcctggagctgtctatattttagtttcccatttttagaaacaaaaacatattattgcgaacctcagcacgttccaaatggctgtttattttgcagtttagttctataaaggaacaagggactcgtattatcatttacaatctttgggaggacgatgaaggacatttggagcttgattttgatgaggacatacacgtatgttctactactaagtattaataacactgtgccaccatgcgcaccatatattttagttaagcagctagtaaggtttttaatgattgtggaatgacaggatattcaactcagatgtggcaatcgtgatgagaaaaatatcctgatggctaagcagtttccgaactccaagcatttcctgacttataagcattcattaaaggtaactttatagtaccttttgaattgaatatgcttgatgtgttctgatggtgctgaattttgttagtattaggctattagcatgcaatgttgcctccatttgtgatttatgtggatttcatttatgcagagcacattattctatttgtgccatgcgataattgtttgctggcccagtcagtcatgccagttcaaaatgacttgagtatcctttctgtgcaaagctatgcatccattttatatctccgagttccaagttttttccaaatgattttacgtggaaaagagattgagcaccataatattgtgactgacatgatgttgaagaaagaggtgaaatacaagccggttgcacctaatggtgttccaaaggattcaaatgttaagacctgtaacctcataactctttcctgaatactgaggatgtattgatagctcattactgatcaaaattttcttctgtatctcagatggtagccgatgtaacaa

SEQ ID NO: 11274 - DNA, 10624 bp, Oryza sativa
tgacaaattgattgagagctaactaccgaggatatatggaaagatggtcggcgagatcaacaccaacgcttggtttgtcctcttcacgggtggcgttgcaaagaagatatatttccctatatatagcgtcttgcagagcgaagtaatatggctgattgtacgtagtggagtggagtagccgcaacagcttcctaatcgtgcacgcgcgcacgaagcacgggttgccggcctgcctataacgatcatacatgagtgtgtatcccccaggtgagagcctccaggactccaggtgtggatgaaggtctctaatgatgactaatcagttcgatatatagatgtatcaactggatgtatatatggatgattggtcgcacggaaagcagaccgttttgcttcgtcgtcatgacacggttggctagctactttttttttaagatggatatttttttactcggcctttacatccaaccggatatatacaatctttttaaattaggaacttagcctgtcaaacagggaacttagccctcgaataacccaatctgaaatttgctcctataaaaattaaaactcaggactttgatttgttacttaggtcactgcaaccactaggctatatgccctttcacgttggctagctacttggcttggcatggctggtggcaggggtgaaaacggtacggaaacggacggaaacaacttttatcgttttcgttttcatatttttttcggaatcggaaaccccggaaacgaaaacggaaacgaatattatcgaaaccgaaaacggagcgaaaacgaaccggcgcggatacggtaacgaaaatttattggaatacaaaaacccctcaaactgagcttcaaacttttgtcaagtccaattctcaactctagtcaacaattcataataaaacataattacatgaaatcgtctcaacagcaaaatatatccctctatgacttcatatagattacataacaagtattctaaacaaagtacagcagacaaccatggtacaaggtgtacaatatacactattatgcatgctatactgctaatctggtatgaactatcactccatcatcagtacataagttcatgaatcatcattcatcagtcatcacagaacacagcaacacacatcagtccatcagtacagtacttagttcaatcacaaaactacttgcatttgatgattcgatccatcgtaaatctgcagcacaaagaaatcaaatcggtttaggctcgtcggctcgtcgctaggctgctggctgctgccgctgggctgctggctgctgcgactgctgaggcgaggcgtcgtcggctcgtcggtgtggctgtagcgtcgtcgtcagtggtggtagcggcggcgagacagcgggatgacgccgcggctgcgagacggggccgcgaaacggcgggacagcgccgcaagatagcggcggtacgagacggcgaagacggtgggggcgaggtcgcgaggagcagaggacggcagagaagcggtggcgcgggcgccgggcggtgggcgctggcggtgcgcggagcgcgatgctccgccgctggctcgcggtctcgcgaagtcgtgtgcctgtctctctcctctctagggttagccactatttgtgttgggctggaaatttagggatgagttatagactattgattctatgggcctttttaactttggaaattccgaccgattccgagttccgatggaaactgctattatcatattcaattccgtttccgagaaaatatttccgttttcgattccgtttccgagaaattccgaaaaaattccgactggctgattccgtttccgaaaacaggcccggaatccagaaagtttccgtaccgttttcacccctagctggtggtggcgcgtatggccctcctccccctcacacacacacactaacgacacaaccgctggtagagatatactccatccattaaaaaaaaccaagctatgcatggatgaaacataatgcatgacagcgattctgaatatgaacatgtctagattcattttcctaggttatgtcttatccatacataggttagcttttttgggacggaagaagtagagtgttgtggaaaccatcggataaaagcaatctgaattgcagataggaattgaacacaaataataagttcagggttccgtaatgagcaaaccggcgatctaactgatcacgggattatacggcaaagtagcaaagctaaactttaatctaaacaaaacccaagaaactctgaaggggtacctaactatttataatggtgtgagaacgaccaagtggattctagggtcgtgctccacctggttggggcgcaccccacatgggccccacttgggccagggtcccaaacgaagttacaagcccaaaggcccatgacaggtaacacagcaccttgtttttgtgtttgcggccaaacgatatggagtttggtgatgaggctggatccgttagaaagaggactctgagagctttccatcaagtactcatgggctgaaaacggaggtcgtatgcagattcggtagccgtttgaagtcagcagggtagcaggtagccgaatcggattgcagaacttggacggcttgatcttgatgtgaacgacggttgtatctatagtagccatggtcacatcatatacttatgtgtttgagatagattaagatgaggagcttaagattaagaaattcgctagtgaaaatcaattttcacagccaacacttttgactcaaccgccagccaagagatatttttagccaaaaaagaaaataaaatccattttcatgacaaaaacacatcaacttttcaataaaaacatatttaaatcactccagtgacattcaaacaccaatagattagcatcaatagattatatatggacaaacaaaaacacaaaccactaaagaaacctagataggtgccggttgtgaaccctataggtgccggttgtgaaccttgtcgacgtttgatgtcgcgattccggtatttgcatagtatggagatcgttggtactaggatatatgcgagattgaggtaaaagagatggggacgaggattttttatacaggttcgggtccctaaattgtcaggtaataaccctactcctgttggtcgaagccggtcgttgctcttattgaccataatcacaccagtacaatatttggggtagcctatctatctgttatcgacatagcggactgaagtatcatcgcgtagtcgacaacagagtactctttctccttgaatccgtgcttggcgagatcaaagacatcgctagattcctctctttggttcccgtaggtaccatatgaggttttccttggcttatctctgatgtcgatatctagcagcttgtcttgtcgtatgtaggcttgtggctttgtggcgtctatgttgtccttgtcccctctcctcctagggggccttgtatttatacccataggtgtccccttgtccaagtagaactagggaaacaaatatggatacaatccgagtagtccttgtcgtttccatgtagaactctggttgtctttccttatccggaactccatctatatccgaggtcaatttccttataagacatggtatgtggtgggtcctgccgagatttagtcaactactattaggtatgtggtccataaccctgacaaacccggaataggtgccggatttcccatccgacacttagaaggcggcagagatgagagaaatcaaaggtgccggtttggaaccggcacttttgtggtcccaagaatccaaaaataaaaatggcttgatgcatagcttccaatcacccaagaacacaatcgtacaatcatgaataaaagaaacatccacaaaaatcatgaacaaaatcgctgccaccaccggatggaggagtcgatgctgccgctgaggagaatggagccaccactgaagagagaggatccactattgccaccagggagaatggagtctccgccactggggcttctccttcttctccacccttgccacaagctcccctctcgctgggccgctgccgcctcccctcccgttagatctggcggaggggagggtaccgccaccgtcattggaccgctcggctgccgccgcctcccctatcgttagatatgacaaaggggagggcactgccactggcgccgggtcgccgtctagtggcccacacctcaaatcctgccagatggagagatagagagctgagagagagggaggatataacggtgggtgcaatgaggagataaggaggagagagtgagcagtggatgggtgcggtgggttggctcgtcttgattttacgggtgtagtttgtttttttttaaaaaaaaacgacatataatatactataagtgtcggttttaatatataatatattatagatgccagtttttttcaaaaaccagcacctatagtattggtgttagtttttctataaactggcacctataatcgttcaaaggtgcccttttttgtattttcagctcgcgaaggtgggaaatggtctatcaataccagttttagcacttccggcacctatagtgccaacctctatgtgtctttttgtaatagtgacatcatcgtcgtctcatatagcgtcacgacgttcgctgtatcatcgagctccatcgggggaggtgcacgccgatctagccttcctgatgacgaatccaaaccacgatgagtcgccaccctccccttcgtgctaacttgaatagaatatcggaattaactgagaaaggtctagtcacgccgatacaagcgaagttgacataacttacttccttactaaagatcgaaacgatcttgtcctgctcgaaactaagaactcatcgaaataaatggtgacgatgcgccgaaagtaattatattgattcatgaagatatagtctacaaagactttgggtgtacatatttataccctcatattgatacaagttcttatcgggcataggatatgactcttacaagaaaagaaaaataactaatcttccctatttaagagatatattaaaaatatgaaatttcctctttgaattcagcttgatctggataaacttccatctaccaaacaatttttttcgtaaccaaatccactagagaccgtaccaaattttggtgttaatgtcaagcgaaagcaattattttagaaggaagaggaaaacctagggggcttacgtcctcatttcactctttttgctcctacgagacacaactcaactacattacattttagacgatcaaatcactaaatgatctctctctacggcacttttcacttcttttaggaacacgaggagccttaactacgactgttgcacttcactcagccgccaacactagatctagcggccatcgaggtctgtctcagctagatcttgtagtttcgaagttggctgtaatccctatccaaagaccggtcctctgttgctgttgtcgttcggaggccggcctgtcgtcgccatcccattgctgcctacttggtgagagagaggagagggaggagtgaagaggagatggatgcatgagaatgagcagagaggaatatgagaagagagacagaacgaggagactgcctgatattttataaggtccgtgtcgaaacatgatttcggcaataataaaagggggtagcgtacgagacctaaagtggatggatgcagagacaaaggatttagacaggttcaggccctctcaatgagaggtaataccctactcctgtttggggatttgaatccgccgggtgtagtatagatctgacgatctagttgtttcatcatgcccctagaggggctccctgccctccttatataggttggggggcagggttacaagatagaaaccttaaccaatacggcatcggtttcctaaatctactttacaatcttatcaaaccaggactttaggccgttccataatatacagggaaacgtaatacccaagtcatgatctgttacatattccatagacataagttatcccctatagccagtcggataactatgccatgtaggtatggggtacccataatctccacagtccgacggttctgtataaggttcatttttacaaatggctctcttaaaattgtcgtctgtctgaaaatcaagcttttggtacattttcggtacatttttcttgtgttttgtttgtccaccgtcattaagaaaaaaggagtgcgctaggaaaaaacattttttataatgctctacacgatatcttaactgattaaatttccatataataaataataaacgaaggcaaacattcctcaaagttgccttgtttctacgcatctgacggtgggattaaaaaacaaacttctccgggagaacaccacaaaatacaatacccacatgtccttaacttaagagctttccaattaaatcccccaacaatatatgaacagccggatcaatgaatatccattatccaaatgacataatgttgataattagagatggcacaacactagatcaatgtgaatccactgtagccacttcaaatacttgtaacatacccaaattctagaccttaaaaatttcctatcaaaatagttggaagctaacttttccgattttgagagctaaaaatttccatttttaacctaggtgtggtcaatctaacttgaacctaagtaaaatttgagaacaaattaaaaatttttcatttataacctaggacataaatgcaaacacgagtaaaagcatgcatacttgcataaaacatgttttgacttgagtccttcatgtgcatttgaatctttgatttgcatttcataatagatctcatgaatattaactaagatctagataaacaactaaaccattagggcctagtgctagctagaggaagttaaaatagaaaccatacaccttaaaatatatcaacatagctaatgtcaagcctcacaaaactaatttggatatccatctgaagacatgtcatgaacatgaaagtgaacaaataaattatatcatatagggtatattctatcttaatcatctctataagcattctcttaatttaatactgaagtaaacttatgcataaataggtaaggagcttatgacatgtgtaaggtaaactgtaattctaacatatcaatatcacctcaggttaatgagagtccaaatataacttttataaacatttacatgcatttaggaaagggaaacacatataagacataagtcttgagaattatctaaaataattcgtgcaagataaaatcatgggaaaattcatgtaggctctactcaacacatacaactcactgtaattttggtataatttaataactaaatttggtacctcaaataaatcagtcaaactaataaaaactagattaactgtagttcttaatcggctaaaaccatactttgtctaaaagtgcatttaactgcataaaagtgtataagtaaaataatttattcaaatactaggtcatttatcatgaataaaaataaattttccagaatttatcttctctgtttaggtctcctaaaaattcgaactagtttccaaagaacccatattcctctaatttctgtgagtattctatccataaattttgagtgcaaccaaagaaaatagaatctaggtatcttcatctaccttcagaaaaatccacaccaaattattctacccacaagttaaataattgaattactaaattgggagagagaaataatcctgaaaatcattcaaaccttttgttcacccacgtttctgcgcaaccctcttaccctagcttagtttgccacgacctggacccacttggcagccactctggctcatcctcaccctgtgcaaatcttccagccgaccagagacagccgagagagagagagagattggcgctggctgtgtacgacgcgtggccacaacgtgtcgacgccatcaaactcctattctagccttctcctcccagctgcatctccacacatcattctccacctctaagccaaagaaaccgagggaagaggctctcaacttctccgtcgccctcatccttgccgccggccgcgaagaagacgactatcgtactcgtcaataagccagggtaatccccatctctttcgcgttccatactctcatcaccatgccgaggatttatcctttgaatttcatcctctatcgtgcagcggatcgacgggaacgccgtcgtgcccacgtgtcacgcccagaaattcacgaaccagaatttctaagctgaatgtgcattaaacccctgtccaggaccagccagggtacacaaacgacaattgttgacatacagatccacgtcttacaaaaatataaaagattacaaatgcagcggaaaaagataaaagcgagctaagcctgaagacttgactcctgcagcgggcgactccagtccacaggcaaaccttgacggcagcgacgaaaccaacctcttcgagacatcttcaactgagaaggacttcaactctggtgtgggggaaaagagagcaagactgagtactacccactgtactcagcaagtcataccggaagaggaggtatgatgcaagatatatccaagggaggctaaaggttcttttgcataaagccggcatttcaaagcagcagttgaaagcagtaaaacggttgtagtaattaatccatattaaccaatcactgtccaacgttacaccacgttgcaacaggcccaaaccacctcttgaactaatcagttccaaaagctaactagggtgaaactaatcacggtgaatctggtcgaccgcccataaccgcgggcacggctattcgaatagttttactctgatcagaggtgtacaactgtacccacaagacacagccccacgacacgttcccgtgcgccgacatgccaccacgacataccggaaagaggccgtgacaggacccttcgcataaccccctctaaccgatcgcaccacaccttagggttcgcccccgtccccagcaggcaacgggcagcccccctttcgtgccgcggtgaatccggaagccgatcaaccggacaccccggccgacccaactccatcacgcccaccctcgcctgggtacgtcggctagagaaaagctacactacaagcccagccgttgcccacgctggcttgtggtaagtacgataagttcttccagggcatcccgcgaaccggtccttaaatgccatgggtgcgactagcaagaccatgcacccacagcccaccatgaagtatattttaattaaccaacaccattgcggtggcactaaatcaaagctatgccaataatcaagtctatgctttaatgtgatccccttttgtgcactagttgaactaagcatggctaagcatctcctaaaccaacatctagtcattttaatacccaagttatcaatggcgtaagggaaacaacatatagctgagtaataggacccatcccacatgatattgtaaaacaatgcaatatttaatagaaatgcgggacatttgtaaattaggtacaatatgatcaattgcaatgtatgacttgccttgctctcgcactgatggaaccacagcaacgtcttcgagaaaccacgaatcgacgaaacggccgaaatctacgcgacaaacaaagcacacaagcaaaacatgctataagactactgaaacagagaacaaaaccatttttaatggattctacacatttttatgaatttactgagacttgaatggacttaatcggagctcggatgaattagttatgatttttagaagattctctgtgtttttactataaaagaaaagccctaatcaatttattgcgcaatattgccccagggctgacgtcagcaaggggtggggcggcgccgacatgcgggccccactggtcagcgacactaaaagagagagagggggcggctggcaggtgggcccactgggcagtggcacaaggcgggaggggcgcggctggcaagcggggcccaccgggcggcggctcacggggaaaggaggaaggcggcctggctcggctcggcttcaagccggccggccggttagggcgagggcggcggcggcaagcggcctccgacggcggcggccggcgagaagacgacggcggccggcgacgcgggcgacggtgcatcgcggcgatgcgcatgcggggagcggcggcgcgcgcgggaggaagagagagggagttctcaccggggttcggccggcgcgggaggaaacgacggcaaacggcgacggtgagcgaccgaagggcgacggcgaacggcgaccgagctccgggacaccctaagagaggaagtgtgaggggttagagggagagagggtgcccacgacaagcgagagccatggccgacggcggcggctatggtggtactcaccggcgcgcggagagaagcgggccctgatggcgggattggatggggatgcggcggccggggtagctttggcggcggcgaagctaatggcggcggcagattggctcggcggcggctccagcggtggcgagcggcgaccggaggagtggaaaaggcggcggcgacgggtgtagcggtgcgggagtgatggagggcacggcagggctcggccgagaaaggaaaaagagagaggaaggtgcgggcgtgcttaaataggagggggggcgg

SEQ ID NO: 11275 - DNA, 2208 bp, Oryza sativa
attcctgcagcccaacgtgataagaacaaatcgttaacagagagggtatgcacctatatataagtccttccccctgtagattgttgatatctaaactgtaattctttgggcctgaaatatattatgttggtgccattttggttcttaaattttgagtgacaaactatttgaacaatgtgatatattagtaaaaacaatagcaatgacaaaatatgatgctttgaagtctaaattcgcaatttgttccatggaatagcaaactaagtgtttatctcagtacttgttgagtgcttcacatttcctcatgcaggtcagaattcacaggaattatcttgacatgtgatctcgtttgcttgaaagtagattcaaatgctgttttgttattttctttcttatcaagctttcacaatttcatgcttccacatttttacaggcgtttggaaactgttgtgttgcaatttggtgttcttaattttgtcggtttaagggtacttagcatcgtttctgcctgtagttttttttagtacttgatggacaatgatattttccatcttttcaccacaagaatacgctgcaatcttcatgtaatgtatattgctgatcccttacacaacctttttgttttccagttagaggatgcacagaggcaactagaaacttcaaacaaggaacaagaagcattgattgacatcttctcagaagaaagaggtcgacgagacctagaagaggaaaatctgcgagggaagctaaaggtgagtgcgagagaccgagcaagtatatctttgtactaaatcgcagtatcactgctacttcactttgataagcaattcgactctttgccaggatgcttcttctaccatacaagatttgctggagcaattaaacgctgcccgaaaaggtcgcaagttttgagaaaaaatagctattttgctaccaaaaattcactaaccggaagacctctagttttcagttacactgacgtgaaggattccagccattctagcttgtgtagggagaggctgtaggctattcccctatgtttagtgttgataggtagttccatcatctcacttccagatcacttccagcattgtgtacaggcaaggaatgccaataaaggctactgttagtgatcggtatgtgagtttgtaggtaaaaacactcgctaggccttttaatacttaattagtcatttcgttcgttgtgttcaatgttacacgtggttgtgtcaaatcagtctcgattttttgtgcctgggcttttcatcctctttatctcgagtctgacagtgaaacagtgttaatcaacggccgtatgggaggtaaaaggcatggcttgagccttgaggtaacggactccagctcactactcaactggtgtgaacacagctatgtgccatttgatagggtagtagattgtcattttattttcttttggaagtgaagcataagtttgccatttgggaggtgccttgtagcttcttttaagtaaagctagacaagctatcccagtaaggacctcaatcacattgcttattgtagtgtcaagaaagttcgttgcagattagtgtctagataacggattgtgtgtctgtagtatattagtgtctggattgcggatagccgacgctaagtttcaatagtggaattaagaaaaataaccataaaattaggttgtgtatcaatattaatatcaagtttcacttaaaattaaaatttagaatgcatgcttaatttctctggcatttcataacataaaaattatgaaataacatataaatatataagataaagaagatacacaatgctaaattattctatccatatgttgaaagaacatcgcttacacattgtagcgatgcgataaagtcaacaacggtcgtgaagcactgtaacaggctcctatagcgtcgtgaagctatagcagtcgctaagttccaatacgctaaatgtagtccgctatcttgtagcggtatcggtatagcggccgctattgcggtcactacaaacgtgctaaatatagtccgctatcttgtagcggtatcggtatagcggccgctattgcggtcactacaaacgtcgagaaccaatcttctagggctccttaagaacatagttttttttttcttttaatatgaatgcacatgcaaaagcagaaagtcgaaacacagggtaggaaagattcaacgaaatttcacatgaaaacttg

SEQ ID NO: 11276 - DNA, 1446 bp, Oryza sativa
atgtattatttgttgaaatatgtgaactttgtttcttttagcctttctggagagtgtggactgccgctggaagtggtgggcgtggtgtcataggtaagtgactatgtggtttggtttcttctattctatttattcatccacttttggttctaggaatgactgacttactctgcacaggtgtactggaagctaattttatagagccagctcatgataagcaggactttgagagaacaactcttctagcaagacttgaagcacgattaattcaaatgcagaaagactattggtctgttttcttgtcatttttcttggtttacttttgtggtcacatgtcacattatcaattctattgtaggccacattttggcttatctattagttagagatttgattctagttttcacatgcccccgtctctacttctcacaggtcaggaaatgctcatcgaattggatattctgggacacgtgctggcagatccaatgaaacagaaggtaaatgagccatatgattgttcgacattgctatggctttatagtatagatatgcaacttagtttctttaatattttgatattttgttattacttaccttgagtaacaaaagttaatagagtatcaaagttaacatcttaaaaagtttgtaatgttgcttcatttgttgggtaattgggttttcaaagtgctgcgttccttttttgactctctcaagttctgtcaggtagtttgtcacattatgtcaattggacataccaaaatggataatagtatgcagaggatgttggatcgaaatgatttcactatgagtgtccaatccatttgtgcaaattagatacgtttcccattgaatctctttttcttatgctcaaacaaagcattctgtttctttactaacagaaatgatgaaaatatacaaaaataagcatgacacattgtgtgcagtgcctgtcagtggaacttagatgacacagtatccttggtgtaccccctgataacatttcacttactaaatagaaaaaaatgatatcggaaaaactcgatggggaacatgataactttagagtttatacatgcggttgattagataattgacaatagtttttagtagagtcatctgtgtaaagacaaggaataatagccctatttcaccttatcattcttcttgtgctggtaataaggaggccatatattggcaaacatatatgatttctgaatggtgttcatagatatgaaacatcatcataaatgcaatttcattgtgcactccatcctgagcacctgtgtttttaacaagtattctatagatatgaattggtgtgcacatccctctgctaaggcttgcttatccccgttacgaatatgtgatgatcgaacttatttatttgccttcgatcactaatattaaaaaatgttgtgtaattttggcattaggggctgcaggaat

SEQ ID NO: 11277 - DNA, 6698 bp, Oryza sativa
tccccctttttttttaatttacttgtgggccccacatactggtttggtttttttcttactaggatgccacgacagcgaaactagacatctatactgactcaggactagttttacatagttcacgggtacacatttctggattgcagttaggggacctcggacagactcggcgtacaattgaggacgtcaagtgaacttattcctttccacgttgtacgatcttttctcagaaacaataattaattttttcctagagtgatggaaaatgttaaatgcatctgtaattctgtatgcacgagcaatacgtcttctttccccaccgaatatttcacaagcgttaaactatgtactcccacaataatgtatggggaatcatccagcatattttacatgtgtgggccaacagccgagatggaacaggtgcaacaaatagattagcatctgagaaattttagcacttataggattattttgctatagaaggcaagttccactgctgttctggtggaaaaggtacatgtgtgtttgcacagatttttttttattgataatggaagatttcatttggtcattggacgagtacacatatgatttcactctcggaaaccacctgcctcttagttacatccaaaatgcatgaccggtgcacatctcaacatggtgtaacatatgatatcttaaccaactttgcacaattaaataactcctaatgataaccttaattaattatcactcacttcattgtcctaaatcaatttccattagcatgttgatgccttttgtccattaggcaataattatcaggcatttgtgagttacatccaacatagtgtatcattcattcgccttgtcatgctattcaaatgaaaaccgcaccacagtatgcgacaaacataaaagtgtaaatcatggagcctttaggaatggagttaaatgccatcatatgtgtggcatatttacatgaatgccaccgtctattctgatactacctcctggttagttgataatacttattcttttggataggataaggacatggtcttgaaaaacaattttaactattaatttttattataacatatataaaaatattaataaatatatactttttgaagaattttttaaaaccaatctctatagatgatcataattctaagaaaagtattttagatgctatttatagttaaagtttttaaagtttgattataggctttgtccataaagataataattattaacttggagatagtagttagtagtgcgttatgtagctttccattaagatatatattagcattttaatattatgaatgtgttttcagtagaaactataatgacacaattttctagctaactttaaaactgtgaaggcgtagattccatctttttaccattagtttttgcaaattcttatggtttaacaacatgcaaattatatgcataaaagtatttcccatggtgaatctaaagaaaatctgatgatattatactatatgagtttttaaaagttaatggttaaagatgaaaatatttgacttcagatgaactagagtgtaagaaaatttgaaataaaggagtacacgaaaccaaaacacacattgaacaaggacggtccagtggactcttgcccgagaaaactccaaatgctgtacatagtggcttaatggtaatttacctcgtagcaaatggccacattggggttcagaaaaatgtcgtcagcaggcccctcgaccagctacaattgtatatcacttggcctctggccagattggtggagaaaggcaagttctcaggctgcagaggaagcagagctccaatctgttcatgccaatggctgctggcacctgggtgaaggtaatttctcttgcttactcatacatatgcaattgattgtgtactcccttgatctataccttttcataagaaaggtttggttcagttttgggggaatttttttggctgagatttgttcatgttgcaagagtatttggctatttgctgcttcgagtgatggttatggacatggattagttgggaattggggcttgtttctgaaggttgttcatatattttggggagggttgtggattgaccctgctaggatgaaactttgttctaacccaagaattttgacatttggggattttttttttctagagcagatcactaaggaatcagaacatgaggcttagaatttttgtttttaaggaattagacttcgaaaattgagtagcatgttcagaagctagggatttcagattataaaaggttggggtttaattagcgaagaagtttcaggttgtgatgctatgctgcggtgttgattgggtaacagtgacggattgatagccatggacatgaaaatgagttgggaacttgggttttatgttggtgatagtaactgtttgaagattatataaagggtcaaatatcttcggtgtatcttgttgattccagttttccaaggtttgttgacaatgaagattattcgggagggcgttgtcagaatccatttcagtttcagctctctggagttgaccaagggattttgattccaaatttccagggcgatagcaaaatgctgacttcaaatttatgtgtcaataacatttccagtcagttttgagaagtacaatttgtgttattcaggtgtttctgaaaactgtcgactgtcttcaatatcagatgcacaaagaaaccctggaaatgcagaaattcgggccattaggctcatgaacatatgcaaataaaaagcgccgccacatatagacatccacatattagatgtcacttaaactaattagtgaattcctggaaattttatagaaattacaatcctgtatagaacgcaagaatttcatagcaaatactaataatcttcgaacacaaattgctcagcgagagagtagtaattttctttgcagattgcagcatccagttttgtctaatttgattagtaattgacatcagttaattaattaattaatcacgcgcagctagagcagaagggagatgggccgggagcaagaagctcccacgccatcaccctcgtcggcggcacggcgtacgcgttcggcggcgagttcacgccgcgcgtgccggtggacaacgccatgtacgccttcgacctcaagtcgcagtgctggtcggcgctggacgcctccggcgacgtgccgccgccgcgcgtcggcgtcaccatggcgtccgtcggcgccaccgtctacatgttcggcggtcgcgaccaggagcacaaggagctgaacgagctctactcgtttgacacggcgaccaacagatggacgctgctgtcctccggcgccggcgacggcccgccgcaccggagctaccactccatggtggccgacgccgcggggggcgggaaggtgtacgtgttcggcgggtgcggcgacgccggccgcctcaacgacctgtgggcctacgacgtcgccgccgggcggtgggaggcgctgccgtcgccgggcgaggcgtgcaagccgcggggaggccccgggctggccgtcgccggcgggaaggtgtgggtggtgtacggcttctccggcgaggagctggacgacgtgcactgctacgacccgggcacgggcgcgtggtccacggtcgagaccaccggcggcggcggcggcggcgacaagccgtccccgcgcagcgtgttctgtgccgcggggatcgggaagcacgtggtggtgttcggcggcgaggtggacccgagcgacctggggcacctcggcgccggcaaattctccgccgaggcgttcgcgctggacacggagacgggcgcgtgggcgaggctggacgacgcgggcgagcaccacccggggccgaggggatggtgcgcgttctcggcgggggaggtggacggccggcgagggctgctggtgtacggcggcaactcgccgacgaacgatcgcctcggcgacatctacttcttcactccgccgctggcttaataattcctgaaccggcgagcgaccttgtcgacctccgtcatgcaggtgtccgcgtgcttcccttctgagcgttgggtagttgtgtggtttgtcactgtgtttgatgttggtgttggtatcatgttatcctgtgttgtgtagctgatgaaataaatgtgatgcattggtcattggtgctgcaagaggcttcaaatgcctgttttccaaacaaaatgtcgcctaagtaactaagttcatagggtacttaagggctgggctaagatagcttgaaattttgaagtattatttcatttcctttcggtcgttcaaatttggttagaatcagtataaatccaacgtaaatctatatctttacctacttggaaaacaaagtatgcctctaagccccctttgtttcatgggagtagctatatttatggcgttatatttttcatcaaaaatagtcggtatgtatttatattgtaagttcctaaattacatatttaattttagtgtatttataatgtagctctcatatttatatacataagtcgcaaaattacatatgtaagtcccaaataaatttacatatgtaatcagtatgtaattatagtgtaagtacgatgtaattagtatgaataatttatccactagtgatatagtttaatctccaagtataaaagcaaatactagcacaaatcttgaagataatctgttgagttgtgatacaaattcatttgcacttaataaatgctagcttctaccgtagtaaagcggaggcccgtcgccgggaggcttgggccggagcgtagcggacgaaatgacagtgggcttgctttccgttcccctattcctaatttgaagagctaatttgcgggattaacaagaggatggtagtggacgttcgacgcctcaagtcctcaacgcccgcatggattcaatgcaagtaacaaaaatggggtcctcctatctgttggactgggggccatatgtcatacaattagtgatatacctggcgccagtaatttttgagtggggtccagggcccccacaccttgtatggtaaatccgcccatgcgcacaaccattgctagtggactagattgctttctgtcgcctacgtataatatccttttaggtggccatcataacctagccgttgcgaaaacattcttcattagtgactgctttacgacaaccgccaacgaatatattgcattttctgtgaccttcggtcgctggcgtatgagattctcgccacttaaaacatgaaatggatgccaaggattaacggttatcctttttatagtagtgaaatgtagcctctactctatacaaactgtagagaatagcgtggattgagagcaaagtgtattttttttgaattgagagcaaagtgtataggggttatataatagagataattagttgcatatataccctagctttaaaattagaggtggcacttccccgaaaaaaaaaaaatagaggtggcacttctgagatctaaacaacctcacgaaacacgtggcttttgacatctcaaccaccccactaccctacagtctaaaatcccaaattgtgatcctgatacagataggctgctacccaacgaccgaaccattgtatcccggtactgatatggccgatccgatccattgtatcatgcgaccaccctccctcctccccaaccagatcgaccattatatccgtctctccctccaacctcctcgctagaccagagccttccgtcgtgtcagtgtgccacccaaactcaccatggcttctgacttcaaggcaatccccttgatcggtaagctatgtctgtcttttccaggttttttttttcttttgagctaaagagagaatttatattaatgactgatgactgactagggggttacactcctgacttgacaagtcaacgatccttattgccagttaagcaagcctattttttactatggccatgtttagttccaaagtttttcttcaaacttccaacttttccatcatatcaaaactttcctatacacgtaaacttccaacttttccatcacatcgtccaatttcaactaaacttttaattttagtgtgtactaaatacagcctatgtctttttcttgtgcacctgcacactctgcaagcactacactctgcaagtactttagaaatcagcattatccatgaggatccttatggactccttatcaagttaaaacaaccactaaaactagcacagtttttatggcacttttaacgttgcctataatactttgctatatagacatttttaggcatattttgttaaatctatcttgtagaggtatatttttggtacttcaaaatttttctcatatgtaaagtcattttctcaagacatctaaacctcggttgagtcactttctaaatattaatatgtgcatatatagaattaacacaacacatacatttacaagtaatgatataaggttcagataattagtgcattgaagataaaaataatatactcacgagtttaaggattggtaatacttcctccgtttcacaatgtaagtcattctagcattttccacattcatattgttgttaatgaatctagatagatatatatatttagattcattaacatcaatatgaatatgagaaatgctagaatgacttacattgtgaaacggagggagtagcaaggaaatatatttttttctattttcacattgctttgctataggtatggcaaaatttaatgcctgt

SEQ ID NO: 11278 - DNA, 3738 bp, Oryza sativa
ttatgaagaaaaactaaagattaaaatgacacctcagaatggatataggtgtgatttcttatagtaccattttaagttccaacattgatttttccgtgctccgttttgggtcgttcaaagcgtcctttctctatgagtaactttgttctcttgatcatcagaggataccaaagactgggcgaaaatattaccaacggtaaacctgacatgcaggaagcaattgatgtaagtttatttttctttctttatttttagtgacccattaacttgttactagttaatcgctgagaagaaaaaacgtcacagtattatgcgcctattgaacctgataaatatggagatcttgccaaaccaatggaaggaactaatttgtggtatatttccaacctttcatctttgtttattttcattttataccttggcgctatattatttggagccctttatggaggtaagaggtactgttatttaagttatgttttgtgttataaaatatatatttgcttatctttagtaataaaatgacagtaaagaggaaaacattaatgacaatatatagaaattaataattgccatacatccactagaagaaacaaaattaattcaggcaaccatgaaaagtgtctataatagaaattttacttgaaatatactagcaccattgttttcaaaactcaaaagaaaatcttaaaatttgaagtggttcatatgtttaaagaattacttaaaattacataacaaatgattgaaagtttgaaagtgaatagtgtctagtgacgattattatcaaaacgggtggagtagcaagtgaaaaatacttttttcttcatacttcaagatctattacctctaaatgaggaaagagaaatatcaatatgaaatgaatggcctaaaataatccgggagtactataacaaaagctcatgttatttaacatatgtgagagatattgcttgcttgactttcatataaaatggtaccacaattctacttattgatcacttactatgcattgataataattatgataatataattaatttagcttatagcacacctctatttggaagaatgaaggaaatgaatttctaatttacaatatattaataataacaatatgtatcatgttatgcaatatggctacaattgtgaattatttgttgttgcatatgttgcttcaatataatgtattgttgttactagaagcattttgaatagttgaattatagcattccatgttatatattttgatactactagttgaattactttgctattactgaagagctgttctgaacttaatttggtacccttcccttgagtacttttggttagaaatatttcaaattcaattaaccatatcatttactttgatgcaggccaaaatatccatcaaattttgatgcactactaaaaaactatatcagccttctaagaggttcacttttgaacttagtttagatcttagctatgcatctatgttatttatccttttttttttctgatggaaattttacttatagatctttccagaaagatcatgcaaggtatagccttggcattgggtgggccagttgatgcttttgaaggtagaaccgcaggagatcctttttgggtttgcaggttgattggttatcctgtatcaaccgatattctagaagagcatcgcactgacactggctggtaagcaaaatgtatctatgtatttatttggtagtatattgtgctagaatgtacttactagattcatctgacaccgtttttctcttatgtcacatccgttctgcgatcaattcagtggagctcacacagactatggttagtacttagtacatatctttcagaagttcctttcgaaatagacttttatatatggacaacacatacataaggtgctttgatgcattgtaaaaagtttcacgtgttttctgtatttctgtttatcaaactcatgaagatcatttttgtcatttgattatattacaggccttctgacattggttaaccaagatgatgacatatgtgcccttgaggtacttgtttcttcaccatccatatatcttataggaatacatgctttctttgtgtttgaatattactcaagttccactttttaccctggacttaaaactaatcgtttttactagaaacctagactaatatcatccttgaccctgtttagatattgtttctatcgaaaaattggtggttttactttatgtagactcttatttcgcacattatgtctaatactatataactatatagttgatcctcactaagtgtagttaatgctatatattttctatcatgtagttaatgctatatatcttctctctcattaaaccacattacctcaattgtttttaaccacttgaccattaacctatggtactatgactatatagtttatccccactaaatctagttaatgatgtttctcttctctctcattaagtcacattaccttaattgtttttagccattggattaatctatggtccaaattgtctcctttctttttcttcactcatgatgcttcaccttaggttttgccttaactcattgaatgatcagtatatattcaatctaaattatcataacgcacatcatctcaattgtttatagctcttttcagagattgattagagatgaagttatacaaagtatataaacttatacattttgctacaaaataaattaaacctatactttatttctatcattatagcataatatttccatagcaaagcacgggatttcatctagttggcataatggttgtgtacatcgatgtggattttagggactggattgttatcctttatcttaaaaatgttggggaaagtcatcttataggggaccaggcattgataggatcagaaatagtatttgtgtggatctggaaaatgtgtagtaaaaaacaattattttacggagcaaggagaaaatgggactacaagaaaattaatgggccacccaaaatggactttatcctatcttatacttactcatccatgtcgtgctctctgttttatgtgtccctcaaatttgttgaactaatctttttagtctccctattccttgtgatatttgttgtacacaattaacatttcaactaaacatgttcttctatcccattgtgcaattcacgaatgagatcttggaagccacttaatcttgcaccggaatttgatctcatagtagtaaccaaggtctagtttcatggccgcaaaccagaaaccataaattcggatccatgccatactttatataccgatcttcactaggagtttgtttactcgatgattctcatctttgaaccattgtgtttttctctattctaataaggaaaaagtatgaattacctcccctcaactattgcggtcggccgaattatacccccaaattgaaataccagacattataaaccctcaactattcatacaggacaaataaccctcctcaacactgttttgagcggttttgacttaagcttgcacatgtggtgccaacgtttcaatctagtcagcaaaaaaataaaaaaaaactccatggggcccacctgtcataccctccctcaatccaatccttccctagtggttctctctctcgcacacgcgctcgagcagcagctacagagcccatgaaggaggaggcggaccggatggctggtgacggaggcggagcatgcccgggcggcgggcaactgaggcggagctctttcagggactagcc

SEQ ID NO: 11279 - DNA, 4096 bp, Oryza sativa
acaggtgaccgccggcagaggcggagccatgcccggggagcgagcggcttgagccggagctcgcctgtccggcagaggaggcggaccgggtggccggcggtggaggcggagcacgcccggtcaacgagcgattgaggcagagctcgttctggaggttggcggcggaggcacagatcgcccgggtggcgagcggctgaggcttagctcgcctgggcggccggtgccggatcgggtggccggtagtgaaagcggagctggtgccacgcgtgatagagaacttacgctccagcgaggatgccctccccggggcccgccgctcgcccaacccctccgcgaccttctttcttcatccagatcaccgccttctccgcccggaccaccaccgccaccgcactggggagtgagtcggaagagaaggagaggggaaagggaggagcggcggtgccggccctcctcgctgctattcgcctcctgcacagctccatctcgtgcatcgccgccgtggacgcggccaccgacacccgtcactcgtacgtcacgtccgcagtcgcctcctgtcctccgatccccgccccgcccaccaacagcaaagagagagggatgaggtaggagtaattgacaagtgggcccatagttttttattactttttttatgattggattgccaaattggcgccacataggatcaaaatcgctccagattgagccaaggggggtaatttatccggtttcaatactttaggggtatcaaatgtccggttttgtgggtttgggggggtggtaattcggtcaaccacgatagttgaggggagtaattcatagtttttccttctaataataaagaagaggggaactaaaacagatcaaagatgagaacttgattttagtttctttttaattattttaaagatcagtattttttttcatggcagagcacatctgagctgtgcatggttatatagaatttctcactggatgatctagcatgagatgcttctacacttctgtaacattctaagcatgttctaagatgcataagtaattatgtaattaccatattacagttgctgcccactgttcatatttagccttaactgggtgaagcaaacaattttgatttgagtgaaatatctggtgaatatatttcaggtcaaaaaccaatcaggtgagtggatttatgccaaaccaatcccgggaaccttcgtctgcaacattggtgacatgctgaaggtctttttttttcttcgtttgcaccttcattgtcatctttttattgtcatcaaacttgtgacacttatcacatgtcatatttgggttaggtttggtcaaatggaatatatcaaccaacacttcatcgagttgttaacaattcccctcgttaccgtgtatctgttgcctttttctatgaggtatattacttgcttaatcccctagctcatcttaatactacacatcatttatgtgaagttgctctctcattgttctttctttctgaattcatgccacagtcaaacttcgatgctgccatagagcctgttgagttctgccgggagagaacaggtggtgtcgccaagtatgaaaaggttgtatacggggagcatttaattaaaaaagtcttgaataatttcatcaaataaatttgcggaacagaaaaaacaaacgtgtatgcactccaagatcatatcacatcatttatcaataatactgtttgtgaaattttattgtagcacttgttgcatttctataatttgctacattttaggggctatcttaacactaaagatagagttcctttatggttcaccgtactatgctatagtagtgggttgtactagtgatccaacgattcgttggcataataagcctggcctaaggtcatgcctgtaactcgcctggcatctgtttggttgctaccctgaggattctagcctgataaatcttgcctgagtgtactcgcctgagtcaggcgtacaaaatgggtggcctgagcatttcgctccacctgcctgagtaaaatcaccgctcttctatacagtagtgaaaacgagaccacttcttcctcctcctcactgctagcctagggttcttgcggagaccagttcccatcgattcttccatggctccagcagcggtgaccaaggaacttgcagatctggtggccagttgtttctttttccagtaaaagtcctgcatttggtgatctgttagagcgtagctctgaccgtgagagctagcaggtaagtagaaaaagaagagtactttgtccagatctgaagggaatcaaaatttctaactctctcctttcctctgtgcgcgtcagattgccaagcccccacaatctttgccacgattttctgcagcaaggtgagaacacaatcgcagtttttttttttacttttcccctctcttgctgctttgttattcaaggatccatagagagtatgcctattagaagtaaaactatgtcaaaatgtgtgctttttttcactagtttctttttttttcctttgtcgtgtgatgctcagatggatctagattctactcatcagtatattgtccatcaacgaactagaactttgggtgttttagctgttgtgttggcaattattcgctggcgacgtcgtataagaaatagacgacatccaaggaagtatggtccattggtggatagagatttggtcaggaaaacaagattagatgatttgtacaatgggagtgatacaacttgcatcagtcagcttcggatgaggaaagaagtgttctggaaacttgcctccaaattacgtgataatggcctactatgtgacacaatccatgtctcagtggaagaacaattagctatgttcctgcacacagttggccacaatttaagaaatcgtgtgattggattctatgtcataagatccagtgagacagtgagccggtacttcaatgaggtgttgaaagctttatgttgtcttgctaaagatatgatacaaattaggtcaatagagacccattcaaagatagttagtaatcctggcagattctacccatattttgaggtatctcacgtgaaatatacttattcaacattctaattaatgtaaccactttatgtttgtatagtaataatttcttctaacttaggattgcatcggggcattggatggcacacacatccctgcatttgtcccagagaatatagttaacaggtttagaggtcgcaagtcctatccaactcagaatgttcttgctgcggttgactttgatttgaggtttacctatgttcttgctggatgggagggttccgcacatgacttagtggttctcaaggctgctcttagaagatcaagtggaattcaaatacctgaaggtgtgcatgaagctttagtattttcaggtgcacaatattttgtgacaaggcaataaaaccattcatcttctgttgtaggcaaatactatttagccgatgcagggtatgcagcaagacctggtatactaccaccatttaggggtgttcgataccacctgaaagagtacgaaggcgggaaatcaccagaaacacctcaagaattattcaatcttcgacattcctcccttcgcacatctgttgagagagcatttggaaccttaaaaaaccgtttcaaagttcttgctagcaagcctttctttccatataaagtccaagtgaagatagtaatagcgtgttgtgtactgcataattggatccttgataatggtcctgataacatcatatatgatgaagctcgttggtatagtaagctacctagatcagctagagtagcgacagattatggcgaggagcaccaacagtgggtagaatttcgagaaaatctagctaatattatgtgggaggaacattaacagtggtgttgtatggcatggatattgttctatgactgttagctatttctaatgaattcttctttcagctcttcatattatagcattttctactttatgtttttttgttggatgccattattacctactgtgcattgctttgtagttcataacatggatataggaggaagcaacaaacatggcaagggaaaaagtaaggcacgcaaaggagttgggggatcaggtgtga

SEQ ID NO: 11280 - DNA, 899 bp, Oryza sativa
aggcggctatagcgtcgcgatgccgaagtgggaggagatggaggctagcttgcttgagaggggtatcgaaccggcccccgctaattggccggaacgatcgaagttctggtactgtgctcacggtggaacgctccacccagctgatggctcactggtcttcggcgatcagatacgagaggctgcgcgttgactaacagacgcagtggaagcctcttctcagggcacgttccgaccggatagagagagggacgagctgtcactcgccctgcagactccagagcatccaggacgaacacgagggaaaggggtgattccttggaagattgggttcaaggaggacatccacacgtacaggagtcggatgaggagcaagagagataccgaggcgaagattgcagatcttgagttcagggtatcgagctacgagctcagcatgcaagaggaggtagcaaggaaggttgatgaacgcatggccgcacatcggtccaatgatccccagccgaccattcctcctgcaatggtgagcccgttaggaaaccgtagcagctgcgcctcaacggggcaggtaggatcacagagcatggacgccatgcaaacccagagcatggacgccatgcaaacccaggacgaatccacctgccccgttgatgacatcactcagcggacaccatgtgagctgcatattcctttcaagaacttatcaataaaggtaagctcgtagtttatatattttagatttgcccattccactagttgctgcttatatatgttgattagtaataaataacctctcaccacatgaaggtggcgtcgggcatggccatccaacggacccttcaggtacttaccactgcaggccgattccagcaggatactccaaggtcgaagttgggctgcag

SEQ ID NO: 11281 - DNA, 1705 bp, Oryza sativa
aacgcagcatcccttttctgctgcagtctttcaagagaagtcagttcctttgccacgacagcagcctcttgttgctcaagcatctgctccgatttcgtgactgtctccttgaactccttttcctgctctttcagctcatcaaactttttcttaagcgactgctcaaggccatggaaatggtcctcaagttgcttccactttaagttcaatgaaacagcactctggctctcaagctcggcaaatgcacgctgaagcagctgcagcttggagcctgtagactccataagggctgtcatggactccatgtcggacatggcggcagctcctgcaaatgagtaaacaacggaagctgttggttcgcgcaacccaaatagcactgcaaacaaatccccgcacagtacagcaaaaacttcatcgaaactacgcaatatctcactaaaatggttcggttaatttcttcctgcgcatggatgaaggaacattgaagggaattttatacgctattgcacacaaatcggagaacatagcaacatcatctacccatggacggatctaacgtgggacatggtatactgtgatgtaaatttttttgggggaacaaacaaactgttatttgtaaggtgatcaaaattgagagaaaagaagcttccagatctggaagagaagctagaattaacgcagggaaattcaaggaaaaaagtgggtgggtagagatgaacgagaaagaggatggatactcaccaggatgcggcggaagcagcaggacaaccgacggggatggagatcggcgcagggcagcggcggccgaactcgcgacacgggactccacctccacgcccagccgacgggatgggatggggacaccctcaggcgaggacacaatgattttggccagcagatatttcctcttttcttttttttttcactactgttcaatcgcctaatccctactacgtctctgtttctttccttatccctaagttataaaaaaataaaaacatttccgtccgaaatttccatacattttccgtatttgatttgattattggtcgacatttctgattcgaggtgagtctagaataaatattataccagcccaacctaaccagtccacaccatctcgtcacctcatcctcatcctcacccccacttggcgccgcactagcccctccctcgatcggcatctttttctctttccatttttcttttttctcccaatcatcctaattctcttccgatcctttcaatctcgtctattttctcatttttcttttctcttccgaatttctcttctcataaatatttttcttttgaaattataattgtttaaggtgtgtatgcggcaagtttattactttgcaaatactttccatttacagtaaaataatttcactaattgaataatcaaaattacaatcttcggtcaatgaggtatagcaaaatacacgtgtcaaataatagaatagccacccgatcaatttgtgaggctatgggaaagtgtacatgaaggatccttcatatgatgatgcatgaagctagtgtgctcaatacttatatatgatttctgactttgttttgccatggttttgtttgtcttgtttcggtttgtcgtttaaattggtagagtttttatcaatcgtgaaattgtctttacctgttgtaacgcacatgcatctttgttgctccctccgtataagatgttttc

SEQ ID NO: 11282 - DNA, 2081 bp, Oryza sativa
aaagtttctctcccctttgaacttggatttctcttccattgtaggaccattgaaattttagtaagtgaaagcacaaggaagataggaaagaagatttgaaaaacaaacttttaataccatttatgcaaaaaagaaagattgttttaaacttagagggagtctatgaattcaaaattgtgccaaggccaagattcatttagaatgagatctctagatattagatttcaaatttatatgcattatcttgcgagaaggctaacgggcgatcgatcgctgccagtgattgattttttttcttttcctcttttagtaagtttatacaactaaagtttacacatctaaagtttatccacctaatgtttgtaaggcgaatgtttataagtcaaaagtttatatacccgattcaaattcaaattcaaattcaaattcaaatatttttatattttcatcttttagtaagtttatacacctaaagtttacatatctaaagtttatccacctaaagtttgtagagcaaatgtttataagtcaaaagtttatatacccgattcaaattcaaattcggattcaaatattttatatataaaatatttctatacataaagtttatgcgtgcaaagtttaccgtataaagtctatgcacatgaatgagagtattagagtattagagctaatcacgatggcgactctcttctctggcgacgtccatggcgactctctctagaagatggtcacgccggcgccgcctactggatgggatttctccccgggggattccatccgcgatgaagtttggagccgttttggttcaccggtgcacttttcctctcactttagtcgttctccttttcgattagtggttgatgttcctcgttcttcgtttcgattgaccttgtcctcggtggcgcttgctcttagagcggcgattggtggttctccgtctgatcttcaagttgatcctttgattgattgaagttttacttttgtggtgtgttctaagaaagttggactctggatctactctctcagatccttttcttgtaaggatttctcggttcggttttttctctggaagaatggaggtcctgattggagacaagaatgggatctctggcaagctgagcaagataatgaatggaccattgtaaagcggcgatcttctttgggtaatcgttctcagcatttgataaaggcttcttctgtttttgatcgtcttaagtttaatattccatcatctccgaagaagattgctcagaagtctgattctattgtctccaaggaaattgttcttgctaattctgatccgaaaggtacgcatcttgatcgtgataagcggaattcttccttttcaaatttaaaccgatctgggctggtttgttttcgttgtttgggctctgatcaccttatccgggattgctgctcggaggtttgatgtttgcattgtaaaagtctgggccatattaaaaagttttgcccttctgctgggcctgttaagtctccctggcccaataaagtggtgtttgctaggggcttgggaaaaaaactgtctgtcccaaaaaagaaggagcaacctttgcgcattaaaactccacctaatcaggtctgggttaaaaaaaaaagaaaccccttcatcttctccggaagttgctcgctctctagtagtggcgtcagaatcgcaacctcaacgtaatccttcccctgctccaatggctaatactaaccctaatccccatcgcttcctgcgtgtggggcaagtggtacatcaaggtggtgatcgtgtgccaagaatcgacctctctgctgctaccaagccgccaaggtctcatgaagaatatgccattgctttggttgagccgatcttgccggaggaactttgggatgatcatcggattctaatttctgaatacattgagcaggtgcagcactttactgttcgccgtagttttcctcatgcttcagctgtgggtctgttcaagtttggttctgccatgcttagggacctactagtttatgctcccccttttatgtatgatggtataccccaggtcaactttgtcagacatgatcagggtcctaactgg

SEQ ID NO: 11283 - DNA, 7221 bp, Oryza sativa
cagacagtgatgattgcaaggaggtggcagcccttaatgcagcaactgcagcccttaatgcagcaactagtcaagtttcatcttctcataccagtggtctgaagccaaacaagaagagtttcaaaaagtgtgggaagccaaagaccttgcctcaatcacataatgataagggtaagcttaaggcaaagtcatcatctggattgcatgatgatgatgatattgatgtgctgatcactagtaccttggttggaatcaaagataaccttgccaaaccaatacagactgcagcccctcaagatccaaatgcccctctatgggacatgctcaagaagattgccttagaacctgaagataaaatgagagttggactacacctttgcaagccagaatttcaagctcatcgcagttttcttattagcatgggtcaagaatatcttgaacgttgggtttacaagttcttatctggtgatgatacaggcctctagtgagctataggtgcatattggttgcaaaagctaatcgtggttgatgagggtctatattttgctgcacccttttggtcatgcaattgccgcactatatatgtgtttagacaattgctaaatattaacatagatactatgatgatgcatgctgtgacatgctaatctgctagtagtgttgctttctaacttttggacaagttgataaccctagctttgtggcccttttcttttgtcttgtttaactcgtggcattactggctagaactgatctgtatgatggctgaaacttgatgttaaatatattcactatttccctgttgccatttgcatgtttaacaatatgtgatgcttttatcattaggaaatggaagatcgtttgacaattgtttggcaaaatcttggtagagggtactctcaccatctacatagtatacggtgagtgtatgctcaggcagaatataagccaaacactgcctaacccttatgtccactcaggcatgttctcagggcttcaaccaaacacctccttaaatttgtgtcatgcctggacaggtactttctgcaagcaagctcaggcagccctcagggatggaaaatactcaggcaggttgctcagggtagcaaccaaacaggcccaatgtgactagtatgacttcaggggtgttgtggggaaaaatatctagaaatagccatcccccaattccccttgtcgtggggagccccccaagctgtgccactgcgtgtcagcgggagcagcgtatcctcctccacctttgctgctgttggtatttcttaccgatcacagataaaatccgcaagcgcacggatataccgatatagcacttcccctacggagtattccaagggtatcgaatccaagggaacgtgtgtgatcagatcttcctctggttcattcaaggacaccaaggaaatgataggccaggatagagaggatttactggtgagaaacaatgtctagggaaagcttaactttaatcttaacgtaatacttcaggcactggcaatccgctattcccagatgtcgctatagtatgtacctggacagagaggacttaagtgctcttgagggctgtcaccacctctacacctacctcaatcgaactgtgggatacgcagcaaccactagaaattaattacccagacaccgcgtctacgcaattaataactactctagtgccaagagataattctcacaagatgtatgctatttaggaactaaccaagagataattctcacaagataaatctaaattactcaggaagaatattatattgaattcagagtaataaacagaataaaagaaatgagagaagattaccgacaactccggaattcttccgacgtcttctactctactctcttcctattctagtatacaatatagtacaatagagcctcttataattcagctcaagcttggaagtgtgtgtgagagtgaaggagtgaagctccttttatagggcagttatgacggttgtgagaaggggaaatgtccgaactgccccgcaaccgccatcaggagatcatctggagcgtccacgccaaaccctaggatcaacggtgatcaggggggttcggccgaaccatggggtacagccgaacctgggctaggccctcccggcctgtggactccctggactctcctctgtccatttctcggagtttcaggttgattttctggtattttgatgaagttcacaacccatccttgtatggatacgtaattctcctcactttagtctagatttcctcccaaccccagggtttatcacctgcatataaatatacaccaacgcttgtggaatttgtaaggttaagcacctatcactatgttggatgttttattatctggacttttatgcagatgttggcggtatagaatcgacatttaatagctgccaacaaaaccccccacacttagctctttgctcgtccctgagtaaaggttagtgtagaatgaattcctttaagatataaatcaggcatataaatcattcacaaccatacctgcacctgtgagctttaccagtggctatcttaccatcttgagtaattgataaatggaacgatctcgattccagtccttcttgcttcccctgtcaaactcatgtgattttttgatgaattttcacaaaccaactcctttccttatattgactctctctctctctcttatctctcatggatgtatattttctttttggatcctcaccaaggcaaaatgtgccagaatttacccctattctaaggctgatatgtggagctcggtagggacaaattgtgacatacctgcatcatatatattgcaaagccaaaaatacggactcaaaaagatcatcagtcatactcctagataaagggtctttatttgtggtagaaaatggaaaagtaaaatatttgtggaatggtggaataaagaaatgattatcccttttttttatactttctctccattttgttttcttggcatgaatatggaaggggcatggctatatttccttttcatcatgctcaatgttttgaaagcaagctttatttcctccccattttttaatagccatgcctttcctcccttttctcatttttcttttttccaagaaccttttttttaggagaaggaagcatagtctaatgtaggaagttatttgaatggaatttttgtgggaagccaacttccagtgtagaagcttagcttaattatatttggggaaaatgaaagtggaaatgaccccttgatcatgagagtatgaaaaatatctaacacgagtcacataaatttgacaaagctcattataatgtcaagtagtcatatgcataactaggggattccccgtgctttgttgcgggagttactaagtaatttttaatattatttttcgttacaattcagctatgagtaaaaaagaaaaaaaaatcaaatctcagagcttatcaatatttatcgtgaaacaaatgaaattcgcactttaatttagaacatgttgataagtgtatattaaatattataaaaaatgaaagagagatttgtaaaactattgtggaaatgatgtgagaggtggtgattgaatatgcttacatattaatttgtagaattaaatagattatagatgctcttgcatgcttgcatgaggttgaatatgtaattattgttagtgggtgatgatgtggcatggttgcatgttaagctttagagttagtgggttataactttatagaaagtatagataagatttatcaatgatatacttgcatatggccttggtaggtataaaatgaagtcaattggaggaatgagattttaaaacaattttattttgaaaacaaattcccaaaagtcaaaacaaaagttgcaagaattcctttcatctttaatcatctcacataaagcaatcacttagatgcataagggtccataaacatggatggttgttcacaagcacaagttcaactgtgaataatgaatatacaagatcaatcatatgaagaatttcattagttggaaatttttattttttcaattatgcttgaaccaattgttttctgaattttcagctctatactataccatggtggagatatacagataaaagatgtgctcacctgcttacatgtgaaaattaagagggattggggcagctttggttcagccgaaccaatctggtgcccattccctctgcaatttttagtagagttcagtgcttccaggtgttcagaaattttagcaattttcagagtatgcgcacgtcagaagctgagatatctcccccacacttattcaaaacctgaactttattaatcatgaaacaaaaacaaactcgacatgcattggggttaacaccaatgagccacattatttatagcaagttcttacatgattggaaaaataaaaagccagcacttactactattttattcatgtgagaggagacatctaattagcataatacttattctcctttcccgtttcttcaaatgcacacttgattttagcgcacaaaccgcgactaagggtatcaaaattattcctaagttcagcaagttctacccctagttccgtgttgcgatccctaagctctatgttctccttgcggagtttcttcacttgggcggcgagcttatgaaccgagggctccggtgatttcactttatcttcttggaattggccggctgcccttacaattggagggggcatcaagtgacgcttcaccttcataggtggagggcttctggattccgctgccccctccttctccgacgccgtcaaaggctgaagtaaacccttaccatacccaccgccgggagttcgcactccctgaatgcaaaaccggtactccttcggagtggatggagtagcggtgggtgtgatatatttgtggagcacttcatcccctgccttggtgaacagggtgcccacatattgctcggcgggaggcggagcgatcttctcatcatcctgaaaaaggcggcgtgccttcaagagaccgagctctcccgttgtcggccgtcgcgcaggcgaatccccccggattttggtcttcgtgacatggcgaggagagagggatcgtgctactgaacaggggaccgaacggggccgaggggggttcggccgaacccttggtttggccgaaccagggagctcgccgacgggctccagattcgcgcacgggagcccgacaccgtagcaaggggctgcgcccacagtgcattcaccccttccattgtatagtgttccactgggatctattgtttcgccggtgttggctctccgtcaagattgtaggtagagttggaggaggagccaatgtatgggatcaaggacttgccagccattggtgaattggaagtgatggagcaagggaattgagatgagatggagaggaggattgcaaaagtgggagagaggaggaagaacaggtgctctgggtctgatacgactaatctacctccgaaagctcatcacaacggactgcaaacgagcgggggagactgctattcaaagttggggctgatcgggtgccgcttttatttggctgaaccctggtgggtccgactggccgccaactttttcctaggcccactaaatcctaagctaagcacaaaaatgacaactttacagggttttaagcatgcattagatgagatcattatggttcataatcgattaatacaataacatccacttattcatctaaagtttcattgggctcaaggaaaatctttaagcgttgaccgtttaccttgaatatattacctgagtcgtagcggagtgtgattgccccgtgcgaagaggtgtctatgatgtcgaacggtccttcccatttactgcgcaatttttcgtggccgaaaagcttaaccctggagttgaacatcaatactttgtcttctggcttgaatttcttgatttttatccttttatcatgccagtgcttcgtcctttctttgtatatgttcgtgttgtgataagccttctctctccattcttcaagttcagcaatttgcatttttctccattctcctgctccttcaaagtccatattccagttcctaatggcccaatatgctctatactcgagttctacagggagtcggcatgatttcccgtagactatctgataggggcacattccaatgggtgtcttgtatgctgtccggtatgcccacagtgcgtctggcaatctatccttccatcctgttcccatattgttgaccgtcttttgcagaatattcttgatttgtttattcgatgtttctgtttgacccttggtttgtggatggtaaggaatggccacattgtgtttggctcccatatctcgtaggaggtctcggaaggttttgtcgatgaagtgagaacctctgtcacttatgaccatcctaggggtaccaaatcttgggaagatgatttctgtgaacatctttttggcatgcttcgcatccacggtgttgcacggcatagcctcaacccacttggagagatagtcgactgccaccagaatgtactcgcagttacgggacttagggaaaggttccattaagtctataccccagacatcgaatatttcgacttgcaaattgtatgtgaggggcattgcatcacgagtagtgattcctccttgcctctggcagcttgtgcatcttctgacgaattcttttgaatcttcatacattgttggcgagaagaagccactttgcgcaaatcttaccctgggtgccgaatgcaccataatggccaccatagggtgaggcatggcatcgctttatgatcttaagtccttcttcagtcggcacacatcttcttagtaagccatcggtgcagaccctgtataggtatggctcatcccatatatgacggtgactttcgtacttcaaatttcgttgattttcccctggtggtatgtatttggataccatgtaattcactatggttgcataccacgggttggagtcgcgaaccgtcatcagcatgtaatctctcaagaagtcatttatcggttgttcctacgtgtcagtgatctgcagcctagacagatgatctactacggaattttcaactccctttttatccttaatctctaagtcaaattcttgtagcagcaaaatccatcttaagagacgtggtttagcatctttcttagtgagcagttactttagagcaacattattagtataaactatcactttagctcccaccaagtaagatctaaacttgtcggtagc

SEQ ID NO: 11284 - DNA, 12976 bp, Oryza sativa
ttgtaaatttgttttattttgaatttgatttgaaatttcagtttaagttctcaattgccatataatataccactttaatatttttttccaaattcaaaaaaattgcaatttaaacatatcttttgaagatagtatcagagacaaacagaaaagaaaaaaaataaagagtgagagagagaagaaaaagaagaagaaaaagaaaaaaatggttttttttttctctcgactattcactcttattctttacaaaatgacagtttcgtttgtaaatttaaagagtgtgagagagaagaaaaagaagaaaaaaagaagaagaaacagaaaaaaaaaagggagagatggggggtcgaaagaagaaaaaacggagaaaagaagaaaaatggatgaaatgggggatcgaaccctgctccatagggttagagtagaatcctactaccactatgctatcgttgagttgatgaagatgaatgcctccgtagaaatttaaatcatcaagacctcagcgccaaatatgatgactcaacaaattcatgccacctcggatttgagcttagcgccaacaaaagttggcgctgagacgttatagctcagcgccaaggtccatggcgctgagttcacggcctatttttggttgaagttttttgcagggactagtttcgaaataagtttttaaaaaagactaatttgttaaaaaaacggtggttgtggcggctccattttggggaattttttttgacttagattctaatttgctacatcaatgtctgaacccaacaaaccaacgtaggtgtccatcaattcatctagcaagaaaaatcatagcagcatacaagtggtaaaacatgttgaaggatacaaatatattacattgtgaatctatcaaatattaattaagagagccatcaatgcgagcagtgcttttgcatacgtagcaggtcgatgaccacatccaccaccctagaatccattgccacctctagattggtgcacccttcctctccactaccaccattccgccatggctccaccctcattccgccatggctctaccctttgaagccctgccactaccaccatcgctgaaaaaaaagtaaagggaatatagggactcacctacgctggctagtaatgatgacaatgatggacgaggcgttgctcggtcgatccggatggggcgggagctcggtaagaagagagcaacaccaaagttgttgtttctctttccaagatagcacacatgctaaatttaaagatagggttggtgcatctactagattagctgctgatgttattgctgttgatgagggacgaaatagataagcaagcagctaggaatgctctaagcccgtaagtgtcatgattagctggtaaagaagctgatgtgttatccgtgagtagaatgatgggttttttgtccggaaatcatacgttacaaactgttttagatcttggtctaaaaacaagctcaatcaaatttttgactaggaaatggtgcaaatcatatcaaaggttcagattgttcctcaggataatgaggacaaactctattggattcctacttcttcaagagcattacttcaaaaagcaattataagcaggtttctaatatttctcacttccagttcgtttccactgcaaggagcggataaaattttggatattctcggcacgcttttcaaactactaaacagtgtgtttcgtgcaaaaactttctgtatgaaagttgttctaaaatatcagattaatctattttcaagtttgtaataattaaaactcaattaatcacacgttattaccaccttgttttgtgtgaagcacttaatctttatctttatcttgtctcctctaacatcacctctttacagagtaatctccttttgaaaacttggtccactaaatacattccttctaaagttaaaacttttatttggagactaattagacaagctcttccaacggctgcaaatcttcactcaaaaattttggatattcctgatttttgctcccgttgcaatgatgctgaaaatgttcatcttttcttccgctgtgcttttgcaagacttacctggaaactttaagaactctcttttcacaatctcattattgactcaatgcaaaatgtttctaatattatagcatatttgcttgcaactaataattctgaaaacagccttcaaaaagttccaatccttctttggtttatttggaaagctagaaatgatcattatttcaagaaaaaagaatgggagcctttgcaagtttgtaatgtagcaagcgctatgtcaaagaattatatttcagccttgtctaatgagaatgataatgaaactattccaatcatagatgaattctgttgcttctgttaatttgttgccagtaactggatgtttccttgacgcttctgggaaggataatataacaaggtttggtcttttttctacatgactctataaatcatcatatcatctttgtgtaggccaaatcaactctttatgtgtcgccaattcaggcggaacttgcaacttttaagcttgataccttcatctgtgatttccttcaaattacaaatcctccctattttttcaagacaatcaagaactggtgctcttacttcaaaactctaataatatcaatcataaccatcactagagccttttgcctttgcttgcacaattacataacttttcaggtggagcttctttcaacgtcaaatggatccccagagatataaataaaagggtatcaaatagctgactactagtctaaaaaagccagagaatctaaatatgagttagcagctctaaattaccaaaatattagtcatgcttgtaataataatacttgtcctacaaagcaacttatgcaagctactccttggaaagacaattgtgtatctcttgtgcacattttccttctaatgtttaaataaaaaattactaagttgtaaaaacactgtttttagagcacatggcaaaccgcttttctgcagaccgaggagtaaaaagactatcactgacagatgggacccaccaaccattgtctctcactctctcccctcgcaccgcagcttctccaatccgtcactttccccatccctcccgcgaaaagcagacagacgcccacaacccaccaccacgtctagggttccgccgctcctccggccgccgccgccgccgccgccgacccccctcgatctcctccccgagccgccataggtggtggcgggggcgggggagctagcatccgtccgtcaacgcacatcgtcactgctgcttcctggtgagcatccatccgtttcgcatatcctctttctcatccctctctacccacccactttttcccctcgaattcgcgtcaaccctagcttctcttctagatctgaaagctgctgcttttctttcaatttgctattcttaatacgaataacagtttcgtttgttccccaaaaaaagtttgggatgaatccccatgtcccacgttagatccgcccctggttttatgtgcggtattgttgtttgtggtatgggtaccaacagctttcgttgttttcaccttttgcagaaatctgccaccatgtccgacatggagtccatggctacacttatggagtccacaggctccaagctgcagcagcttcagcgtgcatttgcagagctcgagagccagagcgctgtttccttgaacttaaagtggaagcaactggaggaccatttccatgggcttgagcagtcgctcaagaaaaagtttgatgatctgaaaaggcaggaagaggagttcgaggagacggttgcaaagtcagagcagatgctggagcaacaagaggctgttgtcgtggcaaaggaactgacttctcttgaaaaactgcagcagaaaagggatgccgcgttggctgtgatctttggcaagtccaagctgaacttgtctacgcctcttatcaacccaatcagcaaatccgtgaataacaatgctgtgtttaatggaaacatcggtggtagtctttctgttaagtggcccaaacctgcaactgcgcatggtgcatacctgcaagatgaaaacactgctgtgaagcctcgttctcaacttgttgtcctctgtgaagagatgaatgttaacgggcttcataagttcatatcagacaatcgcaaagacttaacatccatccgtgaggaaatccccgttgcacttaggggagcaactgatccatatggcttggtgttagcttctctagaagacttctattttggagacaatcttatattggatggcaaaaaggatggaaaccttctgggtgtacggaggacgtgcctcatgttgatggaatcacttgctcagctgcaaactgatgctactactggtttcatatcggaaggtcaagtgcttactgcaagtatcaaggagcgtgcaaaaaagattgctcttgagtggaaatccaagttggatagccttgactttgatgctagcaatgggaactgcctggaagcacatgcgtttcttcaactcctggctacctttggtatatttgctgaatttgcacaagatgagctgtgtaagctacttccctcagtcagtcgtcgtcgtcagacacctgagctttgtagaatacttggattgtcccagaacatgccaggtcagtgctatcatcgattaataatgcagcttgttccattgagcatcaataataaatggaattttctatttctctttgtcactcagatgtttagagaacacattctgaccacttcaataattgttcatatatctatatatctataccatgggatttattttctagttagtggctgcagcaagagatgcctacaagtaatcagaattgtagcattgctgtttagataatttgtatggaaaatctgcaggctgctacttataatttggcagccgcacaccgaacctcactatctagtatctgtattgtacttagtggcagcaaagtttccacagcttttaagctatgttatatgctcagttgaggtcttaatttaactgaatgtatttactaacttataaataacatatatgatcatatattctggagcataacaagctaagaggacgtcattcaattcgccgaccttgcccttgagcttgattacatactgggatgtgcttttgtgcatctattttagaaaaagaataatacgaatatctaagaaatatggttaatattattaggaggcaaatatgcattaaacaaaaaaagataaccattgaaagatttgccacccgcatggttttgaaacagtattaacctagacgctagtcagtggtcggtcaatgactagcggctgttgactagttagtaactagtcggtggttccaatatgtccaaaaataaaatattgctcaaaagtagctagccatttaacatgttttatagcatattttcagatcaagtactgactattgattattgagaaatataagactgacaatttgataagctgcatgaggtgaaggcgagagagcacgtggcggctcttgactgctccagacgtgtcatgggagggaataaccataggacctttcccacccctcttatcccacccgtttagcccaaattttcagtccatgccacttttctgtttcctagttgacctgtttaaccgactagtcacttgactaatattgatcaacttgaacgtactagaccgattttaaccaactaattcaccttttaccccctgacctaggtggattgttgctgactagtgactagtcaccgaggtccctttgctccatacttttaattttgcctttcttcttttccgcctttctgctgctgcatgttcttttcgtttttacaggtcagcacattttctcatgagatattttcttgatgttaggtgtcattggagttctggttgaaaatgggagaactattgatgcaattaatttggcttatgcatttgagctgactaatcagtttgaaccggtggaattactgaaagcctatctacaggaggtcaagagtgtgccacatttcaagactggaaagatatctctgcaagtacaggtgcacttttttcatttcaattttaaactgtatgataccctgtaaattttctttcacagaaccagggttcaagattgaagtgggaaacatagtaatcctggtctgctctgattttctttttttttaaaaaggcatggtttaatttagttccattttttccctcgaacatgcaggagggaatttagttgcgaaaattatcactaagaatttcaaaaccaaacactaaatcattgcaagacttcccttaaaaaaaatcaatatacacctgtaaaggctgagtgaaaatggagtcgaaatgaacaggattgcttgtagattgtagcaattctgttcgatggatcggttgccagttggtgacacatgcattcattctctaattgaatacgataaaagttcttttttcgtgaaaattacgacaatattgtgctggagtatttggactgaaagcaacttgttctctagtattctttcatgtggcaccatgacatcctgtcactacaatccacaaacggctcctcatgcttcatacctagtatagagattgttccagaatttccttggattgactagtttggatgggatttttcttagatccatgaaagtgaatcccgtgtagaactactagttacaccaactctgttaagaagctctgaaccacatgaaagtttatttttttcagctcgtggccctttgccaccataaacaaagttccagttcttttttctaacaacaggatagcttaacagtcttttaggagattatttagtacttgctctgtttttaactctaagctagtttcacctgtgcaactgtttgaactttctaattatgttgtgtgatccagcactccagctgatcgtgtttgaaaatttcctgatataaatggtaatgagacatttggccctttcagcaattgaattcagctactttgattcattaggttctatggctgtcaagtcgtatactgtaattgttcactcacttatttgatttatttatcctggaatagttaaagtacggggtttgatcatatcataaagttagcaaatcatttagccaccaatcagcttcaatgtagaagctgcagtgctgttctgaagaacttgaataataaagagctactttagcttgcaagatactattcagctatagttgcttgctaccttttctttcttgtgtggggtaacaaatattttctcttcttgctggtctgtacattttttaagcatatctgcgtgcattcctaattaattgtgattgtagtatatctgatgaattaccatattattcagaatgaaatgaatgaacgagagctgtctgccttgaaagctgctattaagtgtatcgaggagcacaaacttgatgagaaatatccgattgacctgcttcagaaaagagttatccagctagagaaagctaaggcagacaagaggagggctgttgaagctgcaaagccacagtctaagaggcctcgtgccaatggatccgtatatgcgccacatactagctttcctgacaaaagcttctaccaggctgctccgccgcagaggcattcctacccttacgagaggcagtatgtgtatggtgctgaggcccatcaccatcccacaatgataagctcagctccctatggcatctcacctgcccacacaacatattatggtaatggctatcaggttcagtaccaggtaccatatatccactgatggagagagcgtaatgtgctctttcctaactatgtactagcttttaacctgctgctactatgtgctgtagttgtatcaatccactagctagactgcctagcttaaattagttcgaccactcttgtgtgtgctgagtggccagtgtgaaaatctgttaatttccctcacgacttatgacataatttacttctaatgtctagttaaaataatttgcttttgtttaatatatagcctatggcatatatatgttggagttgagatagtcccagtactgcagaattctggaattatgtgctctgcttggtggaattatccactaattcctttctgttgcacttgaaacaaaattgttgtcccaaatctttttatttgatgatggtagatttttgtattttacgagttcaactgcaaagctttggatctactatttcaatgagtgtgcctggagtccaatcgactcaattaagtaactgttagttcatattgaggttactaatcaaatacagaaaattaatcatggtagaatatcagatgacccctggatagtatagtactatctcaccaatcatgtcatttaattcctttatttttttgttctgtacaacgccgccaaacattggcgttgagttcttatttggggtggcacgaatttgcttatttgctttgtcattggagctcagtatcatttagattggtgctgatcttcgttctttctaaaaccagggtttacttacattaagcaaagtatagcttagcgttagatggttttggctcccaactatagatttgaaccccaccctcatttctacaattagtttttttttcccaaaaataagggtcttgaaagggccataatgccaaaattttagcctatataagcctgatagattaggctccaatggatgatacatggtagtactaccttcgtccagtatcatatagatactgctagcatttaaattttgtcatataatataataactacttccacgtctactttttcatcttaaccaatcgcaaattcgcaactctctaatttaaaatcaccctcattccttaatttcttgaaaaagaagtgcagaagcatgtccaatattacttcacattctaagctaatcacaatcctctaatttaaaatcacccattctttaatttcttaaaaagaaagtgcataagtccctacagtataggacagagggagtacataaaaaaagggaagtgcacaactcctggacagaaggagtacatctaccacagagggtgtcgcatgttagagtgtgtttggtttggtgaatgatgttggatgggagatagaccgtctgattttttttttgttttgtttggataaagagcagggtggatggggcaacccaaaaagaaaatattcccttaatatccttaatatgctggatgagtagatccagctaatttggccaaataaagccatccatgttttaatttgggtgacttggcctattccaattggatgtggttggtttaattttctgttaacaagcttaaaatgttttttcctcctgaactatttatctaatttgtaatccgattatactattatactaattacaattaaatctctagttatattttgataaaaaaaattaacaaatgtgccatactaaattgtggcttatcccattcatgttatatctctctaaacaaataagaaattggaatcatcctatccatacaaaccaaataaaagttagatcatcgtatccaacagagcatggatgaccatatattatccatgtatggctttgaagcaaacgcaccctatgtgatgggatgtgatatagcacgaagaacatagaacattaagatactgagtaaatataccatgttgaaatcaattgccaattataccccttaaagaaaaggcaaataaacgaaaattgactaagacatctatatatatatataaagttttcgcaactaatgttgtcacgaagaaacaaagaaatacataattctatatagcttatccagagggggaaaccctaagataagtataataaaagggtggttccaaccgttctgtttcctcttcaaagaatagaaaaaagaatcttttttttaactaaatttgacgctgttcttaattatgatgaaatcattcttagctttttccgtggattatggacaactatattaattacaaagtaattacatcaaaccaccacagaaagaaagaaaaaactcaaagaactacaaatcattcacacatctatgtttcttatttgtaattgaccagccataccaaaaaggaaaaaaaaaaaacaaattcgacacactctgctctgtagagtgtagattgactgactcatgcatcaagccattagcatcaatgctgctacggcggcggccgcggcggcggtcacccaccgggcgagcggcgccggagcggcggcgcccttgtgggctttgacgtcgccggaatcgtccgacgagtcgtcgctgctgtcgtcggccgccgacttgtgcttcttggacggctcgggcgcgggcgcgggggcctcgacgaccttgtagagctccttgggcttgaggaacttggtgacggcgtagacggcgagcggctcggcgtcgccgacggtggcggtgacggcggagttgacgaccctggtgtcgagcgtgacggtctcgcccttattctggacgtcgtagctgtagtccttcttggactcgctggcggtggcgagcgtggtgaccatgccattgttggacttgaggagctgcagcgagaagtagtccgggacggcgtggtagaggaggatggcggtcttggccttggcggtgaggttcttgtaggagggcatgaaggcgccgacggcggcgtcgacgggccaaaagagggtgaggccgttgtccttggtctcgttgacggcgcgaaagacgtcggcgttggcggcgaggaggccggcgaaggacttgcagtacttcttggagaggagctcggtgaggttcaccggcgccggcggcgggacgggcgcctcggcctcggaggaggacagcacggagctcacctggagcacggagatgtcgtaggggatctccttcaccgacttcacgtacctcgacggcttcgcgctctcgtccgcgtcctccgagatgaagtcgatcttcccgcccttgtgcgacgtgatgttcacgtaccccgtcgtccccggcgccgaccccgtcgcctgcatgcaattttattttcattcatttcaattaattcatcatcgtggttattatttaattaatcatcgtgattattatttaattgtattacaaatggacggatcacgtggagcatgaaaataacaaaatttgtaaacactggctgtaaacttcattaattggttcaaaagcacaaattaaagagtagtagaaaattggattaattatctttgaacttcatcaacaccgaaatccgaaagcaaataatactgagggcatgcatttttgtgttcagactaagatggtattcttgtaattgtgaaatatgatctgtccatatgacaaaatagacgttgagtctccattgacaaataatatgatctgtccaggatggctcaattaattaatgagtatcatatttttttttccagagaaggatggggaacctaatcgtggatgatggatcctctgtgatttgtgttcatgatgagtgatgactgataagtgcgtatgcaagggcccacaaatcaatcatgcaattaggtatgggaaaaatagggagtgagcttgataatgttgagagcaactggatgcatgaaattccaatcctagctaaccaaccaactttgtcggtggaatcggtaccacgtgttttcttagtcatcttgggcccaccactgggcttagctgttcttcagtgacctggcacccaacggcatgcatgtgtggattttggaatttctagttgtatatgcatcgcgcgcatgacaaaactttgtcaaaaagttttatggcaacttgatggtgccattcaaacagctccattaattccacttaattgaattaagaacatccctactataattaatacggtgaaatatatactcccccaatttcttaatatacgaggcagttgatttttttaagagatgttctaccattggtcttatctcaaaaaaattatgaaatcaagaacattcctaccactgcgacttgatttaccaccaaatgttatttaagtgtgacttatattgttttatgtttaaacaaaaatgttaaaaaaacgaatggccaaatgtttatcaaaaagttaaggacatcatatattaaaaaaaggaggtagtatacgatgtaaaccgccaacaattttttttacaaaaaatattacaaaatgattctgaaccggcatgcttgcattgcataatgatgtaaactttcaagattacacttccaaacaaaatgaaagctgagcttagttacttgaataacccatgagtaatactttaagttaactagtgcataaatccacctattttttagatgatgagtgtctaaacccacacatatatatgatctgaacttacattaattaaatctataacaatatagacttgattcacacgtatactcctcgtcttggatttcgtgaccaaattaaaaggtcaatatctggctaaccagtttttgtaatcacgaagctatattgacatgtgggcttaactaagtttaaatgtacaattagcccacttgcatggagaaaaaccatataagtatagtgagcatgtagttgcacaacaattaactctgccatgtactgtgttatctctcaactaaacgttgaacctctcgattaatttagcaccatggcgaaaatttcgggtccacttgaatttctttaaatttattctaaacttgttgaaactggagtatttcaaattaattgattttttttaaaaaataaaatcttaatcagaaatactttgttcaagatggcaataagatctcgcttaacattttcccccaatgacaagagaaattaaagaaccctgtctatgaaaataacagcaccgaccctatcagaaggtggatttataatacagtacagtagtaaccaagaaaataaataattagctgtatgtacgtgatcagctagcttgcatgttcgataacacgtgggtactgtggtagtactagtacgtacctagctataattaattaatcaaacaattaaaaaactaataatgatagctaggtaattatactctcgttaattatg

SEQ ID NO: 11285 - DNA, 2073 bp, Oryza sativa
ccacccacaaccttgccgccgccattgccaccgcagctacagcctacagagaagctagctagctagctagagagagagaagaagaagaagcagtgtggcatgcagcgcgagtgagagcctgagaggaggggtatgtatgtaaatgtaaggcatggcagaaagaagggtggtgggtcgctgtggaggtgagatgcatggagagaaagggttggagtaatttacgcaactgccacgctccggtgccctgtcgctttcactcttatatttaattgctccgttccttcctcctgtgtttggtttttcttattggtcttaattaggggttcataattatttattattactgattgacttaattgggaatctcgaggtgtgctagctagatttatttggagggcaaaccgacagttcacttcttacttcagcatatatacaagcaactagccagggactttcatcttcagctatatatactatgtacttttggactagcttagggtatgccatccgcaacggttgaaacaccggtggagaaaccatctttcgtcggtcggtcgaattccacaatagtcccggatgcaataaaaaccagggctaaagatgatctttagttccggttaaaaagggtaacgggcatatttgatctttagtcccggttagtacaccaaccgggactaaagatcatctttagtcccagttcaaatgctgtcagggcatgtcagcccccccgggatctttagtcccggttggtagatctcggggatctttagccccggttggtaactaaagtcccacccctatatatatgtcttcttcctcctccagctgcccgagcaagcttcaaaatttcttaaaaaagaggggaggtcatgccaaaatttctagtgaatttattttggtgattacatacaaatcggaggtgcctaaaaggtttgcaacttcatcctccaatgttttttttgtcatattacatttgcagctatgttttgcacacttttttgtctccaaaatttagttgtaagttgacgagggagaaaatttgtgtggggaagaaagaatatatagaaatttagttgatttgctaaagaaggttttataaaatagttgagaaggaaaactatagtgaaagttaatcttgaatactagaaaacaaactaaaatgaaaattaaaagaagtaaaacacattaaaattagtttaaaactttagaaatagtaaataagaattatttggtgtaatattttatgatttttgtatgaataaagatatgtcattattgtatgactgttgaaacagtttgtaattatcttataattattgtatgactgtcattattgtaagaataattatttttgtacgattttttttcgactcatgtagatggatcggcaatggatgtacgctgaccggcggtccaaagagtttattgacggcgtgcactattttttgatagtagccgaagctaacaggcaaaggggtttatttgttgtccatgcaataagtgtaagaatcagaaggagtattctgcatccaggactattcatttccacttgtttgagtcggggttcatgccaagctataattgttggacatcccacagagagcaatgtgttgaaatagaagaagatgaagtggaagacgacaatattccggactttgctcagtacgttggatttgaaggaaatcaaacgggcgaggaggaaagggatgctgatggtaacgacgttgcggatgatcttggtcagatgttgcaggacgccaaggaggactgcgaaagtgaaaagggagcccataaattggacaagatgttagaggaccatagaacttcgttatacccaggttgcgagcaggggcacaaaaagttggataccactctggagttcttgcaatggaaggcaaaaaatggggttagtgacaaggcatttggcgatttattgaaactcgtcaagaacattcttccggagggaaacaaattgcccgagacaatgtacgaggctaagaagatagtctacccgctaggactggaagttcagaagattcacgcatgtccgaatgattgtatcctatatcgcgg

SEQ ID NO: 11286 - DNA, 1951 bp, Oryza sativa
tgccattttcttcagagtccaccttttcactttgtcctctgtacccgcgggaagggtgaatgtctcgagcattgtggtccacagcatctctttctccaaatctgggacaaagctctcatgatctccgcgtgcccttgttcttcgccaatacaccgtaatgacaggcacgttatcccgcacaacccaaccgctgtgacgtacatagttcttggtggcttctgccggggcactaggtcgtccatcttcttccacttccgttatgatgtgccgaccctcaagcttcttcgtggcacctcgttgcccacgtgccctcttctgtccaacggagggttgacttccactagcctcctcctcctggttcccctccacatccctttccacgtgcccctcctggttcccctccgcatccctctccacgttcccttcctcattcaaatactggtttgggtcctcgttcccctcttcttcgttccagtactggctgcttccctccgcgattgtatcgtacaatatctgttcctcatcgtgatcagccatctgttcatacaggaaacatctgctaagtcatgagacatttatgttttaacaatcttatatgctaacaatcatatgctaagtctaggtgacgtatattataggaccctagctagtcaataaattatatagtaagtctaattacaaatctaataatcttatattaaaactcaaataatcttatactaaaactcaaatagtgataaatgctaagtctaggtgacgtatattataggaccctagctagtcaataattatatactaagtctaattacaaatataataatcttatattaaaactcaaataatcttatactaaaactcaaatagtgataaatgctaagtctaggtgacgtatattataggaccctagctagtcaataattatatactaagtctaatgacaaatataataatcttatattaaaactcaaataatcttatatgctaagacaaaaatagccatgtatgctaagtgtaactgtcgtatattagaaccctacacaatcttacatgctaagtctaattacaaatctaataatcttatactaaaactcaaatagtgatatatatgctaagtctaggtgacatatattataggaccctagctagtcaataattatatactaagtctaattacaaatataataatcttatattaaaactccaataatcttatactaaaactcaaatagtcatgtattctaagtgtaactgtcgtatattagaacactacacaatcttatatgctaattaagtctaattacaaatctaataatcttaattgcattacaaatataacaatcatatatatataattatgtcacttgcctgggcgaattccttcgagggctagctctaccactccggcttgagggacaactccgacaacgtcttttctgcaagatacaaaaagatgtattaggataaacgtgatgtaacatatattgcatttgacgttcacgtttcgttcacgatatcgttcacgttcgcgttctcgttaaggtcacgtttcattcacctacgtttgttcgttcacgttcattaacctgcctataattgcatttcacgttcacgttcattggctcgttcacattcgttcgctcgttctcgttcacgttcattcaccttgttctcgttcacgttcgttcgctcgttatcattcacgttcgttcgctcgttcacgttctcggtgtgacggcagcgggacggcggtgtggcggcagcggagcggcggcggcgtgcggcgtcgtggcgtctcatggcacggcgtcgtcgtggcgcggcgtcgtgtcgtgacgaggtcggcgtcggcgtctgaaactcggcggccggcggcaaccgagagggagagagagagatcgagattagagagagagatccagaaggaggcggcggtcggcggctctcacaccgg

SEQ ID NO: 11287 - DNA, 3149 bp, Oryza sativa
aaccgggacttaaagatatttttccgctattttcaaattctttttaaacccggttagggttaagaaccgggactactgataagcgcactgaatattattttccattacatatgtgtttctaaaatagaagataatgcattacaattatttaaagtacaaagattaatgacaaatacttcgaaaaattattgttgtctgtaataaattaagtggataaaacgtaactcagcaaatatatgatttaaaattaataaaaattctaataatcatatatacttagcatatgaatgatattattaaattggtaaaacctctaattaacatatgtatatgcatccaccatgttttataattaataaaattggtaatcatcatatatattcttagcataggaattatattaaattaattgttaaaaactctaattaatatatgtaaatgccacatgcatgatttaaaaattttaaaaattcggatagtcatatataattagcatatgaatgatagtaacttaaattgtgaaaaactctaattaacatatgtaaatgccacatgcatgatttgaaacttttaaaaattctctagtcaattataattagcatatgaatgatagtaaattaaatgttaaaactctaattaacatatgaaattgccacctgcgtgatttaaaacttttaaaaattgtaagtatcgcatataactagcatatacatgatttaaacttgttaaaacttctaataatcgtgcgtaattaacatatgccatacatcaattgatttatatggataatcaatacactcaaatagtttacatcgtgtacacaataattacggcaatacatcggcggtgacggttgaccgcacgtactttctcctcactattgttccctcattgtgatcgctacgtgagtaaggggtgtcttcatttgataggaggatgctagggtcaatcgtcaccgtgaaagggggttgtccatccaactgatcgtaatcctcgtcagtcttgtcctcaactccgacgatttttcttttgcctgggagaaccacgtgacgcttaggctcgtcaggccctctgcccttctttcctttgctatacatgtccttcacgaaaaagacttgcgttacatcattggcaaggacaaaaggttcgtctgagtatccaacgttgttaaggtcaaccgttgtcatcccactgtcatcaatcattacgcctccaccagtcaacttaacccattggcaccagaacagagggaccttgagaggaccatagtcaagttcccatatgtcctcgatggcaccgtaatacgtgccagttgttccatcgtgtcccatggcatcgacacgaacagcgctgttttggttcgtgctcttcatgtcttgggctctcgtgtagaatgtgtacccattgatctcatatccctggaatgtcgcgatcgacctagacggtcccctcgccaggaaggcaagttgttggttgatcgactcgttacccatgagatgttgtcgtatccacgcggggaaagtatcaatgttcctagcgcgaactagagccaagtgctcctcgatgtaaggagctaccaatgaagattgttgcagaaccgtgaaatgggctttacggaataaattgttgtctaccgtcattattgctttccttccgagagttccctttccctgtagtctcccttcatggcgtgattcaggtaccccgattgggcgaagatcttcgataaattctacacaaaattcgatgacctcctctgtttcataacccttggcgatgcttgcctctggacgagcacggttacaaacatacttcttcagaacgcatgtacctctcgaaaggaaacatgttgtgtaggtacacaggcccgaaaatactgatctctttcacaaggtgacaaagtagatgcgtcattatattgaaaaatgaaggtggaaatatcaactcaaaactgacgagacattgcaccacatcattctgaagggcttctaatctatccggatcgatgaccttctgcgaaattgcgttcatgaatgcacatagctttgttattgttgcccggacattgtctggaaggataccccttattacaactggtagcagttgtgtcatcaacacgtgacagtcatgagactttaggtttgtgaacttcttttccttcgtgcttattattcgcttgatattcgtggggtatccagatggtacctttatactctccaagcattcaaacatactttccttctctgccttgctaagagtgtagctggctggactcaagtaatggcttcctttctcctttggttccaggtgaaggtcgccgcgttgttccatatgcttcagatcattacgtgcttccagtgtatctttcgactttccgtgtacacctaggaagccaagaaggtttacgcaaaggttcttagtgaggtgcatcacgtcgattgcgtggcgtacgtccaagaattcccaatagggtaactcccaaaatatagagttctttttccacatcgccgcgtgaccatcttcgctctctatagactggcttccaggcccctttccgaacactacttttagatctttaaccatagcaaacactgttttcccgttgcgatgtttaggcttcgtacggtggtcagccttatgttcgaagtgcttgcctttcttccgtaccgggtggtttgctgcaaggaatcgacgatgacccatgtatacaaccttcctacagtgcttaagatacgtactttctgtttcatccatacagtgagtgcaagccttgtaccccttgttggactgtccggataggttgctaagtgcaggccaatcgttgatggttacgaacagcagtgctcgtatgttaaactcctcctgtttgtcctcgtcgcacacggggacaccttccttcttccacaacatcttaagatctttgaccagtggccttaggtatacatcgatgtcgttaccaggttgcttggggccttgaataataatcggcatcattatgtacttcctcttcatgcataccagggggggaggttgtagatacacatcgtaacgggctaagtgctatggccgctgctcatctctccaaaaggattcatgccatctgtactcaaaccaaaccgtatgtttcgtacgtcctttccaggggtgca

SEQ ID NO: 11288 - DNA, 1194 bp, Oryza sativa
taaaggcttggtgaaaatgtcggctaattggctttcggttctcacatgggtaaggcatatgtctcctttagtctcataatttctcaagaagtggtggcgaatgtctatgtgtttggttcgagagtgttgaacgggattattggctattttgatggcactcccattgtcacataggagtgggatcttggtgaagttgtagccaaagccttttagagtttgtttcatccaaaggagttgggcacaacaagaaccgacggcgacatattcggcttcagcggtggataatgcaatggaattttgcttcttggaggaccagaaacaagggaccgtccaagaaattggcaagtcccggttgtgctttttctatcaaccttacacctggcataatccgaatcggaatagcccaaaagctcaagtcacaacccttaggataccacaagccaagattaggagtatgaactaaatatcttagaattctcttgacggctatcaaatggcactctttaggctccgcttgaaagcgagcacacatgcaaacactaagcatgatatcgggacgagatgcacataagtaaagcaaagatcctatcatggagcgatataccttttggtccacacatttaccattatcgtcgaggtctaggtatccattagtaggcatgggcgtcttgataggtttggcatcctccatcccaaacttcttgagtatgtcttttacgtacttggtttgagagatgaaggtgccctctagtgcttgcttcacttgtagcccgaggaagaaggtcaactcgcccatcatagacatctcgaaccttttagtcatgatagtactaaaatcttcacaaaaagatgaattagtagaaccaaatattatgtcatcgacataaatttggcatatgaataaatcactcttaaattttttagtgaagagagtagtatccgcctttccaatttcaaaaccatttttcaaaagaaaatctcggagacattcataccaagctctaggggcttgtttgagcccgtagagcgccttgtggagcttgtacacatggtttggcaactttggatcctcgaaccctggtggttgctccacatagactaactccgagataggtccattgagaaaggcactcttgacatccatttggaataacctgaaatcatggtgagcggcataggctaaaagaattctaa

SEQ ID NO: 11289 - DNA, 1555 bp, Oryza sativa
ggttcttcctctcaacaatgccgttttggggaggatcatagggggcggagaactcgtgcttgattccttcttcatcaataaattcttccacttgagtgttcttgaattctcctccattgttgcttcgcaccctcttgatagtgagatcatagaggttttgggcttgctttgcgaagcgcttgaagacatcttgagcttcgcttttgtcatggagaaagtacaccccaagtgaagcgtgaaaaatcatcaacaatgacgaaaccatacttgttacctccaatgcttatgtaggccacggacccaaataaatccatatgaagaagctcgagcggtcttgttgtagtcatgatgttttttataggatgtggactcccaacttgcttcccggcttagcaagcactacacacacgatctttctcaaaagaaacattagatagaccaagaatgtgttcccttttagaagagatgccaaattcctcattccaacatgggctagcctacagtgccatagccaacccatagaggatttagcaatcaagcatgcctccggattcactctatctacatcgaaatcaacgagatagagatcactctttaacacacccttgaatgctatggaagagtcatctcgcctaaaaatggtcacatccacatcggtaaacaagcaattaaatcctaacttacacaattgagacaaggataataaattgtagcttaatgaattgacaaggaggacattagatagagattgattcttggaaatggcaatcttaccgagacccattacctttcctttaccatcatctccaaagacaatattttcacgacttccaccctcctcatcaagacttgtaaacatactcctctctcccgtcatatgattggtgcagccactgtccacaacccaacttgagccatcggaggagtatgcctacaaaagagatcaagcttgggatttaggaacccaaacttgtcgaagtttgggtcccttgatgttagtcaccaaagcctttggcacccacacacaagtgcggtactcatcattgtaattcccattaaaataagcaaccactttgccctctgaatttttggaaattacatatgaatcatagtaaagaccctctggccagaacttcctggcattataaccggaacttccggccagccccttcggcctatcagaagcccgaaacttcctgacaaaatgtccggaacttcctgtcttacagggcaggaacttccggtcattttgcccggaacttccgggtgtctgaccagtgaggggacaagtcacctcacttgcttgtggagcttttccttctcttacaaacatcaagcattctttcccatttatcatcacacgcttagacacaggacttccaccagaaaacctgagcccgtgtccatccttgttaggatgagcggtgatggtcttgtaaagggcatcttttgaatggtatgtcttcatacatccatatttcaccaatgtgcccaacctttcattttctttcttaagagcttgcatagcatcaacattagtagcatgagagttcaa

SEQ ID NO: 11290 - DNA, 1907 bp, Oryza sativa
ctgtggcccaaacgtccaactgcgcatggtgcatacctgcaagatggaaacactgctgtgaagcgtcgttctcaacttgttatcctctgtgaagaaatgaatgttaacgggcttcataagttcatatcagacaatcgcaaagacttaacatccatccgtgaggaaattcccgttgcacttaggggagcaactgatccatatggcttggtgttagcttctctagaagacttctattttggagacaatcttatattggatggtaaaaaggatggaaactttctgggtgtacggaggacgtgcctcatgttgatggaatcacttgctcagctgcaaactgatgctactactggtttcatatcaaaaggccaaatgcttactgctagtattaaggagagagcgaaaaagatagcgcttgagtggaaatccaagttggatagccttgactttgatgctagcaatgggaactgcctggaagcacatgcgtttcttcaactcctggctacctttgctatattttctgaatttgcggaagacgagctgtgtaagcttctcccatcagtcagtcgtcgtcgccagacacctgagctttgtagaatacttgggttgtcacagaacatgccaggtcagtgctatcatggattaatcatgcacctagttccgttatgtattgaccataggggttttctatttgtcattgtcactcagattgctagagagcttattcttaccacttcaacatttgttcatatatgaatagactatatcattggatttattttctagttagtggctgcagcgagaatatacctagaagtaatcaatattgcgacattgctgtttagatgatttatatggaaaatctgaaggctgctacttatgttttagtggctgcacatcttaaacccactatctagtatctgtattgttcttactggcaacaaaattcgagcagcttctaacgctgcgttcgaattatggactttcctctcacgcacgaaaaacgagggtggtttattagcgcataattaattaagtattagctaaaaatgaaaattagattaatatgatttttaaagcaatcttcctatatattttttttgaaaaaaaaaacataaagtttagcagtttgaaaagcatgcgtgcggaaacgaggtagtataagttgggaagggggaagaaagaacaccctaaggctgtgtttgatacttggggttgggaacccaactccaccgcacggaaaacggagcggtccattagcgtgtgattaattaagtattagttaatttttttttcaaaaatggattaatttgtttttttaaagcaactttcgtatagaaactttttgcaaaaaaacacaccatttagcagtttgaaaagcgtgcacgcggaaaacgagggaaaggggttgggaaacttgtggaaagaacgcagcctaagcatgctagtgcatggtctaaccagctcaattcaggactcaggagatcttaatgtcacaggatgttagttactaacttccgaataatatatgtaattgcatatagtatatattggattatagcaagctaatacgactttattcaatccctttttggttgaatttgtcctcccgtttgattatttactgggatgtgctgttgtgcatctcttttagaaaaaaaaatacacatatatgagtattatggttaatgttatgtagtggcaaaatgcattagaccttaaaagatgaatcaatcaagagttggcaccgacatggttttgaaatatataaccgtggaattgaacgattcaacttttatgctggcgctgatttacacatctatcaatttgcctaagattttaaactttctcaaagagttgtacagaagcaaggccctagttcgtgatatgttgttacagcttgtatagct

SEQ ID NO: 11291 - DNA, 1411 bp, Oryza sativa
cagagcatcctctacaaagatatgtggacgactcaggtcatcatcatctaaccccaaagctgcagcaaactgtgccatagaaaccctatactgctgcccctgaatggtccacttcacaaaatcaagccccttcttggtgatgccaaagaaagcagtaaagtagaactgtccaatcacttcctcattccaggaatactgcaaggccaacaaatctaccacgtgcttgcgctcacacaccttgcgtacctcattgaagactatattgttctttgaggacatgtactgccagtctagccacttcatctctaccactagatgagatcttcccatgatcatagagttataccaatcaacctgcaccaaggtcctgaatctgtcatcctgagagtcagctggcagagtatcaggactaaccattctgtcctttccacactggagtagattcttcagatagttcactcttgtgcgtttaggatctggatcaacagcccttgtcttgtacagcctcaaaggattgcttttagaaccaggctcatcctcattgccaccatcatctgactcagatgcagctggagagggagagcggggtgcatcacgaatgacaatgctaccagccctcctggaatggatcggaatctgactcccactgtaaaaaactccaactttttctttgcccaatctccccctaggaccacgaaccggggggctcgagtcagcaggaacatcttgagaaagcttctgtctcttctcacgaggcataatgaccactgcaacaagaatcaacaaggttggagtgcaatggttaaatgaaacagtagcagaatcaaggttattggctggctggacagagaccggaagttccaggccaagaacaccggaacttccggcctgcaaaactgaagaacagaggatttaaccaggccagtgcatgtgacaaaatcctatagatcggcaatctacaaggtagcaggaacaattctatccaaaaggttttctccctaggttcacatatttagagatcggggcaaaaacatgatgaaccaaaggagaagatcaaaagtgctaccttgagagggaaaatcgcaaatcgatcgcgggatgaacctcctagccaccaatgtggttgattctacggagaggaatcaaatttccacggttggaatagaaaatcgccgagaggagcactgtagcggcggctagggtttgggaatcggggaggagaagaagtgacgagagagaaaagaagcttgggctccccctgggtagttatacccccgacccccggaagttccggactgggatgaccagaacatccggcctgacagaacagaggacagtcaggcccaagttcaaaggaatagatgagaattaaatgatttagaaatgaaaacctatggacgggctgcaggaa

SEQ ID NO: 11292 - DNA, 525 bp, Oryza sativa
taatgaatatgatgagctgttggacccatctgttttcaattggttgatcaacttttgcaggaaggaatgccattgcatgctttttcttacccccgacaatgactttgctggacaagaccaggcatgctcctttttcacaatgttttcttcacagataccatctagctctccgttgtcattgcatgaacgtcatttctacaaattcctcaaagtaattttatttttccttatatatactctatgcatattgcaggctataaccttggaggagatcaaagacgcaacatcaaagatataacctcagtgcaccttttcttccattattctgcttgacaccagagtttgtatatgtagtctctgtaagatgacattctaccgatgaaatcggtcatgataagatgtgtagtaaacaacaatttgtcgttccttagctttcatgttcttgcttttgaacatgggaaaacacgctcccactaatacaacagcctattaactacgcacttgatacaaagcatcatgtttgtt

SEQ ID NO: 11293 - DNA, 536 bp, Oryza sativa
gttcttacatgttttctcatggtcaacttattccctgatcaatctcccgaaagattactgtttggattccatgacgtctccatgaccaatctcaccattgccatgctcgtgatcgttgccctcgacgacgaagagatcgcctaactgctcgtcgttgatcagagaatcaagaaacgaggagaagtcgtcgtcacccaccatggcggaagcggaacccatgtcgaagccaccatgaactgcatcctcggcacagaactgatcgccaaatcctccttcgaatccctcggcatcggcggcgctcaccatcgctgcgaagtcaccgccaccgtcggccggtcgggcacgatcgtcgctgcactcaatgccagcggccggcgaggatgccgtcctcggcggcttggccggcaccgccttctgtaagaagtggcggcgacggcagcggcggcgtttgagtgatcggcggcggccgtcagcggcttgtgcgtccgcgggtcgatgccctgcgcgatgagcttcttgctgagatgcgagttcca

SEQ ID NO: 11294 - DNA, 4434 bp, Oryza sativa
atgtttgaccttagcttgttgacaagtttcacaactcagaacatattgctggacatccttcttaagacccttccagctgaatagcccccttattctctgataagttgcatggattcctgagtgaccacccaagccactgtcatgaagagctaacatcactgcttgcttagcctccaggtgattacccagccaaatcttccccttatgcctaataattcctcgttgtaactgaaattccccaactccttcaggattcaaactgagctcagttaacaagtgtttggcttcttcatccttctcatatccttcttgtacaatttccagccattttggtacacaggtggatatagcttggctcttatcttcttcttttcttgacagtgcatctgctgctttattttcttgcccctttttgtatttcagtttgtactgcaaccccattaacttaataaatgctctttgttgcattcctgtgagcaactgctgctcacttaaatggataaggctcttgtgatcagtctgtatagtaaacacattgtgctgaagatactgtctccactttcccacagctagcaatatggccatgcattctttctcataggttgaaaacccctgtgatttaacccccaaagccttactgatataagccaaaggatgcccttcctgcattaatactacaccaatcccctttccactggcatcagtttctataacaaattccttctgaaagtctggtagtttcagaactggtgcctgagtcagagcctgtttgagtaacacaaaagcttgttgctcttcagtaccccagatgtagctgactcctttcttgagcaagttggtgagaggccttgccaaaaccccatagttcttaataaacttatccccttagctgtttgagagtttttggcactggccacttagacacagcttggattttggctggatcagttgccactcctgttactccaatgatgtggcccagatattcaaggtgttgttgagcaaaagagcatttgcttgccttgacatacagcccatgatcttgcaacaactcaaacacttgctgcaagtgttgaacatgttcctgcaatgaattgctgtacaccaagatgtcatcaacaaacaccaacacacattttctgagtaatggtgcaaacaccgtgttcattaatccctggaaagttgcaggggcgtttgtgagcccaaaaggcataactctaaactcatatagcccatggtgggttctaaatgcagtcttatattcatcctcctccaacagcctgatttggtggtaacctgacctgaggtcaagttttgtgaaccactgtgccccagccaactcatccagcagctcatcaactacaggcattgggaatttgttctttacagtcacctcattcaggcccctgtaatccacacaaaacctccatgtcccatccttcttcctgaccaacaacacaggggaggcaaaaggactagtactgggtttaatgatcccttgtttcagcatctgagacacttgtctctctatctcatccttctgtccaggggagtacctataaggtttcaggttgactagttttgtgcctggcatgagtggaattccatggtcaaactgtctatggggtggcaaagttctaggttcctgaaacctgtcctggaacctgttcagaacttcctgaacctctagggaaagtccttgctccaaccctttctcctctagtgcacacaactgcaccaactgagagattgctccagcctttgccatccctttgagttgccttgctgtcacaggcttacattggtaaacaattgttccttgaccccaactagagtgattctcttttcttcataagtgaatctcattttctttctcttccaatccacccacatgggactgaattcctccaaccactccataccaaggatcatgtcataaccacccagtggaagcaccttcagatcagttttgaaagtttttccctgacaccaccactccaaaccattcaccacttgattgcagagcattttacccccatcagctatggttacttgtgatggcacacactcctgggtagacaactgcaaccttgacaccaattgctctgacaagaaattgctggaactaccagaatcaaccaggacaagtatctcttgattctgtaacaagcccgcagtctaatggtccttttcccaactgtaccagagactgcacattcagagagtaccagttcctcatcacttgttccttccacatcatcagccttgttactgtcctcttcttgcgccaggaacacctctagcaattcttccagaacatgcagctgcaccgattttgggcacttgtgtccagggccatacttttccccgcacttgaaacactctcctcgagcccttctagctgcttttagtgaatcaaatctctcttcccacttgggcttttcctccaccttcttgttctcatcagggctagggcccagaattcctttaccaaggaatggggtcttgacagcaggcttgtactgctctttgtatgtagttctgccaacagtcttcactgtgatttctcccagcaagtcctcctgcgttttatcaagtgatagagcagcatcaacagttctaggcttgtgcagcttaatagctgctttaatctcacttttcaacccaccaacaaatttagtaacaaaaaaggtttcatcaaaagccttattataaactaagactttattcatgatctcttcaaatttggaatggtattcctccactccccctaattgcttaaaaccttcttgttcttccaaatgttgctcgtatttatctctaccaaacttgctatgaacttctaccactagttcaggccaactctctatgcaatgcaactcctcataggtttggagccgaagtgctgcagtgccagtgaaatgcaaggtggcaaaggaagcccatgtttcataaggaacatgatacatgctgaagtatttttcacaattagttttccagagcttaggattctctccatcaaacttagggaaatcagtcttaggcaatctagaccccccaaatttcccagagctttgagatccacagttttctctctcagaattttccctcaaatcaaactgcacaggtgagtgatggaacttgtgtttacccttgaccagggttcgctcctgggcaaagcttgccccggtagcatcaccctggtagttctcgtcgtcgccgggccctacgggcgtttgcttcgccattgctggcgtcgcttgtgcacgggtctcaagttgagcgacccgcgcgttgacttgatccacagcttgacgtagatccttcatgcccaaatccaccgtggggatccacttctccatgccttgaagtgatccgaggatggagttgatgctgctggtgagctcggtcaccctcgtcgtcaggaaaccgatttctccctccgccacctccatccgctccgtcagagttggattcgtcttcttcctcaccagcacgcccgcggatcggcggctctgataccaaaaatgtcacgaactcgcaattcggcaccggcgtctcgcctagtacgtggttgcaagcttctgagtttgagagattttggggatttgagaggaagaacagaggaggaagacaaggtaggtaggattagttttatatttcttctcatcgatgccttgactcaattggtcaggtctgtatttatacaccgacacatgggctctcacgggttcagcccaacatgatgaagtggcccaaagactcaatacacccaagagtactgtaacacaccacgacaacataagaacatgacaacaaggtcaatggaggcagctggcggaaaagagaacccggcggcgcctccgcacctgtatctgccatcgcttgcacagctccaactgtgtccaggctcggggtcgaaggggtggcgcggtggagggaggcacagggctgctggatttggccgcgccgtcgcctgccgtggccccatcatccgccaccctgtcgcccgcagccatcccatcgcccgtagccaccccgtggcccgccgctgagcccgtcgcccgctgcagcgccgttcgtagttgcctaaaccgccgtcgcctatcgcccctgtcgaccgccgctgccgtcgcccgtggctgcaactgcctctctgtttctcagatccgaaaaaatgggatggtgatggggttggttacggcacgtgagagcaacacaaggtgtgtgtgtatgtatatatatatacatatatagatacatatatatatatatatatatatatacatatatatatatatacatatatatatatatatatatatatatatatgtatatatgtatatatgtatatatatatgtatatatgtgtagagagacgctcatgtcgagtagtaaacaatttactggtagaagggggcgcagagagaggt

SEQ ID NO: 11295 - DNA, 6698 bp, Oryza sativa
cgccgctcttggccggccgtcacagccgccctgttcctgtggatgagaggaagtgagagagagagagagtagaaagtgtgtgtgagagagagaggagaggatgaatcaagaggataatgttgggggtgaaaaaaaatggtggattttttttaaatgtaaaaatcaatttttattttatatgtggctctttaaaacgaatttaaaggcactaaatcaactcatacgaaaaagttgttaaaaacaaagttgtataacttattgagatctatcaattttattttggtcatttctccatccgagtttgattaaactatataaaatttgaatttaaaaatataagaaattcaaataactttccgggtagtaaatgatttcaaataaaaaaattgtcaacaacaaagttgtataacacatcaacatctacaacttttattttggttatttttctatatgactttgtttgaaccgtttgaatttgaatttcaaaatatgacaacttcaaacaatattttgaaatactaaatgatttcaactgaaaaagtcatcaacaacaaagttatataattcatcaagatctataactttttattttggtcatttcttcatccgacaaagtgatagtaacattattcacaaaatttgcatctatctcatttggttctataaactataagagagatatgtaaactttgtgaacaatattattatcaatttatcggatgaagaaatgaccaaaataaaagttgtatgtcttgatgagctctacaactttcatgttcatgactttttcagctaaaattaattacatcttcaaaatattatttgaagttttgaaattcaaatttttaattgataaaacaaagtcacaataaaaaatggctaaaataatagcagcaagaacacaataacaatagagcatgattttagaaacatttaggaaaaagaatcatccaatttggagttcatatgagtgagataaattagtttcaaattaccaaattttatttttgcatacggcttcttaagtcacccatatggaaaaattgatttttttttcatgcgggtccttaaatggtccacacacaaacaaatgaaaaaattcaattatgaaaaataaccactcaaatgtttaaaaactttcaattgaaatgttcaacctaaaatttaaaatattcaaccaattttcaaaaatttcaatgtgcctacgaaaatttaagtgatacacattaatttatttgtttcatgataacataaatttgtatggaaagtaaacatagcattttctatctcccccttgcccttataaatagagataaaatttgaaaatattgatgttttgtttttgaaaactaatggctacatatcttcctcgttttaagaagcttattttgaggggtcttgatattttgataattattcgttaccgtattcgtttcgattcgtattcgctccgtatctgtattcgataatattcgattccgttttcgtatccgggtttccaattccgatttcgattccaagaaaaaaatatgaaaacgaatatgatagagctagtttcctaccgtattcgatccgttttcatccctagacggaggttaccgactgtgggaaaaaaaaaagggaaacgtgggggcgggggttaccgagggtggagacgggtgggggtagggtggagtggggtgggggggtaagggggttggggtaggttgcgaggggagcattttagctattacgcatcctgggtgcggtttagcgcttatatatatatatatatatgtcggtgacataggaccgggagtatcatgacttagagacttgaggcagacacgatcacccacgtggcctaaccccctcggggggggggggggtcgggcccgagggtgatacggccgcccttctctttgtctccccgagaggtcggaccgctcccgtctcggccccgagggccgaggcgccccgaccccttgtgggttttgcgccgcgtatatggggtaggtgagcatagcggggctcacctaaccgcatttattgcggtttggacgagcgcgttacgccacatgtagcgcagtatggcacgctcgtttatccggtctgtgaccggtcacagatcggtcagattgcgggttaggtggcaacaggcgatctgacacacgcctcgccccgtcccgtcaagatgagagtctctaggcactcgtccctagccggagccagcgtgctagctcctggagatggcacgttggtcctggtcagatatatgccaggctttatcccaaccattataagcaagacgttgtatgaagaagggcgaacatgcagattgctaaactgacacgtggtggacaaaggtgaccggtctgtgactggtctgacactggttatgtcgccggaagacaaccgtgttcccacattgcacctgcttccggcggagtggaggtaggtatgggccgtcccatcagaagggtcactcgggcagcagccgttgcaaatctccgcccatttatgaagagatgacagggtgatccccgaggtcagacgaacgaggacgcgtggccacactcaaaaacaggcagtgtttcagcttccaagagaaggcaagccaagttttactatagataggatgggcccccacccaaaaagagagagagggaaaagtggtgcatgtggtatccccttgagatataaaaggaggaccttgcccacttaagaggggaggggggaaggggggatgatctggagaggagatcccacgagagaaaaaaaaaggagaagagggtttttagaataagagctctctggctctccagctctttgtagcttcttcatacacagatccaccagaacacaggagtagggtattacgcttctcagcggcccgaacctgtatacatcgcccgtgtcttgtgctttttccattctcgcgaactttccacagactaggagcttagaatctcacctagggcccctggccgaaccggcaaaggggggcctgcgcggtctcccggtgaggagccccacgctccgtcaatatatatatatatatatatatatatatatatatatatatatatatatatatatatatatatatatatatatatgtatgtatgtatgtatgtatgtatgtatgtatgtatgtatgtatgtatgtatgtatgtatgtataggaaaatgcggatttgagctcgagctcacatgtacctataaaatctgccgttcgactgcgcagagattcgtgcgtgtgttgatctacgaggggagcgaccgaagttgttagggcgagggtacatatatggttaaggtagaaaaaacgacatattctctacatgccgatatacacttaatcatagtgaaagcccaaaatgccctttgctgctatcactagctttagacagggctaaagcaggctaggacactcaagagagactgagtcagacatggcatagcgaaagtgggttccacctgctcgcctgcttcacgccagctctgcacgcgaggccggttttctacagaaccgttgaaccgggcggttttgatggaacaagccggcttttgcgtttacactttacaccacgatgcctctcatttttctcgggatgtgtggggagtggggacaacctgcggggaggggaatttttttcccatctggttcttttgagcggcgacggcggctgctttaacagcggcggcggtcggctagatgccatggcggggtgagcaggcaagcagcccggcggcaccgcggtaggcgaatagggcggtggccggagagaccgccggcggcaagcgagtagccgagcagggactccgccggcggcgtctctagttcccatggtattgcagtgatgccccggcgttgctcctgttattctttgtgagcttgtagcggtgctcccgtctcctgctcgagtcatcgtccccactgcgtgcacaaggaggcaacgctagatttggtactgtgctactgtgtatgtttggtatttggattcgtatacaatatgctaatctgtctttatagatcaaatttttactgtcacttccgtgcattcttatgaacagatggatgcattcagatttgacaaggtataataagccaataaggtgtattttgttaaatgattgccatttgacctgtagtacagatttagcacttgccagtgacttgtgaacttgagatttgagaaactatgaagtagtacgagactatgaactgtatgagtcacatgttgaatattatatggttatatgattaagctgagttagttatgagcttgttttatttgtgatcaaaatatactggtatttatgaactgcatatgctccggttcgaagtatttttcaccggttcaattcaaccggtccaaaactattgaaccggtggttcaaccgatttttaacggttgaaccaatgaaccgacatcctcaccggttcgattgtcggtccggtcctaataactatgcccccgagcgagcgtgtggtgcgcgcgcagcgtgtctgttgggtcgttcccagacccgtttgggaaccattcccaggcctgttttgtttcgggctaacgtttggcccacgaaacaacaggcgcatccggttttctctcaggagcttcagcatttggaaaaagtacaccgaaggtccctgaacttgtcatcgagttaaaaaaacgtcccaaaccgcaaaaccagatatccggtgtcccttaactaatcaaaaccggtcacaatagatccttcggtggttttaatcccggttttgtcctacgtggctgctaaatcagcgttagatccttcggtggttttaatcccggttttgtcctacgtggctgctaagtcagcgtggctgctaagttagcgtggaacccacgtggaccccacatgtcagggtccacgtcatctctctctctcccttcccctctctctcttttctcctcgctcactcgctggctggcgcgcgcggccgctggggggcgcaaagagggcacccgccgcgtcgttgaagttgggccggagacggcgaggtaggccgcgacggcggcgggggagaccgggtcggcggcgaggcggcggaggaggcgaggggtggggaggggaagggaaggggatggagttgagggcgcggcggacggcggaggtggcgcggtgcccggcttggagcggcggtgtacgtgtcgcctggttgctgtcgccggcggtgcgggggagtgggaccgaccggagccgccatggcgcgcgtgcttccccatcgccggggaccgggtcggtggcgaggcggtgaagaagggaggcggggaggagacgaggactagctaaacctttgccggccgctctccgcgctatcggccgctccgcccaccgctcgcccggtcctccggcaggccagtgcggcggttggagctgccgccgtcgctccgccctcctcctctcccgcctcgccccggcgacctcctcccgcgtggtcgcgtggtcgttggcgagacggaggtgccggagatcgtcaaggcagcccaggacgcggtcagcatgcatgcaatccttatcttctgctgctgcttctgcatcatcgtttcagtttaagtttcagtttcagttagttgtgaggccattcctgtgcaatgtgcgtaaccgtgaccaccgttgtgtctaggcagtgggccaaagttgaggacaagtacgccgtcaccgccatcggcgtcgccgcgctcgtcggcctctggacggccataggcgccatcaaggtatacgacgcgacacatatgcttccatatatatatatatatatatatatatatatatatatatatatatatatatatatatatgatctcttactccttcaagttcagatacgatgcttaatttgattttcttggtaatctgcatatcggattaggccatcgacaggcgacaggcttccacttttgcccggcgtgcttgagctcgttggaatcgggtatacaggcattactgggtaagataaaggccttcagttgcaaatttcgttgtcacatagggagagaggtagtgtaagattgcttctcttacgagctccaattatcatgtttcgtccggaggatggcttcgtcgggacgccttctcccgcgtcgccgccgccgccctcatccgctcccgccgctccttcgatggttcccgcgacgacggtgccggttccaggaggttgtcgccgatggcggcggcggcgactacgacggagacgcacggacgcgctacagccgctgccgccgacggagccgctcctggtcagacgcgctaccgccgctgctgccgacgcgccgacacgctaccgccggtgccgtcgacggagccgacgacttgtctgggtgtgtgtaggagggaggaagagaggaggaagggagaggaggctgacgtggatagtctgacatgtggggtccacgtgggtcctacgctgactcagccgccacgtcggataaaaccagggtcaaaaccaccgaggaatctaaagcgaacggttttgttaattgagggatgtccagtatctggttttacgattgggggatgattttgtatctcgatgacaagttgagggaccttgggtgtactttttcctcggcattttggcctcttctttgtgtaaaacatgtctaacattttggccagttcatcttcacatgccctaatctttttttttcaaagaatttggtgctaatctgaatcaacgatgggct

SEQ ID NO: 11296 - DNA, 4291 bp, Oryza sativa
tcttcaaaaaaaatatgagagtattagattttttttctaatttttttactaacttttttttttgaattttatgatgaaaggaaagaatagagaggagtataggggggaggggcaagttgatcgctcccagtgatcacccgcccattagattcccccattatcttgacttgtgctttgttattgattaaccaagcatttcattaactcacaaaacatttagctcatttcttgttaactcacaaaactgacgctcatctaaaggcttagtgaatatgtcggttaattgtttgtcggtgctcacaagggataggaagatatcacctttggctttgtgatctctcaagatatcacctccatgcctaaccaatttaaccaatttgcctgcttgactcgttgtagtggtccctgcacaaagcagagacatggaatgtccgtaggcacttgccacgtgcccttagcgttgcccacttgcatagggagagatcaattggggcgacgttgtgtatagtcactgctccacaaccctacctatcggtgtctaggcagagtgggtgaaaagcggtagggctagaagagactcttggagtcaaccgcaccgcctggcagctcacaccgtctgacagtcctgcatatctcacaccttggcgggtggatatatgtcacatcacccttaatgggagtaacttgcaattgttgatgcgaaacacggtggcctaggagttctgcttaactccagtgcaggtccaaggctagcctcgagtgtgtcaagggcgtgccagctgatttgatcctgcaatcagcaagaaagacaaaagcagagttagtcagccgatagccgatcggccgacaagccgatagtgtatcgttggtagtctcagccgatgtagttagaccaaatcggctatggactggatagatgaaggaataaaagaccacatgcctcatcggccataatattgtctattaggtttgataaaaaaaagttcaagataatattaggagaatagccgatggaacagtatttagagcagaatgtatagataatgataaactactagctaatactctagtataaacttatataaacaaatcaatctatataaatatattaaatcatgatcagttagtgtttcagatagcccaggcgatactgatctaacttgatatgattatataggatgatttgtctatataagtggcaaatatacataaaaatagtaaataagcatgtatattaggtaagattggctggaactcccatactatctctaattataattaattccatgttagttcttagggttctaaacaagattagggatgatgcatctcaaagtaagctgagaaacctaaggtctaaacaatcaaggaattaatcacttttcaagatggtagatgccttagctaagctaatctagtaaggcaatttagacgataccggcaggaaccctaaagcgagaaccagccgataggctaaattgagatactaaggctagattaacgaagacatatgataatagatggtcatgataaaagaactagaacatctaaaatgacataatagccccgatagcacaagccattgagacgggttacctcttgttgagaaaactcgccgaaaataagaacaaaaagggtagcgatgtgctgaagttgtattggattgtctctcgtattatagttgtacggggttcatatttataccccaagtacagacttagtccattatggacatgactcaaacctttctaaagataaaatacaaacaagaccatatatggtggcctcttaccaaatctaacgaaaaccgacttaaatatcctaattaatagatacaattgccttaatcgagctctatctttaattggcaatgacaatcattccaatctaggcctataccgagcccaagttaaaccgtacgtatcggctgtatcggccatcgacctcatcaacttgatcaatatgaatctctgtttctaaccgatatggtgtccagccgatgcgtagtctaacttcaaatccaactcaattcaccaccaaatccgcttcgatcttcttccttcttttccaaatttgatgcaaaattccgttgttaatagcaatgcatgaggtgtgatggcacgtctcgctctagctgaaacatctaggcccccattgataattttgttaattaatgacaagcactaattgtggagtaactatttcatttcagtaaaatatttatattaggacaacatgatgtgtacgccaaggatgattaccacggatcaaaattgatggagcaaaaaaatgggataaaggtggcaaacctaactttttattttaatcgattgaggcattgggcgatagaattgtgttaggtttatttctagctttgccgtactatcaagaggggtaataactttggtaaagaagtgatcaaaatgacacattatgtcatttgcatgatggcttggtttgatagttttatttatctatctttctgtctagggctggtcagatcggagtgtcctggcaagtttgaccgagccaagctcggtctgaccgggcggcggatgagtccattgcacggcctcggcttcgcgatccatagccaccagagccgacatcggtgttaccaggtcgagacgggtctgactggagctgctagcgttctaactatccgagccacggtggtctgaccaacaagtgttcggccacgcattaaatgcaatcaacggctagttttttagccattgcccatttgccctaaggctggtctgaccgaccaccccttggtggtctaaccgacaggtatccgagggttggggttttggcccaacggcttgttttggtgggtagggatataaacactccctcaccagccaccaaggttctctcttggcgcattattcactcgcatacaccccttgcattcactctcacaccaatagagcttttagttcattcatgggggttgggtgaaagtaaattgacccaattcaagtgctttgcatcgttgaatgagctagtgtggcacttgatcatctcccagccaggttgttacttgttagtcttggaggtaacagcttggagtagttgcccggtgacctctccgtgaagattgtggaggaggctcggtgatggttgtgagtggtttggtgttcaccatgatgaaccctgagctccactcgagacactcaaggctgttgttggaccgatctttcggtgagttgaagataactatgatttgggagaaacgttgacgactcgactacaaccgtactagacattgttgtgttgcgccttagcgatcgatacacctctccgtgggttgttgatcttgccggtgcagatcaaccttattcctgcgagcaaatagaagaaacaagcaagaacaagataaaagcaatctgaattgcagataggaattgaatacaaatgataggttggggttctgtaacgagcaaaccggcgatctaaccgatcacgggattacccggcaaagtagcaaagctaaacttttatctaaacaaaacccaagaaactctaaaggggtacctaactatttataaaggtgtgaagacaaccaagtggactctagggtcgtgctccacctggttggggcgcaccccacatgggccccacttgggccagggtcccaaacgaagttacaagcccaaaggcccatgacaggtgacacagcaccttgtttttgtgtttgcggctaaactagatggagtctggtgatgaggctggatctgttggaaagagaactccgagagctttccatcaagtactcatgggccaaaaacggaggtcgtatgcagatttggtagccgtttgaagtcagcaatgtagcaggtggccgaatcggattccagcacttggaggacttgaacttgatatcttgttgttcatccatgatgtgagcaacggatgtatccgtagtagccatggtcacatcacaccaccttcagagtgaaggaagaactagggaccctagtgatcgaggcttggatagtccacttcggggccggctcccaccttgctcaccacttgacgaaggggtttggtggcttcgtggtttgagcggtgaagttgggcttgcctcaacggggattaggaaaccgatgagtttccgaacttaatgcattaagtaaatgaaacggttaaaaaatttcttgtctcctgtctcatttacttaatgcatttacttttgtgcagtatattttcatagacatacttgagcccttatcaccgctgaattgcataacttaatctagttgcttagttagtatagttgttcatg

SEQ ID NO: 11297 - DNA, 2305 bp, Oryza sativa
gctagtgcagatgaaccttattcctccaagcaaatagaagaaacaagcaataacaatataaaagcaatccgaattgcaaataggaattaaatacaaatgataagttgggattcggtaatgagcatactgacgatctaactgatcatgggattacacgacaaagtagcaaagctaaactttaatctaaacaaaacccgagaaaccataaagggatacctagctatttaaggaggtaggagaatgaactaggggtccctaggtttgtgctccacctagttggggcgtacctcacatgggccccacttgggctggggtcccaaacaaaatttcaagcccattggcccaatataggtgacactacatcttgtttctgtgattacaactgtcagagaaggaatatggagatgaggctagatcggttggaaagagggctccaagagcattccaccaaatactcatgggccaaaaacagagctcgtatgtagatttggcggccgtttgaagtcaacaatgtagaaggtggctgaatcggattccagcacttgaaggacttgatcttgatgtattattgttgattcatgatgtgagcaatggttgtatccatattagtgttaacgaccaaatttggtaagatatgaactaggtttggcattggactcagagtggattcggcaaagagttagattcaaagaacagagtatgcatcagctgcgatggcatcggctgagatggatcggacagaggacagccgacacagcttattagccgattctgatgaagacagttgtaaaactgcttctagaatcgatcaacgtgcttcgcaaggattgccacgatggagaaaagctctcagaaaggcaattgtatctattaattaggatattttgaatagtttccttagagatatgtttgggcaaaagtctgccgtaaagacttagagttaagagtcatgtccggcaaggacatatcatgtatctcgggtataaatatgacccgaacccaatgtaaacaaaaacacacaattcaataacactttcggcgcatcgccacccttttactttcgttctatttcgacgagttcttgctttcgggttgagctgcatcggtttcgatcttcaactagaggtaaacttgtcaagatggtttgcgttctcgggattagtgcttccatctttatgacactctaatcttgtttatgtaatttgtcgagttatcatatacacttcataatccttattagttacgctatacaacttgcaatcggctggttctcactgtagaaagtagccgatagagtttcagccgattttacctgatttagctatctttatctatatgcttgattgttatgctagatctgccctttatattaagatcttattgcattaaaagtatattacgctttctgtttaatatattttgcttgttttgatatcttaatatagagtggtatcgaagtattagccgatacatgctagatctatctgatcagctatgctataagcgttcatataatcatgatcttagtgtatctttagacttaaagtgatttatactgtctcgacatggcgttcgatctaccccaattacttagtttaagtatacatcgagagaaagattatatatcattaatatctacagccgatcgagtagatttagttttatattgctttatttctcattgctgatctaatgccgataacatcggctcagcgattgacaatatgtcatcggctcatagccgatcggctatcgtttatggatttaacctcattttcttgtcttttattcttgttgattgtaggatcaaatcaactggcatgctcacgaacctaaaagcaagattttggatctgcacaggagttaagcagatcttccaggccagtgtgtgtttttcgcatcaacaagtagccatggtcacatcagcagggaacctttgttaccatattaccaatagtttaccctctagagtttccctagtgcgatgaactgaagggctgagctactcttgcaaatttgtctgaacccacacggaatcgacaggaactacaccccaagggtggtcagttacctgagcatgggaatttcaccggaatcaagagagtttgaacaatcttatcccaaacttgttgctagcatcgctatcaatgttgcaccctagcaatttatgacccgagatggaataagaactaatattcaggggtaacaaagaagaagaacaacaaaggaagcttagggaagaagaatatcggaatttcttaggtttgcttttatctcatttcttaacaaagtgacagatttctca

SEQ ID NO: 11298 - DNA, 560 bp, Oryza sativa
gagccaaatgagcccctgctactttacttagcggcgaccccccaagtagttagtgctttttttgttttggagcgcgaggaagacaaggcgcaggtcgtgcacccccattctgtggtaactaggcccgggagcgagcggggaggagaggcccccgagtcggacgggggcctacggcccctgacgaccggagccggccctctgcccgcttgtcagacggagctaggtgcccccgaccctcaggagggccccaaggccactgcgggaagggcgcacttaacgccctttgaccccgaggctaaccctgtgctgactcgacccgggaaagagcagggagaagaggccccccgagccgaacggaggccagaggcccctgacgaccgaagtgggccctttgcccgcttgtccgacgatgccaggagcccccgacccccaggacgggcccgaggccactgagggaagcccgcccctttcatcctccgaccccaaggtcatcggcacagaaaacaagtgcgccccgaaaggccacttgaacgaagaacgccccggggatacggccccta

SEQ ID NO: 11299 - DNA, 1336 bp, Oryza sativa
tgaactaacctagtattacatatattaattgtctcgatcagatttagtataatattaagatgtgtcacaaattatattaaatttgtttattttggaacagagagcctctgcgactaggatggacacagaggagctagccggcgcacatgcagtcgacggccaactacatctcggcaaaaaatctaatacaacactttaattatgttggctaacagaattgcccatgtccgtgggcctcctgatgtctcgtgcatctcttccttccacgattcttgaaaaaccagaggtcccagatgattatgattcatgatctgtgacaaaccgagtgttggcaataccaccgaatgactaaaagtggcttttgctagtagaattaagtaggtcgtgctttccgttttttcagatgatcaaaatccctttttacatgtggccaggtatatgcgaaaatcacatttttctacgtggctagtgcaaccgcgggcaaaaacatgcagtcacaaatgccgaccacctcaaaaaaaaaatgaaaaatgaaaataaaaatattccacaaaaccaaatcagccgaaacccccagcgcagcctaccgccagctgaaaccctaactctccaagccgacatcgtcgtcgccactaccaccaccaccgtcattgctgtcatcgtgttcaccgtagtccgccatcatcgtcactgcagcggtcaatgcctcttctgaggccaatggcaataaatctgtagcacccaagtccggcaccgcccgatacaccgtcgtcatcaccgtaattgtagttgtagtcgatagatccatccgtcccgttgtcattggggacagatctggacgccgcaaggtcgctagtggtggatccgcccgccccacggtcacaggcaatagatccacccaacctgcccaagccatgattgtcgtcgtggtcaccgtagtccagcatcgttgttaccgcagctgtcaacgcgccgatggcgacagatccaccactcccgagtccagcgctgccggatccaccgtcaccgtcgtcgatggatccaccagtctcgcagtcgtcggggatggatctagatgccacaaggtcactggcggtggatccgccagcctcgcggtcgctagtgactgatccacccatcccgaggtcgtcggtgatgatccgggcgtcgcgagtcgccgacgccagcactggacgcaggcagtgcatccggctaccccgctcccgtgcccgtgttgaagccgctatcgccactccctttctctcgtgagggaaccattgacgccgctgcctccatgcttgcgtgatggagccgtcgacgcaaccgccgcctttgt

SEQ ID NO: 11300 - DNA, 733 bp, Oryza sativa
gccccgtttggcgattttagccgacccgagcccccgagggcaggattgagcacgagtgacctatttcaagtcaagattcttcaaaatgaaaaaacagcacagatacagcctttaggaaattgaaactgcttttatagaaattcagatataagagaaataagaatatgcatatgttgtagcccccggccaaccctgcacgcccgaggggggtgcggggttggcgcgagcccgaaacctgacacccgaccccccccctcaggggtagaagcgacgaaggtgttcgatgttccacgggttaggcagctcagtgccgtcgcccgtggccagccgtatggagcccggccgggggacgccgaccactcgatacggaccctcccacattggtgaaagcttgctcaatccagcacgcgtttggacgcggcgtaggacgaggtcgtcgacgcagagtgatcgggcccggacgtggcgctgattttagcgccgcaggctctgctggtagcacgcggctcggagggccgcgcgccgccttcgctcttccaagtagtcgaggtcatctctgcgaagctgattttgatcagcctcgcaatacatggtagcccgaggagacctcagggtgagctcggatgggagaaccgcttccgcgccgtagacgaggaagaaaggcgtttccccggttgctcggcttggtgtagttcggtttgcccagagcaccgctgggcaactcctcgatcca

SEQ ID NO: 11301 - DNA, 813 bp, Oryza sativa
aggtaaacggtccggagcgtttgagaagcttaaataagggtaacgccttctctcccagcctcgatatgaaccgacttagggcggccatgcaaccggtgacgcattgcacatccctaagtttgctggggggcgcatccgctctatagcccgtatcttctcagggttggcctcaatgcctcgggcagagaccaagaaccctagaagcttgcccgtaggtacaccgaacacacacttatcggggtttagttttatgcgggcggagcggagactctcaaaagtttccgctagatctgagagtaacatttcctggttgcgcgtctttacaaccaagtcatcgacataagcctcaacattacgtcctaattggttacccaaagaaattcgagtagtacgttgaaaagtaggacctgcattctttaacccgaagggcattgtcgtataacaataggttcctatgggggtaatgaacgcagttttttcctcatcctccctagccatgcgaatctgatggtaaccagagtatgcatctagaaaacacaaaaggtcgcaccccgcagtggagtcgacaatctgatctatgcgaggcagggggtaaggatccttaggacatgccttgttaaggtcggtgtagtcgatgcacatccgaagcttgccgttcgccttgggaacaaccaccgggttcgccagccactccggatggatgacctcacggatgaatccggcttccagaagtcgcgccacctcctcgcggatgaaggcttgacgttccggggcctgccgccgcactttctgccggaccggccttgcgcccgg

SEQ ID NO: 11302 - DNA, 1151 bp, Oryza sativa
tggggagcgtcgcctcctcgtctacggcgacggcagcacgccccagggcgcgctccaagctgcgggcgcgctcctacgtcacccgcccatcgcccatgacccggagtctccagcccaacgttggctggacgatgtggccaaattggtcatgactgcacggcagcgcctagatgctggtgggcggtcctccgccaccaaggcctctggtgctgctaccaccggctccgcatcgtcaagacggagggcgcggcgagcggcagccgctgttcgccattcgaccgccactccttcgtcaacgcctccgacccgggaagatctgcgtggggaaccggatgctcgcatcagtatcgagcgccggcgtaatggccgacgtgctccccacgcaacggagggcgcctcctcgtccggagtgtcacctcaccacggacgcggggatcagccctccgtgcccccggttggtggtgtcttcggaatgtccgtcaccacggacgcggggatcagccctccgtgcccccggttggtggtgtcggctgtagagcctttgtggcgagccttcggaatgtccgttggcccccaaggtgccggcccaccatcgccgaaaaatatgacgggagcgtcaaccccaccgagtttctccaggtctacacgaccgggatcgaggccgccgggggtgacgacagggtcatggcgaatttctttcgcatggccctgaaaggacaagcgcggggttggctaatgaacttgccacccgcgtctgtccactcttgggaggatttgtgccaacagttcaccatgaacttccaaggcacatatccgcgcccaggtgaggaagcggacttgcacgcagtacagcgaagggatgatgagtcacttcgctcgtacattcagcggttctgtcaagtccgcaacaccataccatgcatccctgcgcacgcggtgatttacgcgttcagggggggtgtgcggcacaaccgcatgcttgaaaagatcgcctccaaggagccccagactaccgcggagctttttcagctcgcggaccgagtggctcgtaaggaggaggcatggacctggaaccccttcggttccggtgtggcagcttcggccacccccggatccgccgctcagatagggcggcgtgacaggaggaggaa

SEQ ID NO: 11303 - DNA, 1745 bp, Oryza sativa
  unsure (1)..(1745): unsure at all n locations
tttcacaccctacggaaagcaaatatctcgcacgaaatttttgagtcaaaaattgataaaatttcaaacattcttttgcaaaaaagtatgaaaatcatgaaatttttggtatctcagaaattcagataaaaaatgaaaatgggcaaccccatatatgtgtcatgtttacaggaggcagtgcaaaccttgttctattgtttaaaagatatgacaaataaggacggagccttgggttggtctttgttcttgatcgtgtgccttcttcggtcctatagtcttctcagagattatattttctatagtactagtggaaataggtttagcatatcttcggtcctatagtcttataagagattctggtatatctttaatactttattcttattgtaagactatatagttgaattaatagaattatcttctaaagtgttcataatttatatattgctttagtagttatataccttattaataagatatacttcatttatatatttcacttgattagattagtcgatctatgctacggcaacgatcccatgaccttgatgagttgctctaactctaacttgtccatccgaatggtggaagtcctgaggagttagtatcactatttactagcataagcatagtgcttaggttagataaataccgtttgatgtgggtatgtccgacagaaagtgaggtaggcagcaggtggtgatagccttgtccgtcccttgtattcatccacgtccgggtatgatataagagtgcgtaaatgctaggcaaaatttgctacaggacattcaaaaaatatgtaattagctaagagacaccataaaatcgtgaaacggctgaaagacactccaaaaatcatgtaatttgccattggacactttcactattattttattattttcggaacaaatggagggacaaacaattaaaaaggaccaaattgcccttgaggccaaacttaggttcaagggtggtggcgatggccttgaccggtggcgagcgtcagtggaaggcggtggaagaagagcatcttgcagcaagtgccaaagggggtcgagatggcgtccaggtgagctaccatgctccgcgcggcgaagaagaggaagaacaccaccttggggagcgagaacgcccatcacaacgtgtggtaggagcgcgcgtcggggcggaagaacaacgccgagtgtagtagcagcagccacgagatccacggcgcgaagagatagttcatggcgatgtgttgcctgaactcgatcggcgcgcacggcggngaatcggaggaggcacagcgccgnctagagcgcgcacagtggcaccagcttgagcagcgccagcgacaagagcagcacaaacgccgtgaacggcagcgacctcgcactaccaggcctagcgcccgctggtccgtcgacaagtcgctcagcgtctgccacaacagctcctaccccgacagcgccaggggtccacgtaccatgcggagttgcgggacagtgcaaggacatcgggacacgatgctctaccatgcggcgctgccggcgcacgtagtgaccaaggggtccacgtacacgagcactatcatcacactaaacgagcagcaggaataaataaaaagacagtgaaaaaaagaaaagggcaaaattgacatttcacatagcttctctctcctcagctaggtgtatatattattttattgctcatagtgtccatcaacaaattacacattttttatgtgtctttcagccgtttca

SEQ ID NO: 11304 - DNA, 2893 bp, Oryza sativa
cagcgcgactcaccggtgtgcgaggagataggcgctccggtgggattccagcaacgtgagtcggcggccgggaaagctcttgcggcggcgaagctaacggcggcggcggcttggcgcggcggcggccctagcggcgacggtatgtggccggagatgagcggcagcggcaaagctcggcgaacgcggcgcggcggtggtaggaggcacgggaaagggtggcgagagtgggaaacgagagagggggctcgggggagcgatttataggtgtgagagggagcggacgaggccgggaaaccaccctactgcgccggcgacgtgggaagatgggaagggagagagagaggggattcaaatttgaatcccagtcggtgtggggcgcgcgcgcgtgcgggggaggtggaggagtgggcggcgacgtgggcacgagcgcgggagaggcgcgggatgggcgtggaggagcggcgtgggcggcagcggcggttgctgccgaggcacgggcggcgagaggttagggacgacccgactggtgggccccacctgtcggcgccccaagggaggagaggaggcggcttgggccggcccagcaagagggaggggcgcaggagagagatgggccaacggcccatcaagagaaaaaggaggaagaaaaaaaagaaaaaggatttttcctgggatttatattgcaccttggtgattttaaattggttaaaattatttccaaggctctgaaaattccactaaaaatcttgttaatgcattagggcatggggaactcaagaaaaattccaccacgccatttctgattattaattgcatttattaattagggattagctctaggttcattaaacaatttcttcgggcaatttattaaacaatttttaaagcaaggaaaaggggaaacttcagggcgtgacataggataaggcgccgtggtgggccgagggggaagatgaggatggcgatgaatcagagggggaggcggtggcggagtgcggcagcgcgagcgtcaggttaggggcggcaccgatctgggcgacggacgggacgggggcgcgggcgcgctccatggcaatgtgcagagggaaggtgtgggaagaggcagcgattgatttgctcgcatgcgtgattttcggccggtcaccccgcgtgcgcgcaatctctctcccacagtgtgaccccgcgtgcgccggtaccgttggatctagaagcgttggatgatttggaccgttagatttgatgaatgagtaatgtaggtgtaagagtgagttggtgaattatagggtagatagactatagttcgatttttatattttcctcaattttctactattaatgtaggattttctagacaatgagagtactaaacgtggaggcttctttttctattaatttattaagttaatagatttctagtatttattaaagtaccatgtggtaagttaggagcgtttgtaggagtgtcatatggcggtttaggattatttgtaggaagtttaatggatttctagtatataatagatagatagactagttttcacgagccgagctaagccgaatcggctcgttagccccccttacatgcgcgaggttgatccgacagctaatggcagtggactgagatctattatattattaaaacagccttgaaaggaggcaccacgttcgctgtggaggctaaaaattcccacattaatcatagaaaaagaaaagaagaatccaaatagaaatacaaatataaaaatagctaacattcggaattaaaaatatgcattattgaaagaggagtccatatagcaacccaatacatgattaattaaaactcggaataaaaataaaataaattttgaaattagaaaaagaaaaaaaaacaagagttcgagaaggaatacaatttaaaaatatcttaaattcagaattaaaaaagtccatacaggaatccaatacaagattaattaaatttccgaataaaaaaataaaaaacaccgaaattagaagaaagaaaagaaaagaagagttcaagtaggaatactgtcagggttattgataccacatacctaatagtagttgactaaatctcggcaggacccaccacataccatgtcttatacggaaaaaaccttcggatataggaggagttccgtataaggaaggatgaatagagttctacatgaaaacgacaaggactactcggattgtatctatattggtttccctagttctacttagacaaagggacacctatgggtataaatacaaggtcccctaggaggagaggggacacagaacaatagatcaagacacaagatcaacatacaagccaacatgcgccaagacaagacgccggatatcgacttcagagataagcatagctagtcccctacggtgtctacggatactatcaggagagacataacgatgtctttgatctcgccggatgcagattcgaggaggaaggctactctgttgtcgactacgagtcagcacttcagaccgccaagtcgacaacagttatataggctaccccaaatattgtactggtgcgattttggtgaataagagcaacgaccggcttcggccaacaggagtagggttattacctgacaattcaggggcccgaacctatataaaaatcctcgtccccatctcttttacctaagtctcgcatatatcctggtaccaacgatccccatactatgcaaataccgtagtcgtgacatcaaacgtcgacaaatacaatttaaaattaacttaaatttggaattaaatataagcaatattgataagagtaaatataagaacccaatagtagattaattaaaaaatccgaaatttgacgggccgtagaggagtatagttgcatcgtttgacgggacttctaaaaattaataat

SEQ ID NO: 11305 - DNA, 3793 bp, Oryza sativa
aaaaattaagaataaactctaaaaactataaggtccaatttttaaaggtttggaacttctaaaaaatataaaaaaaccaacgataattatgtttgatttttaaaatagcaatggcaataaagagaagatgcagtggacggttgtagaggagtataatggcagcatttaatgggacttctaaaaattatacaaaagaaccctaataggacgataaactctaaaaactataagtttttaagatctaatttttaaaggttctaagaagaatgaatagaaacggtggtagatcaagcaagctaataaagaataatatgacagaagtaagtggtagcaacttatgtgacttttaagaactataaaattacaaacacgaggatgataagatttggtctttcaaaatctcaagatatcgagataaatttttaataaatcttaagtaaaatcatattaaaaaatatataattttatatgggtgctagccgcgcaattgcgcgggcagtttaaaaaactctgtcacgtataaccagccccagacgcaaccacggtggttgcatccaagcgaaggatttcataattaagtcattaatggccaatttggctctaatgggacttgttaattaattttctcctgattcttgccagctaaacccaccatcctacaccttacccatgagagggatgggatggcatctcaatctatgggcgccgggcggttgatgaggcagacaaaactgatcaattttcttttgttgcattgtgaatgagcccaagctagtagaaaaggagtcatccggacctcgtctgaagtccgggctcctgcaggcagcattatacccatcaatacacaaacccaatcaaccccagcaactttccgggccatcggacgagctggtccatggaggcggccgtcggcgtggcgagctggctcctcggtaaggtgttgacgcaattgtccagtgacttggtggcggcgtacgttgccagcaccgagctaggccttaacgtggaggagatcaaaagggacctcaagtacacacaagggctattgcacatggcccaggggaggaaggacatcagggacaacattggcttacagggccttctgcaggatctaagcaagaaagccgacgaggccgaggatgcattggacgagatccactacttcatcatccaggatcagattgatggcacccatgaggtcataccggaggcagatggtggcctccgaggtcatgccctccacggccgccatgctcttcgtcatactgccggtaactggttttcatgctttttttgttcttctgcacgagcacgacatgatgccgacgactcgcaagatacagccaactcccatggtgacgtcattgaccaggttggcaacttgccattcaatcgagtagacatgtccaataaaatcaagtcagtggtaaagggcatacatgacttgtgtacgtgtatatctagattgctccaaattaaccaaactgcaggagaatgggatacatccctggagcggcctcccactagctcaacgattacgcaggataaattgtttgggagggaaataatctttagacaaactcttcatgacttgactaactgcaatattccgagtggaacactatcggttttgcccatagttggccctggaggaattggaaaaacaactttcgcccaacacctctacaatgacaaaagaacagatgcctacttccctatcaaggtctgggtttgtgtgtctactaatttcgatgtgcttaggctcactcaggagatcctaaagtgcatacctcacgataaaagcgcgggaagcgaagcggtgcataactcttccaatttggatcagctccaaaaagctattgcagaaagattgaaatcacaaatgtttttacttgtcttggatgatatgtggaaatgcggtagtgaggcagagtggaaaaatctagtagctccattcacaaaaggggaagccaaaggcagcgttattcttgtcacaactcgatttccatctatagcacaaatgttgaaaacaaccgagacaatacaactgcagggtctcgaggatagtgaattcttcacattctttgaagagtgtatatttggtcaagacaaacctgagtgttacaaacgcgacttgattggtattgcgaaagaaatttcaaagaaattgagaggttccccactagcagcaaaaactgttgatcgtttattgaagaacaacctttcccatgaatgttggacagaagttctggaaatggatgagtggaaaaatctgcaaagtaacgttgacattatgccagcactaaaaattagctacgactaccttccttactatctaaaaaagtgtttttcgtattgcgccctttaccctgaggaccaccggtttaataatttagaaattacttgtttttgggaagcaataggcattatagattctggatatcaaaacgatagagctgaagcaataggattgaagtatttggatgagctaataggtaatggtttcctcatgaaggtaactgatcgcaatagtcagtattatgtaatgcatgatttgctacatgagctagcacaaaatgtttcgtcacaagagtgcataaatatagaggagttttacggtacaatatacttgcaatatatacttgcagtataaataatctaacggtgtggattcatccaatcttctttttacagtataaactagcatggtggcccgtacagattgtgcggctagtatcattatattttctctcatataatagcacatatgttttctcattatattattcaaatatattaaaatgacaacataattttaaattttgcaataactttacgaaatcactaatgtgtaatattcatattgtattttacatacgtgttagttattaattatttttaatattaaattttagttatctgtaaattatatatattcttcctatatggactttagactcgtcttttaatatttattgttttaatttctaaattttcattatttctaattgtatttctacgtggactctaaacttaattttaaatttcagttacttctaaattgtattcctatattgactttaaactcttcttcccatgtttttcttaatttcgaattttagttatttgtaaattatatttttatacggactctaagcactacttttaattttattatgtttattccgaattttagtatggactttatactctacttctaatattccttatttttttaattccgaatttctattttttttcttaattgtatttatatatggactctactctacttctaatattccttatttttaattccgaatttctattattttctaattgtatttctatatggactttatactctacttctaatattccttattttttaattccgaatttctttttttttcttaattgtatttctatatggacactatactctacttctaatattccttatttttaattacgaatttttattatttcctaattatatttttatatggactctatactcatcttctaatattccttatttttaattccgaatttcagctattttctaattatatttctatatgaactctagtctcctcttctaatattctttattttttaattccgaatttcagctatttctaaattgtatttttatatggactctgctttttctttttctccaattaatgtgagaatttctaggccatgagagcgaacgtagaggctcatttttctatttctttaataatataatagattgtgaagggtatatttgtctttctatattttt

SEQ ID NO: 11306 - DNA, 1560 bp, Oryza sativa
catcactggttggagccgaagccggcgtagctgactgcgggaaccgtggctcgggacgcctctactgctgctgctgccttggatcaacgccgggtgctgctggaactcgaggacctgctgacgaacggctgcgcgctcgccgccgtcggcatcctctgcttccttaccgcctccccaccgcgacgccgcgtttcgccgactcgccatcccacggtgagccctcgcgtccgtagcgtcctctaccctactattagctagcctcggttcctattttagcgattagcacccatggccgtgccggcccggctgctgttccgccgccggcgaggtccccgtggacatgctatcccggaggctttcccttccatcttgttaggaaaaatggaatcaccatacactgtagaagctttcgcacccatcaatttggttggaacctagccctaccgccctatccccttgcaccccggagctcggccatggcggccatgccgcgccgctcgcccccgcgccgtcgtgcgccgtggctgccggcgggaggtcaccggagattcgcctcatcctccccggccgcctctgtgccggcctcgcgccgtcccggcgtgcgcgctaggcgcatggcgcggctgcctctgcctggcgagaggtagaagacgacggggaaaaaaagaaaggaacgagagagagagaaaccgtgtggggcccacatgtaattagcacacagtaatgctctccctaatggttattagcccactcaatgacatgtggggtccctgttattaaaatctaagaaaacttaattatagattttgtgtccatgacagaggggacccaccggcaattatatgaccggcttgacctcagtcaacagggggccggacccacctgtcagtagcacatcacatttcccttagtagaataaagataaagaaaagaaaataagagtggacctacctgtcagtcactaccacttactgttaacgctgcaataaaaataaatcaattatgaacagtactgtttcacaattattggaattaattcaaatttgaatctttaaactagcataactcactcattttaactcggattcgaatgaaacttgaacctaaatttatctaaaatcaagatctaactattggtaccactttatcaatttaatttgtactgtttgaatttttggtgattttatttgaattctaattgaattcaaatcaaatctttcgcacgtaaatttagattccgaaggagttgctgagttaatcaaagatccgggtcagcaaatctgtgagcaaggcaagtcatcactaatctttgagcatgttggacctattgcgaacttattttgatttaaataaagtttgcatgctatttatatgtgaatatcctactttgttatatgccatacctttgatattgattatccatatgtcggtgacatgggatcaggagtatcatgactagaggtttgaggcagacacaatcgcacacgtggcctggtacccccgagggacgtcgggcccgagggtgatgcgttcgccctcctcttagtccccccgaggggg

SEQ ID NO: 11307 - DNA, 1150 bp, Oryza sativa
ttacaggcaagatgttgtgtgaagaagggcgagcatgtagattgctaagctgacacgtggtggacaagaatgaccgtcgtgactggtctgataccggtcatgttgtcagcagccagccccgattccacgtcgcacctgctcccggcgaaagtggaggtagttgtgggccgtctcatcagaaggtgactcggacggcaactatacaaatctccgtccatttatgaaaagggggggggtaagtccccacaaaaaagagagaaatggtgcatgtggtgtccccttaagatataaaaggaggaccttgcccactgagaggggggactggacttttccagattagaaacccagaacaagggagaggctggctgatactttgtagctccttcatacacagatctcccaaaacacaggagtagggtattacgcttctcagcggcccgaacctgtatacatcgcccgtgtcttgtgtgtttcctgtctcgcgagccttccacatacagagagcttagaatctctccctgagtccccggccgaaccggcaaaggggggcctgcgcggtctcccggtgaggagccccacgctccatcaccatataatctttgtaatccatgatatcgtgtgtctttagtcaatatttgacaaatgcttagcccatgctaatttagattcatgcatattcatatttatcaaaatgctttatgcttgggcaattaccttagggaaggtaattgacatacggcatgtggagacatgagcgccacattgctatgataatgatgagatgatttgtgaaagaaaattaaactaaacaaatgttttcgactgaggcggctggaggacttgggtggtgtccggtaaaggctagtgccgtccctggtcagttaaggaccgagccatgaagttaagcatgaatcgaccccagtacatccgtatttctcgaatgggtatagacctagcggagtagatagccgagcggaggcagtatccctgcatacccgaaacaagcagatgtggacgaacaagcagtctactggcggatacccgaaacggatggccaaatggcggatacccgatacggatggccagagactgacttgtcaagactacaagactacaaggagataaccaaaagaggacagcatggattggg

SEQ ID NO: 11308 - DNA, 1789 bp, Oryza sativa
ttgcggcgtgcctgctcctcctgcgctgcctcgcggagggacaggttgaccgccagctgttgcgccgcggcctcggccccctcgagagctcgctcccgttcggtgagcgcgtcctcgcggaggcggagcgtgaactcttcttcggcgcaggcagcctcgtgcgccgccagcgttgctcgcggcctcgcggtccgccagatccctctccacgacgcaggcgcgctcttccagcgccatggcgcgcgcctcaagggcctctttgcgccgccgggacgccgcttcggtctccgccgcccgctgttctcgggcagcggcagcgtcaagcaccccctgggcggcgtcgagcttcttccctagctccgcctcccagctcccgtattgaaggcggagggtgtcctgcgcctcgttcatcacggtggtggcaatgagggcagccccccgctcctcctccacttccttggcgatctccgccagcaccttcttacgagtttcaagctccgagacgtgctggcggtgagccttacggcccacctccaccatggcctccaccgagcgtcgcccctcttcgacacgcgcccacgcggcgtcgagctccgcccgctctgcctgcaggacctccacctgggcacttaacccatccaacaccgtggtgtttgcggcggccaaggcctgcagaaggggctctgcgttcagtagggcgatagaaggcgtggggaagagccgccttggagaggatgccacgcggctcgggccgccgatggaagtgccggactcggggatgtcccccggacccggttggtcctgagcgtcgcccgagggagtaggcccaagcgacgcgcccgcggcctcgtcgccagctgccccggaagttgtcgcctgagtgtcgcctgagggagtgggcccaagcgacgcgcccgcggcctcgtcgcgagctgcctcggaagtcgccatcgcctcgtcctggcgaaatccggcctcctcccgagcggtttcctcggcctggcgagcccgggcggcctcctgggcggcctcctcggcttcccgtaggcgatccgcggcctctcgccggtcagattcccgcctgagggcctctgcggccgccggatcctcggcctcagactggccggacttggaatggcgggagggacgcgacgggatctcgctgacaccaaagaaaaaaccagaagactaacaagatgggtgagtgaaaactcgcgttgagagaatgaatacagccacgatgggtgagagacgaacctgcgagggggtcggttaaacgaccactttggaggggaaatgaggtttccccgagatggttctgtctcccacatcttacggggccgcttcttcttgcgctccccctcgggctgcgatgttggcgcggccccctccgggcgcctgttactggcacgcgccgccccgccccctcggggaggagatgggggaggtgttcctccctgcttcctcttcccccgggcgtcggcagggcggctgctccccgggcccctgtcgcgggacccagaagcacgaccccctctcggggtagattgttcccccctgcggctcccgcctgcgccgtcgtggccctttggagctcgctcctctgaggccccgaccgccatcataatggtcaggatggaggcgcggtctggatcgctgcagagggggaggattccttggggaatgagggccgcctctacggagttgagattcagcacccgttggaccaatatcttgaagtcctcaggagcccagtcccatctcactccctggtgggtcctcgtgaagt

SEQ ID NO: 11309 - DNA, 3145 bp, Oryza sativa
cattggaagatactgaaggcatggagttttcatatcctgcagtgatccagaccatggatgatctcatacatatcacgtacacatacaaccggacacaaattaaggtaatctttctgatgcatattcaaaagaaaatatcgatcttgttttccatcaagaacagttttctgcccgttagtaccttttttaatagtattattgaatgattcacagcatgttgttcttcaacctagcgggaaagtgaggtggtgagtgtgcaactattgggagagttattgctgccaattgcaaggcacgcaagtttttctctatgtgtgtcacatcatattggctggaccgtggtgctaaattggtcatcaatgattctttttttgggtatatttggtcatttgcataatttcttgcaattgtaacctaattaataatctccctgattcctatcaacaatgatattgaacatctgtacatatgccccaaagtttaacataagttgttccgtatatggctgttcttcatgttcatgttgtgataacctaagatattactactttaactgagaacttgagatgtcccttttgctgtgatgcaacttccagaaaataaattatggttatcttgataaaataatatatgtatcaagtttgctttatttaaaaagaaagacttcattattgggcaccatagtatgcttgaataatgatcctctagaaagcagatcctaaatcttattacattatcatccaggtactataatctttagccttttattttctgaattgagcttttcttgttagtaccacaatgggttggaatatagtaaaattcttgtcttgactcttaggccctgtttggatcctccaggctattaaatagccctccggaatcttgctatttaggagtattattaaacgtagattactgaaaaaacccattccataacccctagactattttgcgagacaaatctaacgaggtatattaatccatgatttgctacagtgatgctacagtaatcatccgctaaccaaaactatgaagaaaaggaaatgtctattacaccttgatggatttaacaaaaactcggcctctggtttagggttgctagcagattttgggtaaacagtaggtaactgggatttttctcgtaacagagcaacagaaacagcatttcatgattattagttgttaaggaaccataatcatggtcagtatctcaaaaccaacactacataagaaaagacaaaattatacacacatatacaagttctgaagttcattgtccccactgacacaggtcacagcaaccaacagggaaaaaacattttttttatagatagccaacatcttgtgaaaggaaccttgtatataataagcacccatgtgattctacagtaaacaaagagttgtgccagttatatcaagcatttgtgaacacggtaggcaccattctcttgttcctctctgtgaagagatcttgaaatttacatgtgaatttgtgatctcgtgtactctttatgaaatatacttgcaagttgcaagttactctgacttgtggcacttgatctccctatcaaatttctttctctcttgctgaactcgggcttgcagtttgacctgcctactctcagctctcaggtatgcctcattcctcctaagatgccatcccaacccttgctctatgttttgtatgattagccaatctatcctaagatgccatcccaacccttgctctatgttttgtatgatttgccaatctattctacttatcttatctctattcccaaatagtagcaataagtcaacagattgttccagctgaattctgcttttgtgaaagataaaagaatatggatgtcaaatgctatgatgtgaaaatttccagggtctcacttcgatgctgggaattttttttagataatggatgcttcaatgctgggatagaataatctatcttgaattttatttatgaacttccttcctgtaaggaaactggaaatgcatggggaaagacatacaagtgaaacagtgcctactatacctgcatcaataaaaactgtaaatagaccaggttgtcttctctgcctgcacaggggagtaaagaccacggattaatccttcatatccaagaaaagtgtgacagtgtgtttgaaggatgaaatgtttttttataagaaaaaatctttgtgtacaattattctccttttggcgattcagaaatgaccaataagtggagcgtattgagggaagaatttacattttcagaaggcaacgtacctttcaaaacctgccatgcttccacaattgttgaggtatattatcatccaaactttgttctaattttatttaaattttcttttgatggattatcttctctgtataatgtacctttcctggtcaggttcagaagaatatgtttctggtggcctactttgggggaacacaggaaggtgctgacgatgttaaaatttggctacagagatattacgtatgttaaagttcctatttcctgacggattattgatcttccagcgtatctgtgtattgttattgttcacttgatacacaatacatttaacaatttcacctaatacagaatggctcgtggcactctcctgaagtagttgatgaagtgcccaatgttcctctgtggaaccctgttctcttccagcttccttctggtgagatcctccttttctacaaggttggcaagactgtcgaaaggtgagtgatccattcccatatctgcattcccagcaattaataccccagttaaatgtctgcaccaactgttcagctgaatttgacaatttttgtttagttggagtggatgcatgaaatgctcatcggatggtggtgttatctggtcaaagagagagcaactcccacctggtatccttggccctatcaagaacaaggtgtgtatttgttccagacttgatcagtattttgacactgtcacataacactacgattattctatggacctgcataccttctcatcaacagtgtctcccaatacagcctttcttgctcaaggatggccacctgctctgtggaacatcagttgaaagctggaattcatggggtgcttggcttgaggcaagtcagctgtgagccatcagctgcaactgttcttcaatatctc

SEQ ID NO: 11310 - DNA, 2338 bp, Oryza sativa
  unsure (1)..(2338): unsure at all n locations
aggtttgatgcagtcagtaatcagacatgtggatttgtctcaggagtgaagtttgaactgtaggattggaatgtggaatgtggcaaccaagtgcatgtccagttcgttttttatgggcctgttcactataagctaattttcaaccttaccgaagttcggaaagctaccataaaagtggctacatttagtatgctaccaaaattttggcaactttagtaaaattttggcattgccaaaatttggtaaggtttttttnggcatcaaagtgaacaggccctatattttgcctacatgcttgttcagtgtttactggaattacccaatgacgattgttaattccttcttgacaatctggcaaacatcactcttgtgctgtgttctagtacgtaaataagtgaaaggtgaaactgttgcatttttcagctattttctgattctgatcagcatagccacgttattttgtcattcaaaatagtgataactcacaccctcaagtagccttttttacttatttacccttgtgttctttttttacttatttacccttgtgttctgttggaagtgtctatagttctcagtattccttcacttgttttgaatttcttttctgttcaaattaaacatttaaactagcctacctctagacttaccccagtagaatttctgagtcccatcgaaatcttcctttatcttctctccaactcatctattcttttcctataaaccatcgaagacaacccgatctaaactacaatcccaaggaacactataatcatcgtgcatgctcgctcattcatgaatcttgcgtttaaaataggcgcgaaactttaaccaagtctagtagtttcgaccaatgttttaagagcaagtttaatagtatagctaattactagctccaaatcatctatagccaatataatagctaattcatacaatagttgtttactataatattaatacatggttacacctgtcatacacacattatatctttactataatattaatacatggttacatctgtcatacacacattatatcttagagttcgtgctgcagctggctacagatatgtaacccgctacttttctctctcttcttttatctttttaaaatatgtttatagttgacttatctgctattgtacctgtttaaaaaagaatcctttagtttagtctccttgttccactatcaacttataaagaataaaagctaagcacggtagttaaaagttcgacgtgaaggcatttactgaccgccaggtgctccgccgtcgtgtcgcacaggcagcgccggcgacccagattcccaaaacctcgtcacctttctccgccgcttaccaagaacaagaacaactccctctataaatcgtccacacgttaaactgtccgtggatctcgccgtcgccggcgacatggcctcgtcgcagcaggcggtgcgcgagacggggaggggcagggcgtcgtcgtcgtcggccggcgggaggaaggtgaccttcggttaccacctcgtggagggcaagacgccgcacggcatggaggacctccacgtcgccgagttccgccgcctggacgacggcaacgaggtcggccggcctcttcgccgtgttcgacggccactccggcgccgcgacgtcgccacctacctccgcgagcgcctcttcgacgacatcctccgcgagcccgggttctggaccgacaccgcgccgaccggaaggtgctggtcaggacggcggcgacggcgggtcgacggcggtgacggccatcctgatcaacggcgagacgctggcggtggcgaacgtgggggactcccgcgccgtggcgttcgacgtccgcgcggggcgggcgcagcagctatccgtggaccacgagccgctccgggagcgcgacgccatcgagcactgcggcgggttcgtgacggagatccacggcgacgtgccgcgcgtcgacgcgcagctggcgacgtcgcgcgcgttcggcgaccggcagatcaaggagcacatcagctccgacccgaacgtgaccatcgaggacgtcggcgggcgacgccggcgatggtggcacggagctcgtcgtcctcgccagcgacggggtgtggaaggtgatgtcgaaccaggaggcggtggaggggcacggcggacgcctggaaggcggcggcggagctcgtcggcgaggcgctcgaccggggcagcgaggacgacatcgcctgcgtcgtcgtgcgcctccactgatcggagcatcgtgttcgtggcatgtgtacgacgtgtctcggaaatgctactgtgcgagcgatcgcccttgctcgcccagggcgatcaaattcgcccccccccctccat

SEQ ID NO: 11311 - DNA, 2282 bp, Oryza sativa
tttacaaaccaaaagtttatatattcgattcaaatttgaatttgaattcaaatatttttatatatagtatttctatatatctaaagtttatagacctaaagtttataagttaaaagtttatatacccgtttcaaatttgaatttgaattatatctgattcaatttgaattcaaatattttctatatatagtatttctatacatctaaagtttatacacctaaagtttatacacctaaagtttataaatcaaaagtttgcatacccgattcaaatttgaatttgaattcaaatattagtttatagacctaaagttttataagtcaaaagtttacaaacccgtttcaaatttgaatttaaatttaaatatttttatatatagtattttctatacataattttttttcaactttgtttttttatttttttaaaaaaattatgatgtagtaggaagagaagaaggggaggaggaaggaaaagagtagtgtatagaggggagggggcgatcacccgcccattagcacccccgacgtgtcttgtcagatcgtgatttgctctgacgcgccaaatgctaaaaagctcagaaatatttcaattttcatgcgagatttcagaatttttcttacagcgattggcagaatagagaaacaacatactggaaaattgaagtcaaaactcaaagtcgctctgaattcttatgttttgacttcaattcagaatgtttcttacagcgattggcagaatacgcaatctgtatccatggagcctccatggaacataggaattttcatgttcacagttcacacgtccattactttgaaattcctccattcaaagaggtctgactcgacgaggacttgtaatattgtggtatgatgtttgagatagatttcagctcaagatgtttgagatagatttcagctcaagtaaaacgagaaaatgattagttcggttcattaagttttaaattttacaaaaaaaatatataattaatattctaaaagaattttttaaaagaatatcatttaatattcttaaatatgctgaaagatatgtacttaataatgcaatagcaaggggagtggttggagtggtttaaacacgtttaaaatttcttgttataatgtatttggagtgaattctctctcaaaatcttttttttctataacggattataaacgtgctaacaaaaataggaataaggatgtaatctgcatctgaaacgaacgggcctcgattctaagccaggccgaaacaaagaccgggttgacatgggcttccctcaaggcccaacagaacaaaggaggcccgttcaggcccggcccacgccagcagcgagaaccttccccaaaaaccgtagaaccataacccgcagaaggcaaagccagaagagacgacgcagcagacgccgccgccgtcgttcacgagacccatttcgccacccacccgtgctctccctcctctcctcgtgctcgtggtgggtagggggactaggatactgctagggttttgcgagccatggcgtggaccgccgccgcagccaccgtcaccagggccgccgcaacgccggccgcggagctccgcctgccgctcgccgccggcctcggccgcgcctccttcgccgtcaccggccgtctccgccgcgctgtctccgcgtccctctccaccgccgcggccgccggtacgcatcttcttcttctcgaggtagcattccgttcgcctactgggactggggagggagtcctgctttgttctggccaagaagagggcgtagtagttggggattttgtttgtggccttgtgggggtgttctctctttcatttcaactatatccctgtaaaaatgctcaaaatatcgcatttctagattgttatataatcgattagaggcagccttcagatttttgacaaggcaagcttttggattggattcgtttgttttgttcacataacaaaaaatattgccaaaatgcagggttttctcttatttgtggatgtagatttgagtcgctaataattactagtatactggttaatctctattgagagggcagaaattcagtgtggtttaacgtctacatctgatgtactaaaagcgagcgtgattggctagcgcattgggagtgcgagcttagtcagttaaccacaaaaagtttacatattcatgattcgtgaaccactggtttggctgggctgatagtgcgcctgatggcagcaatagataactagtgtattgcttaaacaaatcacacaaaatagtgtccatttgcagggctgcaggaat

SEQ ID NO: 11312 - DNA, 2514 bp, Oryza sativa
tcctgcaccccaaaattgttcgtcagtctctcttgattacttgttgggtttcctaatggtgtttgcctactcaattactgctttaatagaataggatttttcgggcatgctataagtctataacaatggttctcaaatattataattagttaaaaaggaggctgttcagacagagaaggccccggcagcattaggcccgtattctcaggccatcaaagccaacaatatggtctttgtctctggagttcttggcctaaaccctgaggtttgtccctcaacatatgttttgtgatccttcacgtatctctgcatcataaatgtatgccactttgctggttttaggtgccagtataactgatatagagtaacttctgtctccagactggaaagtttgtatctgaaagcgtggaggagcaaactgaacaggttaacactttgaccttcatttatgttctgtgtagttttgagctctaggaatttcttgcagaatgtggatggaatggttaatagtgcacctactgcaaaatataaattttctgagttgttcccagtatccgcatccatttttgaagtttcccatattctatattgaagtttgtgctgacttttatttgacttatactgaggatgtgtttgtgttttggtaatttctatggaaagaatttgcatgttaggttagtgtttatatgaaagtgtctgcaacaaattcgaatggtggtccagactccgcatcataaatcctgtttttcctgcatgcctctccatagctgcctttgccttcaataaaacagttgattttatcaatgcaattttcggaagatgctctttcttacatcatgtttgtgtttctcgtctgtcacaggttatgaagaatatgggtgaaatattgaaagcaagtggtgctagctactcttcagttgtcaagacaacaatcatgtatttacctgttctttaaatgaaactttgttttgctctaagttattatgatctctgtgacggaaattttcttctatctgcaggttggctgatctacaagatttcaagaaagtgaatgagatctatgccaaatgtaagctcaaaaactttgttcgtccttagtagtactaccttttatttggcctaagtttagtgacattcttgaaacgcattcatgctaatgtttatatgttcaatatttttgccgtgatctctatattttgcttctgaagaattttgcaattcttacttgcagattttccagctcctgcaccagcacgctcaacttaccaagtagcagctctgccgctgaacgccagaatcgagatcgagtgcattgctgctctctagttacctgctactgtctatcaatcaaattgccaataagcattctgtggtgccgttctagttggtcactatcctggaagaatgcactgccattctgaacctgatcttgtagtaccaattaagatcttgaactgcctgcaataaacgttgatgcccaggaaaaaagaagtcccatctgttgtccaagggttccctttaatctccatcatgaattgatcatcccaatggctcacagtgctatgttgcagaggtctcctgctgcaatatctgcaagaattggtcttgccaagcgtcatgagtctaataaatcattaaaaggtttatcaacatgatgtatctccatgttactatcacatatccacatattgacaccaactgagtctgacctggcatctagtatgtttatattaatttatcccactcaacgcaattcggctgtctagttggcgagacagcgattatcgagtagataacgtatgaaagatgagtttacactggcttcttccattaagaaatgactagcaaaatctacagtgcatttctttataccggaagctcaaaattttctactgatatttatatattaatctcaatttggtcgtccttccaaccaagcacacccttacactcccattcgttgcaccgtcacatttcttattctataaatcgcgacaaaaaggttggcaaagggtgttcatatttcccaaattgattttgtgcacgtcctattctcatcccaggaagcatgatggcaacatgaagccaggataaactggctttatttcttaataataataaaaataggttatatcttcggcctctaccattagacacacagcggtcgagtcattatgattttttttttgttttgcatgatttgtagtagcaaaagcacattggtttgtcagcttatctattcccagttcgacccagcttcgcgtaggagacacgtgaggcggcggccacttctgagaaggttatgggaagcttccgtgcggctgcagaggctgtttaattgtgggggtgacaacactgtgatgctttcgtgtaacgataatgtcgacaccttaatgacatttttactggattagttattcatcccagggatatatattttcttttctgagaaattctatggtacagttcacaaatcacagactcacacactttctttgttgggaccgtttggaa

SEQ ID NO: 11313 - DNA, 2972 bp, Oryza sativa
tccacccgccgtgcaccgcatttctcccaagccttgcgggcttctcttctctcccatcacactcgaggccacgcctccaccgccgccaccacctcctcctcctcctcgtcggcgtcgccgccgccggcgtcttctccacctcctccgcgccgcgctcgcaaccaccttccaggtcagtcagcgcggccgcgtttcgtcatgcttttggaccactctgtcgtagcccgtagcccctagccccagtaggcggcagtggtggaacactcgccgccgccatgattttttttttttttttttgctcccgggtaatgtggtgcgctggctaattaaggagcagttcgaggttgggggggaggagtagctgaagagttgttgtgttctaggaagaggagcgtgtgggtgtgcagtgctagtagaaatcaggccacgcagattagcatccgctgcgttcctggtcttttagcttgatgatgagctattgcagctttgaggaagaggaggtcccgtttctgtggaaggaaatttcggtttatggaactgtgttccatggcgtgggatactggagtgtttgggggaagattgtgatccaactttgtttttagtgatggatgtgatgtgctcaggctcagcaattaggaaaatacattgtcaagtacagtttgttattctgccaatttcaagtaagtatggaagcagatcagagagaccaggaggtccatgccatttttttacttggatttctctgattgttgaggaaaccagatggctagctttgtttgttcgtcagtacaaattccttctaattgaaaattttgtggttcttgtttctgtttgatgcaactatcttgctttctttcccctgcacattgcattgtactgacctgtttcttttcattccattctgtagattggatgggactataactgaaaccttctgtattaagcttccgcgagggctcacctgcagaacgtgatggtcaccatttactggtgcagcaggcaaaaagttgcatggagcgctacaggctgtacacttttgatttccctgctgttctttttctctggttcaccgcataggatcctcttgaacaagaaacctctcaatttcaaaacagcaccatctaggttattgcgtgagattagcatcagttcaagtcgtgttcagaggtaagttctaaattgagtttctgtagcctcgtgaaggattactacccagagttctaatcttttgtgtttaaaaagggttaacaattcatccgcggagtttgttgcaaacctgaatgaccgtaatgtagaaattgtacaacatatggaagacaacgatcataacatcatcaatgcaactgcaaatgtgacttctgactggagcattgtcaaggaggaattcacatttccagctggaagtgcccctttcaatagctgccatgcttctactattgtagaggtatatgacttctggatacaagtttattttgggtaaaaatgtactataagttacttatagattaattttgtctttttttagactgagaaggatagttttttggtggcttatttcggtggatccaaggaaggtgctcctgatgtgaagatctggctgcagagatacagtgtgggttcgatcatccgggatacttccatttcttattttctttactcagaaaagcggttattcttaagaaccttacctttgtaggatggctgctggcatactccacaagtggctgatgaacaggatgaggtacctatgtggaatcctgttctgtttcagctcccttctcatgagcttcttctcttctacaagattggccaagaagttcagaagtatgaacatgttttatgttatttaatttcttatctcttattcaaatgacaaaaaaaccatatgatagtgcaaaaattgaatgcgactatatgattatttgatattctgatgctcaatataacatgttcaggtggagtggtgccatgaaaagatctctagatggaggaaaaacctggtcggcaagagaacagctaccacctggcatccttggtcctattaagaataaggcatgtctaaatctgtggtgtattgccttccatcttagcaaagcacattgtaaccataaaataaggaaaatattgtcaacctgaatacatatggcagcacaatcattatgggttattaacaagtcagtactcagtagtaatttaattgcctttccattgtgattctcaaaagtttattgatttggttcctgaatggcattttctccaatgtagcctttcttggttgaagatgggcgcttgctatgtgggtcatctgttgaaagctggaactcttggggtgcatggcttgaggtatccattacattgaaaataaaaaaaatcatagactgaactcatgcgtctcacattatgtgtagtggaagttttaattactcttatcaacttaggtcacaaaagatgccggacgaacatggcggaagtatggccctatatatattgaaggcgaaacactaggggtgatccagccagttccctacatgactgccaatgggactattcgagtgttgctgcgatcttttgagacaattggtcgtgtctgcatggctgattctgctgatgggggtgtaacatggagttatgtgcacgagactgaccttcctaacccaaactctggtttgttcatctcctagctaaattagttttctctttgcttcagtacccttgtatagaatagcaaatcctcgaatgctcattagtgaccactgagcactgaacatctgctggtgctgggaacacattattaaacagtttgaagtttccaaaaattttaagatatactgatagatttctgaagaatattaataactctctctctcgacttcaaacctgaagggattgatggagttaagatgaaggatgggagagtactccttgcttacaacaccttctccagaggaacactaaaagttgcagtctccatg

SEQ ID NO: 11314 - DNA, 1334 bp, Oryza sativa
tgaggtttgttaccttcatttacagaattcaattgatgaatcattccattatattagttatttcgcttaatcctgtaatattatagggtacttaagtctactgaaccattgattgtttattgctgtcatatatgaaccttaaaaaagaacatctggattcacatgtcttaaccatgagaggctttagatccccttatattctttctcttcccttcttctccgtgcttcatgcatgtttggtttcatctctagcccaccccaacttgcttgctcacaaggttttgttattgttgttgccatataagcacctccataaaccgcaaaacagtttattttgttgtgcattgttagttggatgataactgatgcctttcttcttttttttctaatgtgatggatccatctagtggatgtgtcataccttcttggacaaacatgatgaattggagcccatctttgtaaaggatagcccccgttgcttcctccgatatttcaagaactgtgggtgctatggcatgtcatggaatctcaccatcaccgcacaaaccttaacctgcatggttagtttcaatgccctgagatgtgcaaaagttgtattggagggcagggcacctgagctctttgggatgcatgccaatcccaactgcgtaaccaaatacggatacttcccgcttcacgaagctgctgaaaggttctctgttgagatgatcaagctactcttacgctttggtgcatcagccaatgtacgcacagttggcgacgatgtcattgaggacctactcccgctccatattgcgattgagaatacttgcctgcataagtatcttgaggacaatctttcgcccagccagaatcatttggattatatctacaagcttatccacctgctatgtttacctgaaatggtttgtttcacttccctccctatgcaagtactacttttgcagcatgacataaatagtaactgtggtcataccatagatcccagacagctgttattacgaattagtgatattaaggactgaacatccttttgtctccacttgttagaggaagtaaagtttcccttttttaatcttgtcttcatgtgttagtgcatgttcatatggttaaaggcaaggagtcttcaataaaatatacaaaacatgttgctactaagcaattttattttctttgccttggagattgtccgtaatccttaactactttgataggaggaaatgaagccatatacagaataggaggaaatgaagccatatatagaaagttaatcaacactacttgcttgcgcgtacaaatgctaaatgtcactttgtttttgttccttgttttac

SEQ ID NO: 11315 - DNA, 6388 bp, Oryza sativa
cacctaacccatacacgcggagtagaaaccgcgaggggtcggggcgcctcggccctctggggcgaggcaggagtggtccgacccccccccctcggggagaccaagaggtgggcgcactcatcaccctcgggcccgacgtcccccgagggtgccaggccacgtgggtgattgtgtctgcctcaagcctctagtcatgatactcccggtcccatgtcaccgacagtagcccccggcgttatgccagggcaatcgcccttttcaaggggagcggtcgggcgtgacgccactcctaaagcctggtgacaagtgggaccggtctctacaaataggcagaaacccaacggtcacaaactgcgcacatcggcaatggtaactcggctgtcagcaatgagcggtctcttcaagactgccacattactcgagtagcacacgaatctggacgagccgattcgctttgccaggagatatgtgatggcgcttcggtcggcgagcgcaatcaacgcgcgcacgatatgatctatcttgactgccacaaccgcatatccacctcacgcgccgcaagcgggcgaatgggattagtggaagcgtgggcgcgagagacgagggggcgcaatagtgggcgcgagaaacgaggagccgggcacagcgttggcaagggtataaaggcactgaggaagggatttgtttctttcctttcgccatcattccccttgtcttcgccgcttgcgccctaactccttcttccctgcgcccttctttcgccacacgcgctcgctctccatcttctcttcgtccggcgccatggcacggggctccgcactgcttgatggtagcgtgctgccgccttcccgcatggtgagcgagaagcaggctgggttgccgcgccgcttcatgccggaatctgccaccggccgtgagatagtcatgctgggcgagggacgcccagcgccagactacccgggacggtccgtcttctttctcccctttgcaatggcagggctggttccgccattttcttctttcttcatggatgtcctggagttctacgatctccagatggcgcaccttacccccaacgcagtgatgacattagccatctttgcgcacctgtgcgagatgttcattggggtgcgcccatctcttcggctgttctggtggttcttcaccgtgcagtcggtatcgccaccgtcggtggtcggcggctgctacttcctgccgcgggggccggtgttgaaccgctacatcccctgcgtcctccgcaagaagtgggatgactggaagagcgactggttttacacccccccccccccgccgacgaagcgcgcctccgacttccgagtcagcccccggcgcaggcctccagctggcgggcgccggtagatctgggggatggctatgacgccgtcctcgaccgcctggcgggcctgcgatcccaggggctcacaggggccatggtgtacggcgactacctccgtcgtcggattgcgccgctccagcggcgcgctcggggcgcctgggagtacaccgggtccgaagactacatgcggacccaccagggagtcagatgggattgggctcctgaggacttcaagatattggtccaacgggtgctgaatctcaactccgtggaggcgtccctcattccccacggaatcctccccctctgcagcgatccagaccgcgcctccatcttgaccattatgacggcggtcggggcctcagaggagcaggctcctaagggccatgacggcgcaggcgggagccgccgaggggaacaatctaccccaggagggggtcgtgcttctgggccccgcgtcgggggctcggggagcaaccgccctaccgacgcccgggggaagaggaagctgggaggaacacctcccccatctcctccccgagggggcggggtggtgcgtgccagcagcaggcgccccggagggggccgcgccaacatcgcagcccgagggggagcgcaagaagaagcggatccgcaagatgggggagacagaaccatcccggggaaacctgatttctcctccaaggtggtcatttaaccgaccccctcgcaggttcgtcccacgctcattgcgaccgtctttcttctatcccaaaagcaagttttctcttacccatcttgtttgtcttctggtttttccttccgcttcagtgatgtcccgtcgcgttcctcccaccatcccaagtccggccagtccgaggccgaagatccggcggtcgcagaggcacggaggcgggaatctgaccggcgagaggccacagatcgcctacgggaagctgaagaggccgcccgggaggccgcccgggctcgccaggctgaggataccgctcgggaggaggccgcccgggctcgccaagccgaagaagccgcccgggaggaggccgcccgggctcgccaggctgaggcgatggcgacttccgaggcagctcgcgacgaggccgcgggcgcgtcgcttgggcccacctcctcgggcgacgctcaggcgacagcttctggggtggctcgcggcgaggccgcgggcgcatcgcttgggcccactccttcgggcgacgcccaggaccaaacaggtccgggggacatccccgagtccggcacgtccattggcgagccgagccgcgcggcatcttctccaaggcagctcttccccacgccttccgtcgccccgctgagcgcagagccccttctgcaggccttagccgccgcaaacaccgcggtgctggatgggttaagttcccaggtggaggccctgcaggcggagcgtgcggagctcgacgccgcatgggcgcgtgtcgaggaggggcggcgctcggtggaggccatggtggaagcgggccgcaaggcacaccgccggcacgtctcagatcttgaagcccgtaagacggcgctggcggagatcgctcgagaggtggaggaggagcggggggctgccctcatcgccaccactgtgatgaacgaggcgcaggactccctccgccttcaatacgggagctgggaggcggagctaaagaaaaagctcgacgccgcccagggggtccttgatgccgccgctgcccgagagcagcgagcaacggagaccgaagcggcgctccggcggcgtgaagaggccctcgaggcgcgcgccatggcgctggaagagcgcgcctgcgtcgcggagaaggacctggcggaccgcgaggccgccgtcgccactcgggaggcaacgctggcggcgcacgagtctgcctgcgccgaagaggagtccgcactccgcctccgcgaggacgcgcttaccgagcgggagcgagctctcgaagaggccgaggccgcggcgcaacggttggcggacagcctgtccctccgtgaggcagcgctgacggagcaggcacgccgcaatctagaatgtgtccgcgccgagagggccgcactggaccagcgggccgctgacctcgaggcgcgggagaaggagctggactcgagggcacgcagtggcggggcggctgcgggcgaaagtgacttagccacccgcctcgcagctaccgaactcaccatcgccgacatgcagcgtgcgctagactcatccgccggggaagccgaggccctccgcttggcgggcgagatagggcccggcatgctttgggatgcagtctcccgtctggatcgcgccggtcggcaggcgggcctctggaaaggccaggcaatgaagtactccaccaaccagggaggcctcgctcagcacctctcgaagatggccggggctctccagcagctccccgaggagctcgagaagaccatcaagtcatcctcgagggacctcgcccaaggagcggtggagctcgtcctggcgagctaccaggccagggaccccaacttctctccgtggatggcgctggatgagttcccacctgggactgaagacagcgcgcgcgcgcaggtccgggatgccgccgaccacatcgtccacagcttcgagggctcggcccctcggctcgcgttcgcccccaactccgacgaggagggcgacgccagcggtgcagacgacagtgatgacgaggccggcgacccgggcgcatcggattgagcccccaggcccccgccaatctccagttttttttttctttttctttcttctaaggccttcaggcctcttttttgtatagatcaacttaatctgcaatcaaaaaatgatgaagaatttttgtgttaattttactttgctatacaaatgagatgaggatgatctgtgccgtggttcttttgtgtcttagcttgatttaagggctcgtgcccaagtcccaatcctcgaaaagcgcgggtcggggctagtgcctggggagatccacatgtcgagactggccaggccgggaacgtggtgaccgagggttatgggtgacccgattgtgggtttttgccgattcccccccggagttcaccacgccccagggcacggctcggttctgggccccgtttggcgattttagctgaccgaaccgagcccccgagggcaaggttgagcatgagtgaccttatttcaagtcaaaattcttcaaaatggaaaaaatggcacagatacagccctcaggaaattgaaactgcttttattgaaatactgagataaaagaaatgagaatgtgcatgtgtggcagcccccggccaaccctgcacacccgagggggggtgcggggttggcccgagcccgaaacctgacacccgacccccccctcaggggtagaagcgacgaaggtgctcgatgttccatgggttaggcaactcagtgccgtcgcccgtggccagccgtatggagcccggccgggggacgccgatcactcgatacggaccctcccacattggtgagagcttgctcaatccagcacgcgtttggacgcggcgtaagacgaggtcgtcgacgcagagtgatcgggcccggacgtggcgctgatggtagcgccgcaggctctgctggtaacgcgcggctcggagggccgcgcgccgccttcgttcttccaagtagtcgaggtcatctctgcgaagctgatcttgatcagcctcgcaatacatggtggcccgaggagacctcagggtgagctcggatgggagaaccgcttccgcgccgtagacgaggaagaaaggcgtttccccggttgctcggcttggtgtggttcggttcgcccagagcaccgctggcaactcctcgatccatgaatcgccgtgcttcttgagaatattgaaggtcttggttttaaggcctttgaggatttctgcattggcgcgctccacttgaccattgcttctggggtgggcaggtgaggcgaagcagagcctaatgcccatgtcttcgcagtagtcgccgaagagttcactagtgaattgggtgccgttatccgtaataatacggttaggcactccaaaccgggccgtgatgcccttaatgaatttaagtgcggagtgcttatcgatcttgatgaccggataagcctcgggccacttagtgaacttgtcgatcgcgacatacagatactcaaacccgcccggggcccgcctaaacggtcccaggatatcgagcccccagacagcaaatggccacgaaagtggtatggtctgcagggcctgggccggctgatggatttgcttggcgtggaactgacacgctctgcatcgccggaccaggtcgaccgcgtcattgagagctgtcggccaatagaatccttgacgaaaggccttaccaaccaaggtgcgcgaggcggaatgggctccgcactcgccttcatggatatcggcaagaagttcaatgccttgttcctgaggaatgcacttcaggaggattccgttagccgcgcgccgatagaggatcccttctaccagcacgtagcgtttggaaatgcgttggacgcgttcactcccttcgcggtcctcaggtagagtcttatctgtgaggtatgcttggatctcagagatccaagcaatcaatctaagggagctaggagcgctcccctcgggtcccgaggcctgggctccgacgggcctcgggggccgatcaggcgcgtccgtctcccctaaggggtcgggtcgcgccgacggctgggcaagcctttcttcaaagacgcccggtggggtctgggctcgcgaggacgcgagtcgtgagagttcgtcggctatcatattatcccgtctgggcacgtgccgaagctctatcccgtcaaaatggcgctccatgcgccgtacttggcgtacgtaggcgtccatctgcgggtcagagcaccggtactccttgcagacttggttaacaaccagctgagagtcgcctaacaccaagaggcggcggatccccagtccagttgccactctgagtccggcaaggagtccctcgtactctgccatattattggtcgctcgaaa

SEQ ID NO: 11316 - DNA, 1345 bp, Oryza sativa
gagtgatccacgatgtcggacttagggggaaaggacggggaaattggtaatgaagatggagcaagcagcaagggaactccatcacccaagggagccattataccttttgattacagcaaacttactattccctctcacaaattcgtctccgtgccttccgggggtgctcctcaatttgatgggacacattacgccgcttggaagcacaagatgaagttgcatctaatctgtttgcatccaagtatttggaaagttgtttgtacaggtatgacgtaccttatgaagacatggagctcacttcggagcaagaacaactcatccaccgcaatgctcaagcttctaatgcaattctctccgccttgagtccggagagttcaacaaggttgatggactataggaggccaaggagatatgggatactttgcaattggctcatgaaggatcaccagccgttcgtgagaccaagattgaattattggaaggaaggcttggaagatttgtgatggatgacaaggagacaccacaagagatgtatgataggatgatgattcttgtcaacaagattaaaggacttgggagtgaggacataacaaatcactttgtggtcaagagacttctccgtgcatttggtccaagaaatcccactcttgcatcaatgatacgggaaaggaaagacttcaagagactcaccccaagtgacattcttggaagaattgtgtctcatgagatgcaagaagaggaagctcgtgaagtgagacaaatggtgaagaatgtcgccatgatcaaaaatcaagaagttgctttgaatgcaaaacaagaagaagagtcaagttgtgaagaaagtgaagatgaagaaatggcttttattgtcaagagattcaagcactttcttcgcaagagtggctatggcaaagggaggaaggatgatgacaagggaaagaggcaatcaaagagagcgtgcttcaattgtggcgaatatggccacttcattgccgattgtcccaagtcaaatgaagctaaggctaagggaggcaagaagaagccggaacgtgctcatgtggcggaggcacacatggcggaagtgtggtactccagagatgaagaagatcccgaggtcaaccccaagcccaagtcaaaagacaaggttgaaggagaaggtggtgttgctaccgtcgccttcaagtcatcctcttcaagcaaggagcgtctcttcaacaacttgagtgatgacgacgacgagtcctaccactactctttcttcatggcccaaggccacatggtgatgactcaaaagccatctcaaacttctcttgatgttgattctagtgatgaggaaagtgataat

SEQ ID NO: 11317 - DNA, 682 bp, Oryza sativa
ggcctgaagcaaatgttcacaaacatggacacagacaacagcgggaccatcacatatgaagaactcaaagcaggattagcccaacttggatcaaagctttcagaagctgaagtaaagcagttgatggaagctgtatggcaccaatcctagactgttacagtatttttctgaaccatggtttattgaccttttatgctgaccttttctgatccattccaggttgatgtagacggcaatggatccatcgactatgttgaatttatcactgcccaatgcatagaccccagccttcgaaagagatgagcatttgtttaaggcattccagtattttgacaaagacaacagtgggtgagtattctgaactgtcacattgaaaaaaactcacaagtcgcagtattttcacaatggcagtccgccaaatatgattatgatcataattcacaggttcacattttataatatctagtgctcactagtctagaaccatcattggaaaaaggcagttgtacaatgccatctgcgcatcaaactccccatggttgatctgactagagaattacctcaattttatgcagcttcatcacaagagatgaactggaatccgctttaatcgagcatgaaatgggcgatacaagtaccataacgcatattatatcagaagtcgacacggataaatgtaagt

SEQ ID NO: 11318 - DNA, 542 bp, Oryza sativa
agagtcaattgcctaaattgatactaccttcttggaggtacctacgacttcattgtacaaacagatctagaactagaacgatacatttacaggggtgtagctggaagcctggaaattggactgttgaacataaataatgcagttacttgcgtcctcgcctccttggtctcctcaggactcaggagccatcaatcagaagtctcaactgcagacaagtaaaaatgaagatgtaataatcctggtgcccaatacaataaaagaagtaacatatttttaacttaaccaattcgtcaagtatcaggccacaagcataacaaccgcaattggctaaagttaataccattgtgcaacctgcaccaacgaagaaaattgcacctaaaacactaccatttcggggggtgaattactgtggatcggatactccgattgttgtactccagtagtctagtgaagaaaagaaatatacagtgtgctatttttcttcatttttttagctgtacgggttttaaaaaaaatcacactaagttgattgcaaatggaga

SEQ ID NO: 11319 - DNA, 808 bp, Oryza sativa
gattgtcctcatcgcgctccacaaccaacgctgcactaactacttggggggtcgccgctaagtagagtagcaggggctcatttggctccggggcgaccagaaccggaggagagctgagatatgccttcaatcgagtgagggcatgttcagcttcctccgtccaagcaaacggcccagagcgtttgaggagcttaaataggggtagcgccttctctcccagcctcgatatgaaacgacttagggcggccatgcaaccggtgacgcactgcacatccctaagtttgctgagggggcgcatccgctctatagctcgtaccttctcggggttggcctcgatgcctcgggcagagactaggaacccgagaagtttgcccgcaggtacaccgaatacgcacttatcggggttcagttttatgcgggcggagcggagactttcaaaagtttcggctagatctgagagtaaagtctcttggttgcgcgtctttacaaccaagtcatcgacataagcctcaacattacgtcctatttggctacccaaagaaattcgagtagtacgctgaaaagtaggacctgcattctttaacccgaagggcatcgtcgtataacaataggttcctatgggggtaatgaacgcagttttttcctcatcctccctagccatgcgaatctgatggtaaccagagtatgcatctagaaaacacaaaaggtcgcaccccgcggtggagtcgacaatccgatctatgcgaggcagggggtaaggatccttaggacatgccttgttaaggtcggtgtagtcgatgcacatccg

SEQ ID NO: 11320 - DNA, 765 bp, Oryza sativa
ttttttttttgaggttcatccgcacattttattactggggagattcagtacgatcacgaatcaccagagtacgtacaaaatacgggagggggtcaacccagaccacagactgatccgggtcccaactcacaccaatcttggctagattatgagcaacattattacaggatcgaggggcaaaggaaaccttcgaattagcaaaatgaagttgcagcagcatcttgatttcagcgaaaattgtagccccaacagcttggctatgggaggatgacgttactgctgagaccagaatagctgagtcagactcgatctccacctcagtcacaccttgcaccgagatggccaggagggcagataagcatgcccttgcttccgccgaaacaacatcatgaacgaattccagccgtccagctcctgccagtaatgcatgcccttcttcatcccgcagcacaaacccccaaccacccgtcttgcgatttgcttggtatgcagcatcaacattgagtttaatcttccctgcggggggcggtgcccagtgtttcatcacagcagcagtaacacgcgtatcaagcgtgtttgggtcagccatttcctaaaccatcgcgttttcactctgtgcacaactttctctggcagtagcccacgttccccggcgttgattttgtttcgggcaaaccaccagttccacagaagcagtatcacctccatcctacattcttcttctagtaataacacatgatgaaccacttctttagctgatttcag

SEQ ID NO: 11321 - DNA, 780 bp, Oryza sativa
cctcataagtaagtatttatcgttttagttaatttgatgaatctgtatattaaattgtcagtttgtgtacctcggctgattcctggacgaggattttatgcacaaataagttcggaaattattagtgaatttctgggcgtgacagtggagagacccgaccaaaatgtcatcggcaccaagtggatcttccgcaacaagcaagatgaacatggagtggttgtaaggaacaaagcccggttagttgcgcaagggttcacccaagtcgagggtctcaattttggtgaaaccttcgcacccgttgctcgtcttgagtcaatccgaatgcttttagcctatgccgctcaccatgatttcaggttatatcaaatggatgtcaagagtgcctttctcaatggacccatctcggaattggtctatgtggagcaaccaccggggttcgaggatccaaagatgccaaaccatgtgtaaaagctccacaaagcgctctacgggctcaaacaagcccctagagcttggtatgaatgtctccgagattttcttttgaaaaatggttttgaaattgggaaggcagacactactctcttcactaaaaagtttgaaaatgatttattcatttgccaaatttatgtcgatgacataatttttggttctactaatgccactttttgtaaagaatttagtagtatcatgactaaaaggttcgagatgtctatgatgggtgagctaaccttcttcctcggactacaattcaagcaagcacaagaaggtactttcatctct

SEQ ID NO: 11322 - DNA, 1690 bp, Oryza sativa
atgacaaggtggttaaaggggactaacgtgtttatcaagtttattcacaggagtttagtcccaaagcaagttgtgatggctaagaatgcaaggagaccccccaattcaaatgttcctaagtgcgaaaatcaccgaaggtgattagactaggtttttctcttttgaaattgagtttaggaaaatccgtactattaagaggggtttcaagtgtggttctagggtatacaaagtgctcttagtcatatccatgagtcaaaatattttttggaatcatttttgaaaaatgattttctccccgggacagagagggctacccggaggttctggccggaacttccgggcaccatttcattgcaaaaaatttcctaagtgctgcccggaagttcctggcacttttgcccggaacctcctggcaggtttccagttcaagcttgtgagtagcggctagatgacgtcacctagccgttatatatatggatttcgttcccaggtcactctttggctattccacttcagttctttcatgttctagggttttctagccactaccaagcttcctttgcttcctccactcaaatctagagcctatcttgtgagattgagagattagatgagagtgtaggagtgttttggagatggcttgaagattaggtttgtttgagcactttggataccttgtgggctatcacttaggcttattactcttggagatcttctcctagacggttaggtgtcacccgtgagcttccaaagatcttgtggatgtcccgggaaagtttgtgaaggttttcctcacctccgcaaggaaacgagataagtgagtaaagattattgtgctgagttttcagaggttgtcctaggtagagcaacttgcacgtgtggtcttttttgaaggaattgtgagttggatcttggtggtcactcaattctagaaaacgacctagaagtgttgagttgaaggctgtggacctcttctgggatctttgcataagtgaggcaaggggttaatcgagacccggctctttggagcacctcaacggagagtaggatccgtgtgatccgaacttcgggaaaaaattgcctttgtctcacttgtgcatgatctgtgtttgaatctgctggtatcttgtgattttcatcttgtgcatccctgtgcctgattttccctagctaggacctgtttttcttcttatatttcgtttatctgtgttgcccggaagttcctagctcaagaactccggaagttccgggctactcatcactgccaggaagttccggtgttcatcaccaggaggttccgggccctgtcattttaaccgctgcgtttgttgagaaaatttcaggaaagcctattcacccccccccctctaggcaacatctctgcacgttcatcgcaggattgagaaaacgtaagaataggataaacatagaattttgataggaatgtaagtgtaaaacagaggattgcaaaatgcaggaaaaacacaagaatgaccgtttgattgaaccgcaggaaaaacacaggaattggatgagagaaatagactcaaaggaaagttaccaagaggttgaagctcttgctaaatttcctccaaaatctctatagtattgtccattccataggaattttaaatgattggatagaattcaatcctttgtttcgaagggtttcataggaaattttcctata

SEQ ID NO: 11323 - DNA, 593 bp, Oryza sativa
cggcacgaagaactctccatcataacttggccactgcgatggatctaggtaagggtcaaacctaggggagtacgagtcctgcacagccttattggaagcttcataacacattcggggggccaccttcacatccaaacctcgcaacatacaaacggttatcatgtgggagcatggcaagtgatggagctgaaggaactgacaactacatgtgttatctctcgcaaccacgacgtagtgacgtccaccccattgaaccccagccgccgtgactccgccttgctcgctgacctcatacttcatcgaagggaaatcaaaacatgctgctctttgccccaaggttcgtctttgctgctcctccaacatgtccttaacttttgtgggccacttctttccacacaggatatctacagttgcctctttgtgtctatcgacaaaccaactattgcacttcgaaaatgtgtatgccacaatagctgtaaccggcagtttccgaatgcctctcaatacattattgaaactctcggccatattactagtcatgatgctatgacgacgcccgttggtatcaaatgctcttgcccatttgaccttaa

SEQ ID NO: 11324 - DNA, 607 bp, Oryza sativa
cgctcgtcagacggtgctgggtgcccccgaccctcaggaaggccccgaggccactgcgggaaggccgcacctatcgccctctgaccccgaggctaaccctgtaccgattcgacccgggagagagcagggaggagaggcccccgagccgaacggtggcccaaggctcccgacgaccggagatggccctctgcccgcttgtccgacgacgccaggagcccccgactcccaggacggccccgaggccactgtgggaaggccgcccctgtcatcctccgaccccgaggtcatcggcacagaagacgagtgcgccccgaggggccacttggacgaagagcgccccggggatatggcccctagcgaagaggatcggccccaccgaaaagtgcagcgacctgtctactttgttagtgaggccctccgggacgccaagacccgataccctcaggcccagaagatgctttacgctattctgatggcctcgaggaaactgcgccattatttccaggcgcatcgggtcactgtggttacgtcttaccccctcggtcaaatcttgcataatcgagagggtgcacgacgggtgttaaaatgggcaatcgagctttctgag

SEQ ID NO: 11325 - DNA, 10213 bp, Oryza sativa
tcctgcacccccaaacgaaacttggcaaaaaaaaaagaaaaactcatgggcataacttttctactcatgctttacttacttcagcagcttcaagagcctgaatgcaccagtagcacaagtgctgaagctccttttggattgatgattgtttgcaaatggtgggattcttcccactgaatcaagcatacgattttgagttcgggtagatcgattggccattgagttactctgaaagatacggatctgttcaagatcacgcccagaattagcatctgctcttgcatagactggatacaccttcacaggacacagggttcgtaaaactgatctccaatatgggaaaaaatttctccttgtatacgtgggatcccatcctccgcctacttcctttctcccagcctgtcacatatttcaatataagtacagcattaaaaaaaacagaaacatccatatttcagcgtggtcagccatgatctctcgcttgagattttgttagatagtccctttatcccataatataaggcatggtcaaacttgacacggtcttcaaaactaatctttgtcttataatttctcatgtattataagatttgtagtaacaaaattataaccatatgaaagtaaattcaaatgtcaatccaatgatatagtttttagcaagtaaaattcaattcatattgtactaaatgttgaccaaaatgttttgaaggtgaaatcttgaaatgcgtgggcgtcttatattatgggatggagggagtatgaatgatttcactacagtgtactagtacttaagtagtacgcttaagcaacatgataagctgttgaaccagcacaaggcatgccacgaacatagcaagcaaaacatggttttgttaatgcatcaaacaactactaatattacactgcacattcctttatcagaatcttcctcacagacaaaaaaaaaatcagatccaacaaatcattcaagaacactaataccgggcgctagtttaatttcaatatttgtattatttcctttactttttattgcattaccccttttctttggtaaagaacctgatgagaaacacactagtctcgatcacattagcatggcagagatgaatcatagttgaaatgcgtggcattgcaataggccatctgtatttggaggcaattcaaagcaatgggattcgtcaaatttttcaatttgttacctggttttgtaaaaaagttggtgtatctttttttaaaaaaaatcaaacaaggggagggcagaaattcctatagctaactttctgctgccaatttattactagtcattagtcattaccaaacaccattctagtcgaaacaagaccaaacgcagttatcacaagatcatgtatccacaaaaaaagaagaaaaatatatgttagcataatgtaactaaagcaaagacatttttatctctaacttacctattatattttcagatttgttcacaagatactacttctaggacaataccctgacatataagagttcgcattgctccatacaaaggatagtttaaacatgtaaaggtacagaaattgaagcatatgtgtagaccattattggcgaaacaccgccaagaccaagaacttccacaggggggtgtggactagagataggtcttcagatcataacaatggactagtaaccaaatctgacaacagactaatcatgcaagtgacttatccgactgctcccccctgcacactacagtaccacaaaatactatttgtgtggactatacctcacctagtacagctcacaacaaggcactttacagagcaaggtgaagatagagatgctctaatacagtagtatttgattatctttaccttttcctccgaagcgtgccgattagctgtttctgtaaatgccatgtttgcatctataagccatattctccataaaaaaaaagaggttagtgctaattttgttaaatgtaaaaagaatcacttgagcccaacacacctttgctacatgactctctctccatttcgcagtcataaggctgacttcaagaaaaaagtggaagacaaaattaaataatcagcaaagtaaacatgtattctcatagaaaactattgtgtgaagcaatacaaagagaagtacaggttcatagtgtcaatgacttctgcagtggggtaaaacccatactccttgaggatagttgaaacatgttccaaaacctccacatggggcgcctgaattgacataaaagctgttgtataagctagagcaaaaataaacagaaaaggcaatatgccgctagcatagatatatcatatatacaatttaggaatcatataaccaatgatagcagagagatgatggaaagaattgttcggaggagaaaattgcaattatacaatatgaattggaaggcaatagaatagtgtgcaaaaaacagtaagaaacatacaatcgcattcattttgctacatggttttatagactacataacatacatattcacattcatctagattgatttatcttatagttatcttaaagcaaagcctcttagattccaaaagttctgtaatcagagattataatctacacacttcaaaggtacgagttaagaactgcatcacacttctgtatgtttaaactttacagtcgttcagttattcaaattccaactgtaagcattcgaaatcacctcgattgttttatctttatttctcaaagagaaatgtgtcaatttcttcaggctttatgatataaaatgaagttcagacagacttaaagaggtcatgaattgcatactagtgtttgttgagctaaattgaactgtcctctggggtcacagacaagttacggtatgagctctaactccaggtttcttgaaggacctggactttataggctaaataaagtgccttaagcatatattttcagttaacaagaaggttaaattcaaaatctaaatacacccccagctcaagcaccaagaatacccagctcctaaaattcttggagctggagcatatattttggccatgaaaacatgaaagtgcttattttggccaatttatctgccaggcatccagaaaataaacaaagataaatgaaacaagtgcatgccttttgttcatatgcaccatgtgctattaatagcattaagggtgtgttcaggaggaggggttgggaacccctcctctccggcatgcaaaaagaagcacgcatgagcatataactaattaagtattagcttttttaaaaaaatgaattaatgtttttttaaacaactttcctataaaacttcgcacaaaaacacaccatttaatagtttgggaagcgttgcatggaaaacaagggaggtcaagttgggaagatagacttaagaacacagtctaagcctatcaaacactttatgttgattgctaaaaatggtactcctactaggaagtgacaaccagaaaatagacataagggaagcttcaaaaactacattggcatttcacactgtacatgtgaagtgatggacagtgaagtggatggaaagttttttaatctaaataacatcttgcgtatttgaaaaattaataagaacagaatttagtgataaaaacataagaaaacacgctaaattgatttatactacatattgaaaaaattccaaagttttaatatgaaactacaccattatgaccatccagcatagctacagaagttcgctatatatattcatttgtaaacacaaggtcagcaattttagtatcaaaccatagaatgcttgtatctacagaaccacaaattgaattaatctagtaatgagattaatacagattcattagctgttttacatatagcatttcatacaaactaaaaagtagattcgttatttatggcataatcatgtagtaatcagttatcagatgcataaaaaatgtagtaaacaaaagagatatggttttaaagcaaactccatccaacgcttttaatttgatagaagatgaaaagtaatcctttttatttcaagtcatatgatttcaacaagagacaactacatcttctcaaattaccactgccttctttagtgcaagcagcaattacggaactcaattcctttacattagttactatgggtggttgagacagactgattcaatgaggtagcaatagacaactttagtagggacatatagtctcctttttgttttcttaatatatgtgcacaaagcatcaagtaagaaaaaaaggatacatctcagtgaggaacgagcatactcaaaattttcagaaactacacttcttgaagaaaaatcacaaactacgcattctttcaatatattgtcagaaaactggacccttcttggcatgagctgcaacattaggcccaaaggtcaaccactctgaggtcagtagagccacatgtgcatgacatgtggttcatactccctccttccaaaagtctaagttctatttcattctttggtttttccaaaagtctaagtcctatttgtagtcactatgtgctatattatattttttatcggaactcaaaaagtcattttagtacttattggttgcatgttcatttggttttgtcacatgatgaatgagttaattacaccttggtcttggtgcaaaaagaaatagaacttagacttttggaaggagggagtaattgtcaacactcaacagctggtaaaatgtgcagctttatgataaataaatataaatctgggataatggttcggaaaaattgttcagtgataattttgagcttggaagtgtaattctctgaaatttatgtaaaaagatgggcagtagttcatagataattgctgtaagaaaagttcattggtttaagcaagacacctctcaaaacattgaagcaaagcataaaacaaaattggcataaaatcaaatgcaaggttcaatgaaaaataacacttccatactccaagttacaccaaagattaagaaaacctcatgtagtcatgtgtattacatatacaatagttcagtacaaaatataaatgtgttgcaatattattgttaatttaggcttggctttcagataaaatacaccaactctggaattcagatattaaatctcatatcagtaaacaacatcaactacctgtgaaggttgagtttcctccagaatctttcttctctgagaagctagttgggaagattcagggatggaaatatggaatagaacctatctcatgactaatgaaatcctatctccaatcaagagtcttaggtattcaatgcccctatctccgatcacctaacagaacaaacaaagctatgctactgaatgaaacaagagtctggttgatcggagataggatttcagtagttatgaaatcttgcgaaactgttagttttacaaaagttcacttctgtatagatttgttaaagtatgaactcttatcacaaagttatcaaatataacatttattattattattattattattattattttcagtcaacacaagaattattaacattcttcttgctaagaccacatgtattttttaaacaacagctcttacaatggtcaaaatacaaatattaaaaatattaagtaacatgcgtcagaggcaccacagctgcaatataccaaacatgcatacctctgaatgcgcctgaacgtatgcagaaagaggttcaccagcttgggaaattacatcaacaagcaggcctgtgcaatcaataagtgccctcttttcctcccgaagcttctgtgccattccatttgaaactttcccccatctcaaggcaaatgaaagcctcagtatacgcttgtacataatgtcatacccatttttctttctactgccatttatcttggaggaacatccccctcggatctgctcctgagcagccagtagtagaattgcggtctggataagttttccattctcaatataattccagagctcttcaaggagattatttgtttttcctgcaagtagtctagttgtatccaggaagatcttctgttaaaacaaaaggaacaaaaatctaagtgccatttagcatttttatgtgcaagcaagtagtgccgattaactttctatatatggtttcatttcttcctatcaaagtaattatggattagggacaatcttcctatcaaagtaattatggattgaggcaaagaaaataaaattacttactagcaacattttagtatattttattgaagactctccttgtctttaactatatgaagatgcactaacacaaagtaagacaaaagattaacaaagggaaactttactccctctgacaagtggagacaaaaggatgtttagtccttaatataactaattcataataacagctgtctgggatctatggcatgacaacagttaattactctttatgtcatgctgcaaattaaaagtactccagtactttgcatatatatggagggaagagaaacaaaccatttcaggtaaacacagcagatggaaaagcttgtagatataatccagatgatcctggccgggagaaagattgtcctcaagatacttatgcaggcaagtgttctcaatcgcgatatggagcaggagtaggccatcgatgacatcgtcgccaaccgtgcgtacgttggctgatgcaccatggcgtaagagcagcttgatcatctcaatagagaacctttcagcagcttcatggagcgggaagtatccatatttggttacgcagttgggattggcatgcaccccaaggagctcaggtgccctgccctccaatacaactttcgcgcatcgcagggaattgaaactgaccatgcaggttaaggtttgtgcggtgatggtgagattccatgacatggtatagcccttccagttcttgaataatcggaggaagcaacgtgcactatcctttataaagatgggctccaattggtcatatttgtccaagaaggtataacacatccactagatggatccatcacattcgaaaaaaaattgaggcatcagttatccaactaacaaagcacaacaaaataaactgttttgaggtttatggaggtgcatatatgacaacaacaataacaaaaccttgtgagcaagaaagttggggtgggctagagatgaaaccaaacatgaagcacggagaagggaagacagaatataagagcaggtacaatagcagactataaaccagttataaacaaatatcgaggaaataaaagaggagagagaatagcagcgggctacagatttatagccagttgcaacacggactccaaaatataatgtgtgtataacaggtgggaccatgtattaatagtatagtatatgtttataggtgactattgtatgaattggctattaagttgactataggtgatttggagttagtagttggctatactattaaacttgctctaaggggatctacagcctatcatggttcagacatgtgaatccagatgctcttatttaaggttcatattatgacagcattaaataatcaatggttcagtagacttaagtaccctataatattacaggattaaacaaaataattaatataatggaatgattcatcaattgaattctgtaaatgaaggtaacacaaacctcgggagcagggtctgggatgattatgtcatttgctatggtcttggcaatcgaaatattcctttcatccataaactgaaagagacaatgtcaacagtcagcactaggggaagaaaatatatcgtggctgggtagttatcataccttgtcaatctttttataatctaatccctcagcaagttcaaaacgagggggagggtgccgtggatacttatttcttactggaattgatccatctttatcattgccattatttttgtcgcatgcagctgcctcctttttccacgtagcataatcgggtgccttaaatctcaactccatcctttcgggtttactttcctggaacaaggaagtttgatctcgaatcacactccaaacaagataactggagtacaaggcatgcaatggtcaaagaatgatccagaagaccatgtgataaaaatgagtccttccatctaaaatggatcagacatcactgaaacatactaaaacatatttagcgaatagaaagcatatggagactcagacttcatacatctctatcctgagatgtaacaatgctatatgcgaaatgaagggacaaacagtgctagaaactcggatgcatataaagtgtatctagaaacgaaaagcgaaaagccaattttgagagtgcgaatataaacaatggaaaatatagaaaccaaaagctaaatttgggagtggaaatctagaaaccagaaggctatggaaatatagaaactaaaagctaaatttgagagcgctagaaactctgatacatagaaattatggaaatctagaaaccaaaaactgaaaaatattcactaacacccagattatttttttcttggttgggggaactgcagtaaaaccctagcttccagatctgggagagaagataagaagttaaggaaaattcaaaggaaagaggatgcgcatgcttcgggacgggtgctcaccggaggcggaagcagaaggacgacggcacccacctcgcgggagatggatgggaagcggcgcaggcggcgaggcgaggcgcggcgggcgaaactagagaagagacggtagtagaggccgagaagaccgggagattgacttgggccggcgcaaggagtatcttcattcctatatagaataagttcactttgagtccctctatttgtcgcccagtcccattttcgttccttggtcgcaaaacagggtacgacgggtcccccaacttacgaaatcagtgcaaatgaggtccctcggtggtatttagggttgaaaacggagcggatacggatggataatgctcataccatattcgttttcgtattttttaccggatacgaaaacgaatatggatagctcgaatacggaaacgaatacggattatctcgaatacgaataagaatcgaatatgatcgggcacgaatacggaaacaaatttttctcggaacacgaaaaccaactcaacttctaatagaaacaaataccaacatatataattagctcattttatataaaatgaagtataatttataaatattttttaaaatttaaataatattaatagtatggactagtgttaagagataaactactattaaatatatataaatgtatattgaaggttctagaattaaaagaaatggggtatgtctcatggctttggggatatccgaaatatttatccgtttcccacggaaacctttatcccaatttgtttttttttccggggaaaaaaatcccgtttttttttccgtcccaaaatttccaaaaatttcccctcccaaggggtgttctttttcctttttttccaaaaaggggagaaaaatttcccttccattttatccctagagggattgggccccggtttgcctaaaggggggcctacatggctcctttgactaatcctttggcttacgtgtcattgacgtggtgcttaggtggcaattaaataaaaaaataaaggcagcaaaaatgaaaataaaaaaattaaacaaaatatgtgggacccacatatcggtaaaaaaagaaaaagggcccacatgtcagtgggtcccacttcttcaacctcaccctctctacttatttctccttcaatgacgccggcgtgagagaagcggcgtgcggcgggcggcaggagaggagcggcaggcagccgaagtggaccggcgtgcggcgtgcggtgggcggaagacaacgggagaggaccagcgggcgacgggcggcagtcggcaggcggctggagtggagcagcgtgcggcgggcggaagatccgcctcctcatctccatcgtcgcctcctctgcgatggcgcatgccactgtcgctgccgtcccggaagatccggcgagggaagaccacaatcgcggaggtcgccgccgacatctccctccccgcccgcagccatcatcagccagagcggctccccattgaggccgccatcgacatctccccgttcgcggccaccgtcaactagagcggctcctcgtcgaggccgccaccaacatctccccgcccgcggccgacaaggaggaggagagtggctcctggccgctagcttgctccgccgcccttcttgccgctagcttgctctagtcgccggccgtcgtccgctccggcgccgcccgtcctgcttcactg

SEQ ID NO: 11326 - DNA, 3275 bp, Oryza sativa
atgtgggcaatgctagaaagtcttataatatgaaacggaggaagtattaagttcgcttgatgttagcccaagcaatacaatcacgcaaaaattagttagaagctaatttatttcttcacaacctaaaacataccctccaactccagtggtattctgcatttctcagcccccatttattttctcttttatttcaatataaactctatatttttgcgactaattcaaacataaataaatatttctaacacttcgaattgaacaatatttaaattcacaatttggaggcgggaaggagtcgggcggcggggaaggacggtgaccgcggcggctggacggcggtgaggtggctggctgtcggcaacagcggttgccatgcctgcggtggaagaggcacggtggtggtgaccgtgactgcggtggaaggaggcatggcggtctcggacggctagccgagggcgtggcagacggacgcacctgaccggcgcggtagcgattggaggggtcggagaccggcttggcgaagagaggcgcaaccgatggtagtggaggccggcgaggcgcagccggcggagtggaggccggcttggcgcgagaggcgcgccgatggtgggaggccagactagcgcaagaggcgcatttggtggtggaggaggccagtgcagcgtgaggaggcgcgaccggcggtaaaggaggcaaccacggtgtgaggaggagctgccggtgggtgtgtcgcggtgttcggcgcacgaaggctggccggcgggggatgccggtgcagtggtcccacatgcctgcagaggttgagcggtggtggagcatcggtgcgtcagccattgactcgcaggtgatgagcagcgggtgaaaacctagttcggccttggccgggccgacaacgatggttcattccctctcatgagggcgttgtcgtgccgtctcatccctcaagggtggttgccttattgccaggcgaaagcccaatctaggctcttttgagtccttgacggacggcggcggcggttttccgtcgcttctctctttggagacatcgtttaggcatccccttgccgaaaccactcaatcgattggtgcaagcacgctctaggatagagttaggctttgtgttggttgtaagggagtttttgggcgatctcgtctgtgttcctttgttggcctagcggcggtcagtcacgcttagcggcggctggtccggtgctagccttctcccggacctgtgtgttggcgctggcggtatgtgggtggtggttttttcatgctctatcaatagaacttgtgcgagtcgtttaaaaaaacaaattcacaattttaaacaccgcgatttaaattcaaaatctaaatttcaaatgaaaacgtcatacgtacaagaattgaccaaagttttcgacacattaatcacaatcaggtttatactaattaataacatatcaaaactcttaacaaataacatatggaatcacttaacgaagttctcgacacgaaacgaagttcgataaagaaaaataaagagttaattagatccatgtcattgccaaatatgttgtattagaaaaatatcagtgctatttataaaatcagatgggtgccacttcaatcttctaaacttaaaacaatggcactctttgcccctgtcatgaagatgcatgccgctgttgctcctccgcttcccctttctgcaggccactccacatcacagcgatgctcaccgagctccctgtggaggaggacgacacgatgtctgattctcgacatcgtcggattgatttatcgtttatgttgatatcgattcttcctcactttattgcgattctctacaaaaggttagtagacctaatactagtgaaatattatcactagttctcctctattttggtaatattgacggtcgaaactgatcgataatgaccgtcaacaaaaccctacaaatttgaacctttgcttgtccttgggcgcgggccgacatatcggctgcagtgagatgaaaggaaggagtagaggggccatctctcctctctttcatcccgaaaattataaaataatacgtctagtgtcctacggccaattacacaacttttatagtgtccatatgtagtgttaattttttacggtgtccctcagccaattacacgtttttttcgtgtcccgtaacaaattttggcaaaaaaaaaaatcatggcggctactgttccaccactgccgcctaccggggggggggggggcgctacggcaaagtggtccaaaagcatgacgaaacgcggccgcactgactgacctggaagttggttgcgcgcttgcaagcgcggcgcggaggaggtggagaagacgccggctgcggcgacgccgaggacgaggaggaggaggtggtggaggcgtggcctcgggtgtgatgggagagaagccggcaaggcttgggagaaatgcggtgcacggcgcgtggaccccacgtgtcagtgggcctgcccctgcgcttctctcgcttcgcttgcccgagagaaacccaaaaaaagggagtcgctggaatagcatagcttcatggttttttgcatttgtaaattgtttttttcttttttcatggaccaattgagccaagggtaagtacgttcgagaaaaaaaaagaaattgtgaaaaaacaatttgcagatgaaaaaaaagaagaaaagtgacattacagttacagcgaatgcccgctgtttaagagtggcattcgatcgaatcttattttaatgatgatgttttagtgatcgcgtgggagataggtagggagaggtggagatggtccaccacgtggcctgcgaacccatccatctgaatcacaaggggtcctattcttttccccaattctctctattttttggtgggggtcaaggtatgtgtgtgaaaacggtatggaaactttccgaattccggatctatttttgaaaaaagaatctatcggttggattttttttttagaatttttcggaaatggaaatgaattcggaaatattttcttggaaacggaatcgaaaataataagggcagctttcgtcggaactcggaatcggtcggaatctttccggaaattttcttggaatttccaaaaattttgtgactgaaataccctggattcttttttttaagcactaaatagttaatcctatggtgtttggctgttattttttaaaaaatatttgttatgccactccgaagttacataagaatattttttcttgtattaggatttatcaacaacattactctattaaacatagggggtgcag

SEQ ID NO: 11327 - DNA, 654 bp, Oryza sativa
tatctcaattgctgttacatcattgccacccttaccatattctccttatcttcatttgtcacctccttcaccacatcaactgaaatataaattcaccacaccaacgattgacaacacattcagtaattggtggagttataacaggtgtgatatactgataattacaatatctgaaatacatgatggcacttaccaggttcttgctctgtaccaactggcaaagccttgctgcctccattgcaatcttccttctgccccttgacctgcttcttggctttcttaccagtattcttggtgatggcttcttttgcaggattccggttgtaggagcctctaacctttgcatcaggcttcttctgaatgttgtcttttttagctgcttccttactttgagctgcatcagaaatcaacgatcttggctttaaattacccttttgtgacacattggtggcactattagcagcccttgcagactttttcggctgttctgaagaggtcacagtgatctttaacttctcaagatcctccacgatatttgtaacctggaaaatattcttcactggttcttcaactctgttgcaggccatccggacaacataaacccttagctcatctctataccaaacagaggctgtggaaaagccacttattata

SEQ ID NO: 11328 - DNA, 588 bp, Oryza sativa
gggatgcctccagtgaggctgttatttgtgagtatatgaccacattcagaaaagagttacttccaagtgagaaaggaatattgccgcttaggttgttatttgaaagatataaaactgaaaggttggagagtgtacctaatccttctgggattactccttgaagtttattgtcaaacaagcagatagcttgaagatttgagcatttgttcatgcttgaggggatctcaccatcaatcgagttatttgagatatcaatgatctgaaggttagagcatgaagacagagcctctggtatcgtgccagtgaggccattagaggtgaggttcaggtaggtgaggcgacgcaaatgaccaatttcaggtggaatgttgccagtcaactgattaaatggaaggtggattattgtcaagaaagtaagattaccaatgcaaggtggtatttggccatggagggtggatgactctaggttcaattcagtgactcgagatgtgtggctcttgctacaagtgacacccggcgcattgacagtattgcgaagaatcatttctccaggaagccatgactccggcattgtcattgagatggagc

SEQ ID NO: 11329 - DNA, 538 bp, Oryza sativa
ctaatgtcaaaagccggaatgttaaccaagcatgtcctctgtaggtctggttgccagcggtcatgaagctcataaatgtagcttcaagcctttgtaatagatccttccctcacacagtaacgaacattgcaaccctttgttggtataggaatgctaagcgactgatcaacgttttgcagcttccatgcacagcaactgtgtatcatgtacaagtggattgcttgctcgaactggtggagatcccgtaaagtatggaggagaagcctgtagattgcatttctagcttaatttggaagcacatttgagcaacagccaaaaaatatggggtaaagagaaaagagataagctaaccttgctcataatgaaatcagaaagatcctgtgttaaatcatactccttatatgacctgaacagcaaaataaatcaccgatgctatgcagttaaaatcaaaatacccgaacttatctgaatatgaaaaattccagatgagaagtgagtgtgtcaatagagtcaaattgaacatgcagaacacaaacgg

SEQ ID NO: 11330 - DNA, 1383 bp, Oryza sativa
gtggtgtcgctgtcgctgccgaacaccttcttcaacctgtcgtcgctgccgccgcagctcgcgtcgctgtcgtcgctccagctgctcaacctctccacctgcaacatctccggcgccatcccgccggcgtacgcgtcgctcgccgcgctccgcgtgctggacctctcgtcgaacgcgctctacggcgacatcccggcgtcgctcggcgcgctgtcggggctccagtacctgctcctcaactccaaccgcctcaccggcgccatcccgcgctccctcgccagcctcgccgcgctccaggtgctctgcgtccaggacaacctcctcaacggcaccatcccagcgtcgctcggcgcgctcaccgcgctccagcagttccgcgtcggcggcaacccggggctgtcgggccccatcccggcctcccttggcgcgctctccaacctcaccgtcttcggcgccgccgccaccgcgctgtccggcgccatcccggaggagctcggcaacctcgccaacctccagacgctggcattgtacgacaccggcgtgtccggcccgatccccgccgcgctcggcggctgcgccgagctgcgcaacctgtacctccacatgaacaagctcaccggcccgatacctccggagctcgggcggctgcaaaagctcaccagcctgctgctctggggcaacgccctgtccgggaggatcccgccggagctctccaactgctcggcgctcgtcgtgctcgacctctccggcaaccggctcgccggcgaggtgcccggggcgctcggccgcctcgccgcgctcgagcagctgcacctgtcggacaaccagctcgcggggcgcatcccggcggagctgagcaactgcagcagcctcacggcgctccagctcgacaagaacggcctgaccggcgccatcccgccgcagctcggcgagctcagggcgctgcaggtgctgttcctctggggcaacgcgctctccggcgcgataccgccgtcgctcggcaactgcaccgagctgtacgcgctcgacctgtccaggaaccgcctcgccggcggcatccccgacgaggtgttcgcgctgcagaagctcagcaagctgctcctcctcgggaacgcgctctccgggaggctcccgccgagcgtcgccgactgctcgtcgctggtgcgcctccggctcggcgagaaccagctcgccggcgagatacccagggagatcggcaagctgccgaacctggtgttcctggacctctactccaacaagttcaccggcgcgctccccggcgagctcgccaacatcacggtgctcgagctgctcgacgtccacaacaacagcttccggggtgccatcccgccgcagttcggcgagctcatgaacctggagcag

SEQ ID NO: 11331 - DNA, 834 bp, Oryza sativa
attatgccgccgctgttgggcgtttacgacttcaccgccggcctgcctccgtcgccgccgagtggtgcctccaccaacacggctggcctattatgccgccgctgttgggcgtctacgacttcaccgccggcctgcctccgtcgccgccgagtggtgcctccgcctacacggctggcctattatgccgccgctgttgggcgtctacgacttcaccgccggcctgcctccgtcgccgccgagtggtgcctccgcctacacggctggcctattatgccgccgctgttgggcgtctacgacttcaccgccggcctgcctccgtcgccgccgagtggtgcctccgcctacacggctggcctattatgccgccgctgttgggcgtctacgacttcaccgccggcctgcctccgtcgccgccgagtggtgcctccgcctacacggctggcctattatgccgccgctgttgggtgtctacgacttcaccgccggcctgcctccgtcgccgccgagtggtgcctccgcctacacggctggcctattatgccgccgctgttgggcgtctacgacttcaccgccggcctgcctccgtcgccgccgagtggtgcctccgcctacacggctggcctattatgccgccgctgttgggtgtctacgacttcaccgccggcctgcctccgtcgccgccgagtggtgcctccgcctacacggctggcctattatgccgccgctgttgggcgtttacgacttcaccgccggcctgccttcgtcgccgccgagtggtgcctccgcctacacggctggcctattatgccgccgccgttgggcgtctacgacttc

SEQ ID NO: 11332 - DNA, 7930 bp, Oryza sativa
tgcgagccaggcttgctccaacagcactggttttgctcaccttgtggtagtaggaagcagcaaggctgtctcccttgttgttcctgaaatttgcaaatcactctgttactaccaaaatcaaagcatgttagaataacctattgcagtaacttgttgcaccaatactagtccaaaatactccatctgtttcacaatgtaagtcattctaacattttccacattcatattgatgtaaacgaatctagacatgtatatctatctagattcattaacatcaatatgaatgtgggaaatgctaaaatgtcttacattgtgaaacggagggagtagcatatggatgacacagaagatgataagcaaacggcccaagaaatccccagaaactactgccaaatcactttgtgctactggaaatggtagctctggacaaaggttcaaccatacaatcccctcgggtccggctatggtaggttaatcacacgctaatggaccactccgttttgtgtgtttgggggagagttcccaactcccactaaagaacggagcctaagtccacgcccctcgctctgccaacttgaggatagtaagctagggtttcctcatatagcatagtaaccacaggcataatctttgggctcacataatttagctccttattccttgatgaagcacttgaagggctagcaatgttgtcacatggagccatagatagtttcaatgaagagaacttgctaggaacatcccacatctggtaatgcacttctgacgaactccagggcaccgtcgctgcactttagagtcataagtgatgcctgatcaagtgcatacaagttttcaatcgcttgattaaatggattatataaaccaagcttcctcccagtattcagtagaacccttccatctattggatcaactgcgagaggcactacaacatttgtcgcaagcgaaaaatctggccagagttttaaattgattgtgtatgctatagtccacagaccatgatcccacttccatatatctaactcatctgcaactggatctgagaggcatacacacaacatcctctgaagctcgaccacaaatgcggacagcgactttcattgtcccacattgcaatgcatgaagggcaagggataacatcaaagatcttagcagtaacatcaaaagagacaatggcccgctcataactccaacccaccttggctcgctagtcgctcatccagtacaggaacccatccagagaagcaggtggcatgtcattcacaggcagaggcggcccaggaagatgcatgctgtatccaaagccacaaccaaacatcacgcatcttaagtaatatccacgagttttgtagtctctccagtcatagaaaatcgcgacaacaacatgatcctgaatcacctggctgaatgccaagccaacattcttattgtcaatagcaaaaggattgccttcttgttcacagcaactgataggcgctttccacattgggtgcagctgcagctgcagcagctctttgtgcctgttccaatagatcatgcggtaaccagtacacgggttgaacagacagtccttctcctcatgctcaccagattcaacccatggcaaggcttggagcaaaccatctttgtgtctagaaacagtgtcttgattagatgcctcttggagccatttacttaagggaacaaagctgaaaagagattttctagagcccttacccacaagcatgatttttggctcgtcgacctcattagacatttagactggacagatactcgattactgagttgcacgcatgacccactaaatgtttctaccaaattactcttcttttgaatgagtttaccatgaccgtaattaatttatatggacaactatatcaaaggtaaaattagggtcctaatttgcatgttgtcccggggcaccaaaattgtgtagacgccctgcctataaatggagtatatgtcttcgtatgtaagagatgattttataaaaaggacttcgtctgtcccaaaacattataattcaggatggatttgaaccatactagaacaacatgttaccacttaaatttagcactatagcaagaataggaaaacatgaacaaatttgaaaaggacccagacttaccatgcgagtccagtctaacactgtcgtagggctagtcagatcaacagcatatagacgatcaaaccgtcatagcccaactccggccctgtttagttccaaagtttttttttccaaacttccaactttccatcacatcaaacatttcatacacacacaacttttctgtcacatcgtaccaatttcaaccaaactttcaaacttcagtgtgaactaaacacagcctccgagtaggaatccgttggtgaacacaccaaacttaataaataagtatttggtatcccaagatgtattacagcttatgtattaatattatttttaaatttttcttatattgtttatataggttgtaagcacctaaaactagtttgaaattgagatatcaaagatcaagcaaacgattgtgaaacattgaaatatttttgaacttgataatgttgtcatccatggctttataaacttgcatcttaaaaatacaacttatagagaaaaaaatattattagttaataaagtgaactatttaaaataatttatagctataatgaggaaaaaatagtttagcaggtcaagtgacaacaaaatagactcttcttttttcaatgtcaaatgatgtttcaaaataggtacagtaattagcattttccataacatactgttgttagaatacaataatgtccaaggtcctacccgcgaaaatcccaacactggactggaagcgccttggtggtgctttgccttagcgatcgcgatttcgcgaggtcttcgcttcgtctccgccccacacccccaaacccacagccacgacgcggccgcaatggcggagcccgagtcctccacggccgcggccggcggcagccgcctccgcaacgcctgcgggggcgtgctgtgcgccttcaccctcctcctcatcggcgtcctcgcgttctcgatccgcctcttctccgtaagatctgatccgccccctccccccactccacctcgcgcggcggccagatccggctcgccgttcgtctcgcgtttcggaattgtgcattcttaatcggccccttcgttttttttttgtgcctcaggtgattaagtacgagagcgtgatccacgagttcgacccctacttcaacttccgcgtcactcaggttggattgcggggagcttccatcttgtgtgttattatttttgtggagtatgcggatttaaggaatttagctcgaatcataggggactgcaatgttgtgttgatttcagagtgttggtgtcagtgggttttgggttttgcaaagtgattttggagtatattttcgtttactactggatgattagtggaagtatggagcaacagatggttacatgcttgctggaatcagttgtggattacatcagatctaaaatttccatcttacctattacagtttttgtcgaagaatgggatctacgagttctggaactggtttgatgacaggacatggtaagagccttacgtcagatgaataatttaatattccctccatctacttttgatagtcatatttcatcttggcacaatgaccaaggataagtaattctacttatcatccatttaaacatgctactagttattccttgtaaacaagcgattcattaatatttacatttctcgatgcccatgtagccaatcttgtgtggaagaatgtagagtcacgcattaaatcctagaaagtcattaagatgataggtgattgaattgaaatatgcctatcaaaagtaaatttttcagatttgggaatatgcctatcaaaagtagatggagggagtattgtgtaatcatgatgtaaaatagaatgtgtaatacgcctacttggctgattcccttgctgttgcttctgttttaggtatccccttggccgtgtgattggcggcactgtgtatcctggtttgacattgacagctggaaccatttggtggtatgttatcaaaggaaagcacttgtctgttcctcattaatgctgtggatgtgcctaaaatatttgattggttttgcaggttgctaaattctctaaacattccgttgtcagtggagactgtttgtgtgttcactgctccaatattctcagcaaacgcttcctgggctacttaccttttaacaaaggtgttattttttcctctcccggaagcactagttctcacactattggtactcatacaaataattgtgcttatttcttttaaccttccataggaagccaaaggcactggggctggattgatggcagcagctattttggcaatggtaatctgcactatggatttttctactaggctttttttttatcatgaaagattactatagtattttgactcgattatgatccatatattttcttttccacattacacttgtcatagtaataggaagctatgataatgaagccgtagcaatactgaatccacattccacattacacttcttttccacactcaaatcacacatcatttattacaggttccctcatacatctcaagatccgttgcaggaagctatgataatgaagccgtagcaatatttgctttgatattcacattttatctatatgtaaaggtaatggtgcatgggttgtttttgttgcctctttaacatagcgttatgaactgacctgttctcaaatgatttgcagacactgaacacaggatcactcttttatgcaacgctcaatgctctctcatatttctacatggtaatatctgataatttgaacccatgttttccaatgtcctttataatcaagcaacaaccttgtgcaggtctgttcttggggaggttacacattcatcatcaaccttattccaattcatgtactgttgtgcattgtcactggtcgttattcttcacggctttacattgcttatgctccccttgtaagtgcataacatcatccttttctttcttcattttgaacaaacaaaataaaaggagttaaacgtttcagtgatactgtttgtctggaaactgacctaataagataattatcattttgcaggttatactgggaacacttctggcagccttagtacccgtggttggttttaatgcagtgatgacgtctgagcactttgcatcatttctggtatatacattcattggcttatgcacaccttttcttccttgtggaattttcttcattcagatcatttacccactttgccctattagaataaataaccagtgaactttatctcctaacttcatcggagaaaattgctataagccaccaataatttcattgataatagtatactttaattgcaggtgttcataatccttcatgtggttgctcttgtgtattacataaaaggacttctaactcccaggctgttcaaagtagctatgactcttgtcataacagttggcttgtaagtctcttgctttttttattgtcaggtgcatgagaaactagacattgagcttgtttattccttggaccaataatcaccatctatccatcagaatttaaacatttaatttctttatttgagatggtatcttaacccacatatgctaatggcaacatccttcctccagggctgtttgttttgcagtaatagctatactcatcgctttggtggcatctagccccacaaaaggatggagtgggcgcagtttgagtctacttgatccgtaagtttttttaccatggaaaataaatattatgttattttgctgtaccgggctgggaatcattacatgaaataatacttaattttgaccagctgaaataatacaaactatgcccctttttttatgcttactgttttagacaaggaaagcagtctttctgatgcatgattttctgaatggagtatatctcaatgtcctattggtgtttattttccgtacgggctgggaaccattacatgaaataatacttaattttgaccggctgaaataataaaaacaatgcccattttttatgcttactgttttagacaaatgaaagcaagtctttctgatgcatgattttctgaatggagtatatcacaatgtcatattggagtttattttcttctggttctctttctgcatcataacttcacgttttttcctgctttttttttacagaacctatgcaagcaagtacatccctattattgctagtgtcagcgaacatcaaccccctacctggccctcctatttcatggatatcaacgtgttggccttcttgattcctgctgggatcattgtaagcagtctacattttcaatccgaattgaattagcataagtatttgttcttactagttaatattgacattgtcaacagtcatgcttcttgcctttatctgatgcaagctccttcgtggtcttgtacttggtcaccgcagtatatttttctggagtaatggtaagaatatgtgtaatgtaaaagcatctataaagcaatgtttatctagtatttatttattaacttttctttacatatattctcttttaggtgcggcttatgcttgtccttgctcctgctgcgtgcattttatctggaatcgctctttctgaggctttcgacgtcctcacaagatccgttaaatatcagctatcaaaattatttgatgacagccctgctgctgtacggttgctttcttcattgtttttctttactctgttaataattacctggcttcatccttaacaaacttattgacaacttatttcttctgaaacttaagtcaggggatagtagtgcagagagttctagcgctagtactgtctccacaaattcagcaaaaaatgagactagacctgaaaaaactgaaacagccccaaaggaaaaaccatcaaagaaaaaccggaagaaggaaaaggaagtggctgaaagtgttcctgtaaagcctaaaaaggaaaagaagcttttggtacttcctatggaggcatctgttttgggcattttgttgctgatcgtgttaggtggtttctatgtggtaagttaaatattcttagtcttacagaaagaacagtcataccataagtgatgtctggatgtatcttaggagatgcatttttgtaggtccattgtgtgtgggcagcagctgaggcgtactcagctccttcaattgtgttgacttctcgttcgcgtgatggattgcatgtttttgatgatttccgtgaagcctatgcatggctcagccataacacagatgttgatgacaaggtacgctcatcccttgccctctatttctaagtgctctgtgtttttctgacagtaagacggtccactgcaggttgcgtcctggtgggattatggttatcaaacaactgcaatggccaacaggactgtaattgtagacaataatacttggaataatacccacatagcaacagttggaacagcgatgtcatctccagaaaaagcagcttgggagatcttcaattctttagatgtcaaatatgtccttgttgtatttggaggttgatgctttgtggacttctttagaacaaatcaataactagtggccccagatccctgacgttgggtgtttactttacaggtcttgttggctaccctagcgatgatattaacaagttcctttggatggttcgcataggaggtggtgtattccctcacatcaaggaacctgattatcttgtgagttgtgaatctttttagggatggtgccttacacatcattttggtgggcataaggaagaatagaaatagtgaaacaaatatatgagcttgattcactattctgatttctcatgttattttgttgccagagggatggtaactatcgtgttgatgctcaaggcaccccaactatgctgaattgcctcatgta

SEQ ID NO: 11333 - DNA, 1654 bp, Oryza sativa
tttgcggcatcactctggtccacgagatggtaattggatccacatattatatctggtaatgataactataaacaggcttccattttattttttaccttttgattaccttgtaaacagtcatagtgccttagtgatgtagttctctagtggcttacatatgcttgcaagttattaagtttcataacatactattcgtaagagaataattttgatttgctcgtatttcaggcttttaaaaaaataaattttccaagcaccttatgtcatcaagtagcattgttgtggcagtggtagtttttatttacatattaatagcctattggactttgtttgaatattgatctctttgaaattttgtacaagccattgtctaaccaaccttttttttacaaacctttatcccggatgtgctcatgctgatatttcatagaatttcacattgttgatatgacaaaactgacaattttcagtcctggtctgggtcttatactgacaataatgtttgtgtacttggctttgaagcactcttatgatgctcggaaagcccttcaaaagaatggtgtccagctaagcagtggcgtcattattggggtgaagcctattgatccaatgcataggcagcagctcgatgagaggttcgctggaaacaaacaaggaggcttcatggtttccttgcctccaaagtctcttgttctgaagggtaccggtgcgtcgaatcagttgggagccttgccacgcccctatgatcctaaagctaacacaaatgttatcagagacgctaaccgtcgtgcaacaggtagcgttgctgcaccagcaaaatctcttgtaacgaatgtgatggatttgatatttggcatttaacctgccattttgaggacctatgacctcaacctttccatgtttcttctatgttactagtcctcttggaggacgtggtggtgagcaagatgtcagcgtgccaaaggtccaggagcaaatttgcctaagatttagagaaattggagagggaacttatctttggcgatgtaaccttcatattttgcaaccttttcttttttggctgcacttctatattatgattcactgagagcagttgttgtatgctggttgctatatagctcgggatgaaaaaaaaaaattccatagaaatgatgaaaatacagagattttttgggattaatttagggaaaattaggtgatttcagctttaaaaatgatcggggagaacaatttgattgagtatccatactgttgatttatcaatgccagttgattaaaaaaaattcttgctggaggctgctgaataaccgaaattgtgttgaactggcactcgaaaatatttatactacataatttggtggttgttgccaccatcttgaatagattggctgaattcaccagttatttggattcatgattttttaattgtgttgcataatcttctgcttttccccaatgtcccatttcagtttatagaagttacatttattcatttttttttaagaataattattaaatatgttgctgcaacctatgataaattgataatgaagctgtggcaattaatacgtgtaaaggcaatggctcttgcctactttaaaatcacagacaggcttagtttagttcgaatctcattgtgagccatttttttctt

SEQ ID NO: 11334 - DNA, 676 bp, Oryza sativa
ttcaagtagtcggactcttttaatcggatctgatgataccctgagtagcaatccaggaaactgagtagctcgcagccggccgttgagtcaactacctggtcaatgcgaggtaacccgaagggatctttgggacaagatttgttgaggtcggtgtaatcaacacacatacgccattgcactgtcctcttccgaaccaggaccgggtttgccagccagtcgggatgtaggacttccttgatgaagcctgctgctaacagcttggtcaattcctccgtgatcgcatccttcctatcctgtgcaaaacggcggagtcgttgcttaatgggtttagcgtcttccttaatatgtaaagagtgctcaataacctctttaggaataccaggcatatcagatggtttccacgcaaagatatctttattattttgaagaaaggtgatgagcgcgctttcctatttacaatctaactcagcgcttattacagcagtcttagtgggatcagagggatctagaggaattttcttagtcttggcatcgccttctccgctctttttggaaattaatttcctttttggggggaaattttgcatgtacaccctaaaatcttaaatatataattgttgttaattggaatattagaattgattttaaaagcctagaagagaagatctaattttaa

SEQ ID NO: 11335 - DNA, 565 bp, Oryza sativa
  unsure (1)..(565): unsure at all n locations
attcctgcaccccatctatgcaaaatgtgcacttctcaagttaccaaataaacgtgcatctcgtagagcatcaaaaacagcacgcaaatgaccatgatgatcctctattgatctgctatatgtgagaatgtcatcaaaatataccaccacaaatctgccaatgaaagcacataaaacttcattcattaatctcatgaaagtactgggtgcattagtgagaccaaagggcatgactaaccactcatataggccgaatttagttttaaaagctgctttccattcatctcctaacttcatgcgaatctggtggtaaccactacgcaaatcaattttagagaacacaagtgaaccactcaattcatcaagcatatcatctagcctagggataggatgaacgaaaaatctgaatttttaattggaaatggggtttttggggtttacccaaaaaaaaaatttttttttgggggccgtctacaatccacacacatgcgccatgagccatctttcttaggaactaaaagcacggggacagcgcaaggactaaaaaactcacncacatacccct

SEQ ID NO: 11336 - DNA, 523 bp, Oryza sativa
agttcataccatttggagcaggcctaagaatgtgccctggtttggcatttgcgtaggttagcatggagcttgctcaagcctcattgctatatcatttcgactgggaactccgtagtggtgttgcgccaagcaatctagacatgtaagagaagatgggtatcaccatccgaaggaagaatgatctttacctggttccaaaggtccgtgtgcctctatagtttggctcgtaactgcttcacacaatatgtgtctcctgtgacccgtacctgccaagtagcgatcatgagcattccattgtgtttcatgcccttatggtgttatgctgctcaacttttttaatgttttctcgaaataagtaccatcatagttgttcatgtaactataaattacgagtttaatttgtgtcgtagttaacaagctcgagttgtttgtgttgttttccctttgctaaaatgctaaaacattcattggagagggagagagtggtgtaagctagtcctaaagaaaattaagaacaccaaac

SEQ ID NO: 11337 - DNA, 1423 bp, Oryza sativa
ggcggtgagatggtccttttcttttttttcttttttattttctctcgaatcaagtgggatacatatcccaaatcaaaccccaaatacccaaatcaaacccaaaccaaagtaacatcacaaatcttatacatcacagatccatacaaatgtacaatgaatcacaatattgtccatacaaaagtacatcacagtgaatcacaaataaaaaaacaatgttgactgccgctgtcgccggccgccggccgcggccccatcggccgccgtcgcatggccgcctgccgcgcggccgccgcacggccgcggccccacctaccgccgcccacggccgcctcgctccgctgccgccgcacggccgcctgccgcgcggccgcctcgctccgccgccgccgcgcggccgcctcgctccaccgtcgccgcacagccgcggccccaccagccgccgccgcgcagtcgccttgctccgtcgccgccacctcgttccgtcgccgccgcccggccgcagtagagaggggaaggaggaggaggaggcggggatagaaaaggggagcagagaggggaaggaggaaggggaagggccaggggaggaaggggatatcgaggaggcgctggaggcggataccgagagacttaaagaggagagaaaaaaaggggacttaaaggcggggatagcatgggaatctttactcccggttggtattaccaaccaggactaaaaatacatctttagtcccggttggtaactccaaccgcgagtaaagcttccaaccgggactaaagatgacaaggcctgacagatttagaaccgggactaaagatcatttttagtcccggttggtaacaccaaccgggactaaagatcaaatatacccgttgtagccaccaaccgggactaaagatcatttttagtcccggtttttagtggaaccgagactattgtggatttcgggcgaccgaccaaagacggtttctccaccagtgaatgcatccgctagctagtaaatgtgctgttatttagaacagttaaccaatggttatgtactattgttagcgatttgagttgcaatttgcaactcccgtatgatcactccaacaagcacaacacccatgctgatgacgatagcacagcaatataccttctttgtctcaaaatataaaagattttaaacagatgagacaactttcaggacatcaatatactatctatctagattcatagtctagaaagtatctcatccgttcaaaaatacttatattttagtacggtcgtagtagtaattattatgcagcagaggcagctggaatttttggctatctatgacaaagctgacctttgaaaattgcaaacttcaagtcaaaccattaatgcaatacttaatgtatggctcgctttaactgcaaagctgactactgaactcacggtgaa

SEQ ID NO: 11338 - DNA, 523 bp, Oryza sativa
gtcgaggctaaacttaagcgaatggtgcttgttgggcttgcatgcagtcagaacaacacagaaacagagcccgataatgtctaaagtcgttgagctgctcaaggaagaatctgttgagaatctttccaacttggagaataatgagatgttcaagcttgatctgaccagctccttccaggactcatctcattcgtctcatcctgatagttcagactgcatcacaaaagagaagaactcaaaagcagatacaatagacgaggcagttgattcaagtgagacagtaccttcagctaggtagtttgatgcatagaattataagttatctgtcattcatcagcaggagttattggtttccttccgtggagcattgtgtgtttacctctgcatgcgtgtttatgccttgtttaccggcaggtttgggtgcttcccttgtcatctcacagatatacttatctgtgtgtatggttaattgttacaatctgttttcggtatggttgtaccatggcttgtaaaattctgcata

SEQ ID NO: 11339 - DNA, 616 bp, Oryza sativa
ggaagtgcaagctcaggtttggcatataatcgtagactatcaggcgttcttggccttcggcacaatagccacgtaagctcaacaggctcttgtgtctcactgtcgccaaaacctccacctcaattgcaaattcagtttcagctttgttgctccaactcttgagccttttcaccgcaatctgtcccatgtagttaacagaagaagcgttaggttctggttaaagtgaactactttttcctgattttggattaaacagatagaaggtaaatagttccaacataatacttatgatttatgaaatgatgttcaaaaacatacttgtcaaaacgatagtttgaatttgatattgtaggggctgttcaaattgatgctattttcaaccataccattttttggtaaagctgccaaaaaaatgtctatgtttagtttggtgtcaaatttggtaaatacaaaaaaaatcctgccaaaattttagcaatattggtattttaaattttggcaacattgccatcttgctaaaattttgctacaatctgaataggcccggaattttttttcacccaaaatgaaacacaactcaccgggatgtagcagtttgggggttatatcaccatgc

SEQ ID NO: 11340 - DNA, 603 bp, Oryza sativa
actatagggcgaattcgagctcggtaccccgcatatgtagcagtagacaagtagcatctgcatctgcgtgccatacacgattgctccagctagctgcacctgcacatcgccatggccatggccgacctggagttggagaaggttgcgagcttcttgctggcggcgctgctgccgctcgtgctcttcaagctggcggcggcgaagcgcggtggtggcgatggcggcatgaggctgccgcctgggccgtggcggctgccggtgatcggcaacctgcaccagatcatggcgggtggccagctcgtgcaccgcaccatggccggcctggcgagggggctcggcgacgcgccgctgctgtcgctcaggctcggcgaggtccccatcgtcgtggcctcgtcggccgacgccgcgagggagatcatgagcaggcacgacgccaagttcgccacacggccgtggagccccaccgtgcgggtccagatggtcgacggcgagggcctcgcgttcgcgccctacggcgcgctgtggcggcagctgcgcaagatcaccatggtggagctgctcacccgcgccgcgtcaggtcgttcccccgcgtgcgggaggagg

SEQ ID NO: 11341 - DNA, 628 bp, Oryza sativa
tttcttgagccttgcttacaacaaactaacagggagcattcctggtgctattggtttcttgccaaacattcaggtgcttgtactgtcagggaaccagctttcagggccaatacctgcatcgctgtttaacatgtccagcttggtacggatgtacctgggcaagaacaatctctctggctctatcccaaacaacggaagcttcaaccttcccatgctgcaaacagttaatctcaacacaaaccatttaactggcatagtgcctcaaggctttggggcatgcaagaacctgcaagagttcattctattcagcaatggcttcaccggtggcataccaccgtggctggcttctatgcctcagttggtgaatgtctccttgggtggcaatgacctttctggtgaaatccctgccagcttgggcaaccttacaggtctcacccatctggatttcaccaggagtaatctgcatgggaagataccaccggagctgggacagctgacacagctgcggtggctgaaccttgagatgaataacctgaccggtagcatcccagcctctatcagcaacatgtctatgatctctatccttgacatatcctttaactcattgactggatctgtgccaaggcca

SEQ ID NO: 11342 - DNA, 738 bp, Oryza sativa
acgacatggaagaatggaagagagacctaatttttgttagcccaattatacccctgttaaatcaacggttagattagattggtacctcatgttacctcgtacctcatggtacttccttaaggatgggaaagatgctctaaacctatttctatctctctagtttattttgtgagagcgttttatccagctccattcctattttggatgagctgaaactatttagctgacctccaactctaagagatgcttttatttggcgtaaattgagcgttgtaagttattggctagtcagtttcaaaataataacaaaaaattattggctagtgaaaaccaacaactgcgaagttcagacaagaacaaggtggataatataacgggatcgacatgttgtgtacttgtgtggtagtgagctcctctagtcatgcaagcaggatagacccgcgagctgctacacttgtcctcatttaccaacacacaagctctcccttgtcttaactgttctccaaacaaataagtacttccaagaatttttcgttcgaaagattcagccttggtgcaattcaccttttctttggtgcgataaaatggaggccgccatcaccatggatgagaacttgggacgaagtgggtcatttcgagctgcgatgagcatctttggcgaaagcatcaacgggaggaaggcagacaagaacagaggaactgttccagcccaagaggtagtgtctgaattcacacgct

SEQ ID NO: 11343 - DNA, 657 bp, Oryza sativa
aatctgacttgatcttgtttaacttgataactacttcattcattggaactctgtcatcaggtgcatctcttgagcaaagcaagcccaactcaattatggatgctagacagatattcaagatgattgaatcctcagatagcttactcgaatcctcagtaccacccgtatgaccatcttgttgtagactacagtcggcgacatttgagagctcatatgggaatgcttgactaatccattgcctgaaggtcaactcattgacgaacattggatcagttggttttttccttgtgaagacttcgaggaggacaattccgtagctgtatacgtcacttctgcgtgatgcttttcctgttgatcctaactctgtttgcaccatgtcaaaagagaactggtcagcttaagttagatgaaacaagaatacagattgtacagactttacaagggttatcacctggtgccatgtatcctacagtgcctggcatactcgttaatgtgatagagttgtcatctccaaacagcaacttggaattccgaagtcggcaacatgtgcaaccatatcattgtcaagcaaaatattgcttggctttaaatcaaaatgcaggacaacctcaaagtgatggtggtgtagatactccattgccatcgcaacatccagca

SEQ ID NO: 11344 - DNA, 630 bp, Oryza sativa
tatctgaggtctgtcatcatatccgatccaacaaatcgatggaatggttctattatgttcagtattccatctactacgactagaagaatcagcacaatccagtcatacatgtgtaggcgagcaattttggatccatgagatgttatgtacggagttggaactcccagatggatggatgccgatggtgccggcatatcgtacgtactgacttgaattcccagattaggttaagcaatccaattcgcaagataaatcagatggatgttttgcctgtccatcaaaagaagtacagaaatcatactcagaaccttgaattcgtgctatttaacaatagttgtacttgtccctagaactctaagaactagccatgcatccaggatagccgaacctcagcatcatcagtaattagcatcaacacagcaatacggttttcttctgaaacggacatgagagatgggacaccgaaccttacacgaagcgttcacgacggaaagaacggccgccttggcttgcgcccggacaaatctctcgtcgtctcccttctggcttctcttccacttctccttttccccggacaccatgcgatacgattcacaattgagatatccttccgtgcgggggatgaaaaag

SEQ ID NO: 11345 - DNA, 1271 bp, Oryza sativa
gacccccacgaccgcgccaccgctcgtttttgggcgacctacttcgacagcacggtaatcgatggcatcttcctgaagaaatcaaccttagatagatagcaacgttcatgtcggtgattgagaaatcaatattagagagatcgacatttttgttttgatactgtattaagttcttcccgccgtggagggcgctgatgagggcgacgacggcggagcagagagcggaggccttcatgaacgccgtacctcaggtggaggtgctggagcgagcgttcgtggagtgctccaaggggaaggcgttcttcggcggcgacgccgtcgggctcgtcgacgtcgtggtcggcggcttcgtggtgtggttcaaggtggtggacgaggtggccggctccagcctcctcgacgaggccaagttcccgggcctggcggcgtgggcggagcggttcttggcggtggacgccgtccgggaggcgatgcccgacgccgggaagctcctggagcactacaagggatttctggctaaattggcttcgccagctggttctacctaatggcaatctatctgccttgctcgcctgctttgacgatgaagaagttgtttggtactgtgtcatgtgaaaatattttgttagtctctgttgagcggtgttcagaatgcaaatgtgtacatcttgaataaaaggagagcaaaatagtgaggcgacttttagttgtacaagtataattttgctcaatcagcagtgtgatcacaagggtacagatatgagggggcatagatgaggtgcacgattttttttttaaaaaaaagacgaatcgactcgagtcgattgcttcaagttttttttttcgcaaattgctcttcatcaatcacaaattatttatcaacatcgcaaatcacagaaagtgaatcacaaatttttggcacaaatgcattactactcaaatcagaatccatctaatatccaagtattacctatccatttcagcatcaaaggagaaaacaacatcaacaagggagatcggaaaaaccaacaaatcattaccgaatccataaaaaatcaacttgccaagggtatgggggagggagccaccgattctgctagtggtcacctccgtagtcgtggtcccatccgtgccggcactcgctataggtgaagtctgcccgctcgctcactgacatcgagtgacccacttgcgcgtggatctagccatccccaagttctcggtgatcgaatctagcgccgagctcacaggaaccagcaacccatggtgat

SEQ ID NO: 11346 - DNA, 1167 bp, Oryza sativa
gaaaaagtacgaattactcccccgaactatcgcggtcgaccgacttacctccctgaaccacaaaaccggacattcttcaccccccaactatgcaaaccggacgaattacccccctcgacccaatttgcggtggttttggtctacgtggcatacgcgtggcagcccagtcagcattatatttataaaaaaatgtgggacccacatgtcatactctctcattcttcctctctctctcttctctctctcgctctctgtctcactcttcctctctctctctctctctctctcacggtcatgggtcggcggcggcgggggacgaggaggaggtggcggcggcgccgacgggggacgaggaggccgcagtggcacgggacggatggacagaggccatgacgaggaggcggcggcaacgcgggatggacggacgaaggcggggacggcgggggacgaggaggccgtggcggcgcgggacggacggacggaggcgggggtaggttgtgggcgggtgtggacggtgccgagagatgcgtgctggtggcggagctggtgcagatgcaaggcatcttgaggcaactggaggtggaaatgggcacacatgggggcgttggcggcaggggtagggcggcgatgtcgtgtaccacggcgaccacacctgcgcgcacggagcaacatcagcagccgacgctgccacagaagtagaacgccgtcggtcgcattcacctccatggccgtcaacgcatgtcgtcgtcccccttcgtcgtcgtcctccactcctccgtcgccatcctccactcctcatcccccgccaccaccgacccgtgagagagaaagaggaagagtgagacagagagtgagtgagagagaaagagtgtaagagtatggcatgtgggtcccatatttttttatataaatagaatagaatgctgactagactgccacgcgtacgccacgtagaccaaaaccaccgcggattgggtcgagggggtaatttgtctagtttgcatagttgggggtgaagaatgtctggttttgtggttcagggggtaattcggtcgactgcgatagttgggggggggtaattcgtacttttccctttttgttatgtgttcttctactagaaccttattgcttttagtttgaaacagattattgagcagattgttgcgg

SEQ ID NO: 11347 - DNA, 1939 bp, Oryza sativa
aagcatcacgtcaatgtcacgtaggacgaaaactggtcaacaccaccatgtagacgcacgacagcgaaactgctcttcaaaaccaccgaggaagacaaattgcatcagttttaatagttggagggtcaagatacccggttagtcaaggcagtcaaagtgaacttattcaacctgcaatccctctgtctccgaacgcaggcccgttggcccagctgcgcaatgcctgctgccgtgctccgtctcgaactctcgatcccctgtaacctgtttctcgtcttcctactcctttggactactagcccgacgcgaccaaagctgaatcaacctatggatgcagtggcccaatgcccactggccagctggtccactccgtcgatctcgtcttcttcctttccacggcacacggcagcgctgacggaatcactcactggccactcaacttgctactcatacccgatgatcaactgagccaatatatacactcgttctcttcagacttcagtgcaagatcacgattcacgagtccgcgatggcaggacgtggtggaggaggagagctgcggctgctggggacgtggtcgagcccgtggtgatccgggtgagagtggcgctggggatgaaggggctgagctacgagtacaccgaggaggacctctccagcaagagcgaccacctgctcaggtccaacccggtgcacgagaaggtccccgtcctcatccacggcggccggccggtgtgcgagtcgctcgtcgtcctggagtacatcgacgagacctggggagccaccgggacgccgcagctcctccctgccgatccctacgaccgcgccaccgcgcgtttctggaccaactacgtcaacgacacggtataatgactggacatcagaacggcagataggaattctgtttgattggttgatttcctttgcaattttttctgcagtttttcccgtcgtggaaagtgctgttcaggtcgacggcggcggagcagagagctgaggcgttcaagaacgtcgtccctcgcgtggaggcgctggagcgagcgttcggggagtgctccaaggggaaggccttcttcggcggggacgacgcggggctcgtcgacgtcgcgctcgggagccatctggtgtggatcaaggtggtggacgaggtggccggcgccaacctgctcgacgaggccaagttcccgggcttggcggcgtgggcggagcggttcttggccgtcgacgctgtcaggcaggtgatgcccgacgccggcgatgttctgaagcagtacaaggggttcctggccaaatggactgcaggcgctggttcgagctgaacctgaacacaacggcgttgcctgctttcgtcttcgtggattttctaggtgtagaaaatactttctgcttcggggatctgtactttgaggagtacgttgacacgcgtgatgaataacagttttcttttttgtttcataaaaggagggaaatgttgacacgctgttcagtgaactactttagtgtttctagacgaaccacttagttgatttgctaagcacacttttaaacggcaaatatcgttcttccttgtcacgaaattcgtatcgttccattaagttgcattcttttggaaaactatatttcatccttaaggtacatcccctcgctttgcatgtcacccaaaaaatcatctaaagtcttaaaaaaagaattggtatgacagattgatctatcatgtcaaaaattttaaaacttttttgatgacacgtacaaaacgagcgtatgtcttctgttaagagataaaatccacttcctgttccttttaagcgtccgaagacatttttggaggatgacaaaatggttctccatgtttgaaatcgtggactggaagtagttacagacaccaatatacgatatatactgtattatcttactccctccgttctattttgagcgcaac

SEQ ID NO: 11348 - DNA, 1733 bp, Oryza sativa
cctatggcggttttcactgacgtggtgcctacgtggctaatttgactcggttttcatatgacgtagctagtgacgtggcgcttacgcggtaatttttatttggaaaattgctatttgtggtcccacatgtcagttacaccaaaaaaattcattcaaaaatggtgggacccatatgggccccacatgtcattcttaccccctcctcttcttcctcctctctccccaactcccctctcctttgtcctctctccaggccgggcgaggctaggcggcgcgcggtagtcgggagaggagggcggtgcgaagcggccgggcagggcggcgcgcgacggccgggagaggtgggcgggcgcgcgacggccaggagaggcgggtggcgcgcggcggccgggcgaggtggggaggcacccatgaccccgctccgccgcagcacgtcacgcagatgcgcgccacgccacacgaaggttgagatggcgctggcagttgaagccgacggtctggcgcaccatgttctgctccttgtgttggttgcccgcgcaaaccaacgtgacggggaactccacggtcaagctgttccatggtggcgagcaatgagtcgtcgagcaacatcgacttgttcccatccaccggcgacaaccgtcggttgggctccaagaccgactccgacgacgatgacgacataccaccggactgaaggtagttgtaccactcgcgcctcgaggtggagcctcccgtcaatgacccatgcgacgaggccacctctgacgcagtgacgcgtgggtgcgtcgcacccggtgtcgtctggctcaccggcaagcacccctttaactccgagccgctgctgccgtgcctcatgcttgacggtttcatcacgccgacgccagtccactacgtgtgcaaccacggcgccgtgcccaagccggactggtcgacaaggatcgtggaggtgaccgggctcgtcaagcgccccgcgaggctccaccggcgcggagccaacttttattcaaccgagtcagccattgttgccgaagaggggagagagaggagaggagatggggagaagggaaaaggaagacgagagtgttaaccattggacgagagtgttggggcctgcgtgggtcccatgctaactaagcttatcatgtcagctaaaaccagacgtaaatactgcctaggacctcatatgatccggttttgtaaattgtgagggactcgttatatctggtattttggtatagggacgaatttcagactcgacaataatttgagggacgactcgacaataatttgagggacccaaagtgaacttattcctaccatatattggttaggaataagtccactttgagtccctcaaaatatatgtataatctaactcgtatccccaaactgtaataccggatatcttaacccctcaactattaaaatcaatgtattttgactccctcagtggcttcaaagcagtttttacaaaggtgtcatgtttacctcggttgacttagcatatggaaccatttgtcagtcacccttctctttcttctcttcatttccttacccatatttcctcactctctcacccatatttcctcatgacggcaaaatggcagcatggcagcggcgagataatagggtggtccggcaacagagggtgggagttggggactccgttgttttggcacccagagacggccacagtagccatcgagcggcagcaagttgagggagatgggtgg

SEQ ID NO: 11349 - DNA, 936 bp, Oryza sativa
tggttgttagtacagcgcatgggcttaagttcacacaatcgaagatagactaccatgacaggaacatcaaggacatgctgtgccagtacgctaatccaccaatcaatgtgaaggctgactttgcttctgtgatggatgttctccagaacaagctgaatggtaagatctgagctttagttaaccccccatggccgttatcttgcttattgtcaccatgaactcctttttctgcatcttattcaactgcagttgatgaacttggtgtgtcacagtaatctttaatttgtagtactaggttttgaggctcttctaactatacacataagtggatagagctgttccttgtactttatatatgtatcatataatatgacaataagtggttatgccctagcacttaattgaataattgtttcgaatggatacctgtgactgcctttccgattgcttttactcactattgtctgtcaaattgtcaatgacaataagaaaccctctttggttgcatggtttgaagtctgaactgatagaatttattaaacatttcagttgctgcaaatcgctttagttttgttagtcaagaattcttttctgaaaagcataatataatccttgttctcaagacagcaagtgttatatagcaccgttgtaagtatataagaaaatagttttattagaactacatagcaatgttccatgttcagagtaaactataagtggatatcctaaatttagttcggttaaaactgtaaaatctctagtgtgctggacctatcactatttctgaatagattgtcatataggttgactgcagtaccacagtctttccatttagtagctttaagcctttaagctagattgtgttacaaactgaccaatcattctaggtggtttgaatatcctgtgacaacaaataaaatgtgagattgatctttt

SEQ ID NO: 11350 - DNA, 1145 bp, Oryza sativa
atatgtatatacaagtgttgattaagtaatcactcatttgaatacgttgttacttgcacacactgaattgagccataccgggtgcattctcctcttgttcttgcaaggccgctgcacgccatgagctcataaacccgtagcaacggcggcacaagatattgttttgcagcacggcaggagccggctggaccgctggaatatgctgctgaaccgccgttcgctttcgccactatttgttgcgtagaaatgtagaatcgcgtccattttcagagatatggtgatcttgtgtgggagcagtgctgcagcggctctggtggggtccccgacgattcctccagcccgtagttactatccatccaaaatcattttgcatgacgttgtcctctcgatctcgattttccacgttccaaatatgcgatggtagttcgctcttgtcccaaaaatggaggatagcgtacagctcagtggatattcactttttttaaaagaaatacacagtacaacagacactcacaatgcacgcatactcacccctataaaaacgcgtaagcaacagtggcggattcaggaaatcgattcgttggtgtcataatgtgtctatcggtgctatagtatgctaatcatgcttagattatggtgttataacatatgggtaaacaattttgctatagttttgccaaaagtcgtcggtgtcgcctgacaccggtccttcttctactgtatatccgccccttgtacgcaaaccctacccctataagcatcttcaaagactggaccagcaaatcaaatcctagagattggtgaagtcactttaggcgtctcactgtcgacgggcacgtcgcctactactgaaagcacaataccgttaaatcctgaaaaatttgctcccatggggagtcgaccccagcacctaaggtgctaaaatttcaatgcaatatgaatggaatgcgaacagtaagctgctacctacatccataaatataagcaattttagaatgagtacacgtttatcgatctaaatggaagaaaaccgataattgagccttgcaatatccattaaagggaaccggatcatttcataaaaagtgaatcgggattttttttttcttagtgctataagattgaaataatgatcttccgatgct

SEQ ID NO: 11351 - DNA, 850 bp, Oryza sativa
gcgcgccatggagaagagccacgccaagagcgacgaggcggcggaggacgcagcgaggaggaagaaggaggaggcgcaggacaaggcgctgctgaagaccgcggaggccgagctggacgcggcgaagaaggagctggagacgatcaaggccgggagcttccagttcatgacgtccatggactgcacgcgcaccgagatcatgcgcgtcgccgaggagatccgcctgctcaaggcgaaggaaaagaaagcggacgcgcaggtgcaacagctgaacaccaagctcctcaaggcgaaggcgcggttggaggccgtcacggcggccgacgagaggtcgaaggcgatcgtgtccaacttggcggcggcgatgaagcaactgaaagccgagacggaggcggcgaggatggaggaggacctcaccaagctggagaaacggtgcgtgatcgcggaggccgagaacatcgagaaggagatcgccacgaccgagggacggatcaagcagtcggtgaaggagctggatgcggcgaaagcgttggaggccgaggcgatgaggaagctcagggcaccgtggagagcacgatgcaggccagggcgtcgtcggcggcacggcggcaggggacgatgaccatctcccggttcgagtacgagtacctgaccgggcgcgcggcgctggtccgggtggtgaccgacaagaaggtggccgcggcgcaggcgtgggtgcaggcgctgaaggccagcgagaaggaggccgcgcgcgcgccaggcggcggagcgggaggtgagggagatggaggccagggcggcgcatgtggcggcggaggcggagaagacggcggcggagcagaaggagctg

SEQ ID NO: 11352 - DNA, 518 bp, Oryza sativa
acaggtcaaatccaatcgcattggtggccactcccgagagcagcatcagcgggtgattcctcttgggcgcctgcacaaaccaagctagaaccaaatcaacaaccataaccactaaccagccgccaccctctccgctgggaggggaataagcacgcgcacctcaggcggcgggcggtaccgccagagcgcgagccgccactctgtgccgggcacgggcacgtagtgcagctcatccgccgtgcagatcgcgggcttcgccccctgctcgcacgcggcggccgcggaggcgagggcgcgggatggcgacggcgaggatggttggggcggcggcgggggaggcggcgaggcgcggtaggaggcgaaggcccggacgcgcggcggcggcgggggagccggagggggaggggcggacggggaggaggcgcgcgcggtggcggcgggggaggagaggtgcgcgaaggcggcgccggcgaggaggacgcggaggttggccgcgtggaggagcggcatggcggttg

SEQ ID NO: 11353 - DNA, 703 bp, Oryza sativa
gaacatcagctcaccaataggccgatacggagtgggcagttattgagcagtagtagtaccactgcaagttttggcatatcaaggaggggtatgtggtgtgccatcaaagaaacacattaggagtcctaaaccacaataactgaaagaacatgtaatatctcgctatcgacgaatactcatgtcaagtttataatctgaatttagatgaacaggtttcaccacgagaaacataaccaagttcataacttagaccgttttagactgatgttaaaaatactcattatcaatattttggtagtttgaatattgcatatgatgattttggttagaagataaactttgattctaccaaaaatttggtttctaatatatcaaatcaaataggaaaaagtatgaattacccccgaactatcgcggtcgaccgaattactcccctaaacctgaaaaccaaacatcattcaccctaaactttcaataccggacaaattaccccctcgacccaatccagagtggttttgtcctacgtgcgtacgcgtggtagtccagtcagcattttatttataaaaaaatatgggacccacctgtcatactcctctctcactcttcctctctctcacttttcctctctctcttctctctcactcttcctctctctttctcgccggttggtggcaggcagaggatacggagcggctgcgggtga

SEQ ID NO: 11354 - DNA, 4683 bp, Oryza sativa
tgtgcatctatcgtgtactccctccgtactcgtaaaggaagtcgttttggacagcgacacggtctccaaaatacaactttgacttgtttctataaaaatattatttgaaaagtaatatatgtatatttttacgaaattatttttcaagacaaatctattcatatagtttttatattttcaaactcaacaacttgagagttattcatgaactcgtaaaggaagtcgttttggacagcgacacggtctccaaaatacaactttgacttgtttctataaaaatattatttgaaaagtaatatatgtatatttttacgaaattatttttcaagacaaatctattcatatagtttttatattttcaaactcaacaacttgagagttattcatgatttatattcccaaggtttgacttaaatattgtcctaaacgacttcctttacgagtacggagggagtataaaatagcattgatagccaacaacataataatatgtgacttgtatgtgtccagctaagcacaataaaggatcaacccgatccatgtcactataaattctatggttttaaatactccctccgtccctaaatatttgatgccgttgatttttttaaatatatatgatcgttcgtcttattcaaaaacttttataaaaaatataaaactatatatatatatatatacataaaaatatatttaacaatgaatcaaatgataggaaaagaattaatagttacttaaattttttttataagatgaatggtcaaacatgttttaaaaaatcgacggcgtcaaatatttagggacagagagagtattacttaaaggatgctatcataattttagatatgtcactacttatacccttcaaagcattataatacttttttttaacaaactaccctctttattccttcttcctcttcgttggatatgttcctccagcgcaaccgcctcaggaaccgaaaaaagagaaaaatttcccagccgcccaacgtcacgatgtcctcacttccaaacccaaacggcaaccggcggctaccaagcaaagcaacgcccctgctccaggacaacagagcgaggtgaggatatggtgacagcggcgccatcatcgatcgcgccggtagacctcctggcaatgcaccctcacctccctatcttgtcgatcgtcgtcctcctcgatcaacagcccacctcttcttcggtgatggataatgtcgctatgcatgcagcgcgaggcagattagttagatgggactaaaacttcttttaaagactattaataaaacccatccataatcttaaactaattcacgagacgaatctattgaacctaattaatccataattagtctatgtgatgctatagtaaacattctctaattatagattaattagacttaaaaaatttgtctcgcaaattatcttttatttatgtagttagttttataaatagtctatatttaatactctaaattagtatctaaatatagagactaattttaagtccttgatcgaaacaccactctggtgtgacgagaggataagagacgagtccaacacaccccggtggaagcggaccgaggaagagtctgacggaggaggatatctccgatcgatccagatcaagctcgtaatggagcagaggctacaccgtccagtgattgaggacagtggggccactagaccggtggctccacaacacccggagccacgaaacggcatatttacgaaagaaaattaatttgtgaataaaaattttagggagtagttatatttatggcgctatatttttcaaaaaaaaatagtcggtatgtatttacattgtaagtccctaaattacatatgtaattttagtatatctacaagtatgtactaaaattacatactaattatatatgtaagtggtgtgtaagtgtggtgtaccagtgcaatgttaaactttaacgctaatcaaccaagaagatttgggcagcaatgtcgcccggcgtgaaaacatccaacgaccagcgaatactcgtggagcaatcgtacggccagcgacaccgactaaaatcagcccaaaaaactgtcgacatatttttagcaattctgaatttttatatatgtgttattattgatctaaaagtaaatgctgaaaaataaacttcgatgaaaaaaccttaaaattatttagattgaaaattcaaataattgacttataagtataagcataaaaaaaaagtctgccatccccaacactgccgccatggctgctcccgcttgctagtctctctggtcactgccggtgtaatcgatgctacacaaacattctcccagctccgagctgacaccaagctcctcttctccgactccgagcaatcaccgtcgacggccactttcctctctagaggaggaagggaaggaatgctctgagctcctcttgatctgtttggcagcatctagtaggacaggacaggagaggaagaaataaggaggaggacaatttggtccaacattttaatataatacattaaaatggtaagtagttacatgcctccaatacatataaagttgtaaatatgcaagttacaatgatatattttaaaaccaaaatgtttatagtggtacaagtataattaacatgaaatcttatcttatatagtgaaagcaaccatatttcttacacgagaacacgtcacatcatcgaaaacttatcagccgttaaataaagagtttagataaataatagccattggataaaaaagttacatatgcactgaaaaaacaacaattggattaatgtatggaaattttcggaggtttctagtgtctccttttagacacatggtacaaagagagagaggggcaaagataatgaagaaaacaaaaaccacgaagcttctagtgatttctcatatagtatggtttagttaaatctatagttagctagaccaatagatactttgtaaataaattaactcatgctaaaaccttctgtaactaatagatcatatccaataaatagttcttatacaaaataaaaagtcgcgcaacgcacgactacgtggcttgtaaatatgaaaatttcacttagatatatgcctggttatgtaacacttcatctattccaaaacaaattaatctagtatgagatatgatttatgaaactggacataagcatgtattaggttaacttattttggacacatagagtactacatttgtatctttagggcttgtttagttggcaaaaaattttgcccctgcatgtcacatcggatatacgaacacacatttgaagtattaaatgtagtctagtaacaaaataaattacagatttctccaagaaactgtgagacgaatttattaagcctaattaatccatcataagcaaatgtttactatagcaacacattattaaatcatggcacaattagatttaaaagatttatcttgtaattttttggcgaactgtataattagttttttctatatttgatactatatacatacatgtatccaaacatttaatataacaacgtgaaaatttttgtttaggaataaacaggccattactcgtccacgcaacaatggccaagacttctgaataatattttcggggagtaggttaattaagagtgtatacactcaattaatttcatggtataccgacaggttctcggggtgagcttattttatttcaggataatgatgtgcaaccaagtcaaaccatcttggtctcccaaacttaatcatatccaaagtcacgtggtttctagtgactgtcagtcgatggggtgcccatgtcaaatccggccattggtcctggccactgtaaccgcacatatcactgacatatgtgtctcattacttccatactagtcgtgtggtgtttggattctgacttaactttaatctttatatttagacaccaatttagagtattaaatataaactatttacaaaactaattatataaatgtaagctaatttgcgagataaattttttaagcctaattaatttataattagagaatgtttactgttgcatcatataggctaatcatggattaattaggcttaatagattcgtctcgcgaattagtccaagattatggatgtgttttattaatagtctacgtttaatacttataattagtgtccaaacatccgatatgatagggacttaaaagttttagtcccatctaaacatgggctaatagtcagatgatacctttccatgattattttctttcattttttaaatgtgtcagggttatggataccacatacctaatagtagttgactaaatctcggcaggacccaccatataccatgtctcatacggaaacaaccttcggatataggaggagttccgcataaggaatgatgaatagagttctacatgaaaacgataaaggactactcggattttattcatattggtctccttagttctacttggacaagaggacacctatgggtataaatacaagaccccctaggaggagaggggagagggaacaatagatcaagacacaagatcaacatacaagccaacatacgccaagacaagacgccggatatcgacttcagagacaagcatagctagtcccctacggtgtctacggatactgtcaggagagacataccgctgtcattgatctcgccggatgtggattcgaggaggaaggctaccctgt

SEQ ID NO: 11355 - DNA, 12327 bp, Oryza sativa
gacccctcagggagatagagggaggggcggcctcatcaccctcgggcccgacccccccgagggggtcaggccacgtgggtgaccgcggctgccccaaacctctagtcaagatatccccggtcccatgtcaccgacaaagatgttttgactttggtcaaagtcaaactactttaaatttgacaaagtttataaacaaatatattaatatttataataccaaattagtttcattaaatcaataattgaatatattttaataataaatttatcttggattgaaaatgttattattttttctacaaacttagtcaaactgacttagtcaaatttgaagcagtttgactttgacaaaagtcaaaaacatcttataacctgaaacggatgtagcagtttatactcccccatctcaaaaaaaaaaagacaaatcctaactatatatcttgacatgatgaatgtccaaatacataggagtatgaatctatttgagatagctaaacagacgacatgttctgagaattttctttttcgcgaacgcatattatgtgaattgtctaggtatgaagtgtgccctgtaaactactgtacttaactctatacctcccttgtatttttgacacaagattattgagcaatgagtaaatcctagagattttcactatagcagaatcatttgctcataattatttattttgagaggacattattgttcttgattaacaatgtaaagtatatattctcctcaacacccggtcccaatgtaaccgtgaagacggagctcagccacacacgcatggcgcaactgccgcgacaccgaccaacccttcgccatgcctaaatccggcacctccatcgccgccttttatatcctcctctccctctcgccgtcgtcgtcgtcgtcgtgccgtgttcgatcgcgccgcgcatcgcattgacatctccgaggaaagctttggtatatattgttgcgaagctagggccgccatggcagcgtcgacgcgcgtgtgggtgctcgccgcggtgctcgtggcgtgcgcgatcgccgtccgctctgcccgcgccggccacgccagcggccacgccgccgccgccgacgaggaggacgccgccgccgcggcgccggcgccgtcgaaggggcacgggtgcaacccgctcaaggacaagacgtgccggcacgacgaccgccacgatccggagaaccaggaggaggaaggggggttcggcgtccggctgccgtccttcccgtccctcaccggagacgacggcgacgacgacgagctgccgtcgttcgacacccacatgaccatcctcggccactgaaaacaaggctgccatggctgcaccatcttcatcgtcatcatcatcatcttcttaactgactacgtagctctgttgattggttcttgcattttgcattgcttgctctgtatcgagaagaggggaaaaaaaggttgaaaacaagatggaaaatgtcatgtagaattgttgctagagtgtgattctcctagctgatatctccaaaatgttgttgttaatatatcggtattgttcaatcttcagtgttcatcgatctccttcatgaaagcagaggatgcctcttcctctgttcagttcatcttcgatcacaagcaaatctatagaaaatctttaacatacttatatattaaccacgtcattcaaaatggaacaaatttctacaaacataatcgcctgcctttctgtgcccgcgtctctcacaattcagccattgaaatcgcgatgcatatccatgctggattgagcccttcccgttctcatccgatctcgatctctgtatttccggcggcggagcgccacgaattcgccggaggccgtcgtcggagatgaacgttgaaggatcgggcatagacgtcgaagcgtctgtaattcgaatcctatggaaggccgattcggccataagcggcggcggagcagcgcgaacggcgagaggggggacgtgcggcggcggcgccgttcgattaagattgtgtggataagataaaacgaggcgaaacagtagcctcaggccatcggcccagtcaatgtgaacagctactagcccaacctatgaaggcccacaaaacgtgggccgctaccattattgggaaaaaagtccaccgttttttttattaacgaacaagacaaccccgatttcattgaatatagcatgagaaaaatctaggcaacatatacggaatatttaaaaaaagagagaaaaagctcgagtcattagggaccaggccacaaaggctctttgctcccgtcagggtctaagttcttgcctcctctttgatctcaacgaccaaatttgttaaaaaaaacgagtaggacaactcctcaaactaactttcttaagttcactttaacttccttaagcaggcagaatctaatttttacccattgagttaaatagaccgggtagggcgactgttcgaacaattgaaataagtgtaatttgacccccccccccggcagaggttttagaggacagtttcgctgacatggtgcttacgtgattatgttgacctagattttattccacacggtgcttatgtgactttagaattaaaaaaaatatgtgaggtctatttattgtttacacacaaaaaaaataatggaacccctaacatgtagggcccacatgtcatcctccctccaacccttattcttctctccctcccttatctctatctttctctccttagcccgtctacaaggagcggggtcgggaggacggacgctcgagcgacggtgtgggcggccgagagctgaagcggtggcagcagcaacccaaatccagcccaccaagtttggactgcccaatcaggcccatatgggagcccatacaactgggcctcggcccatcacaaccagagccaggagcccagaaacggcccaaaatctctctctctctctctctctctctccgtgtcgtcgggccagctcacgcaaccccagaaacggcacgacattcatccccctccaacggctaccgctgcttccaacgcagcgccgccgcacgcggcctcctccttcccctcccccctcaacaacccaaccgcctcctcctccaaacaaatccacggggaaccatctctctctcctcgcccccgccgccgccgctgctcctcctccgatcggtggagcagcagccttcatgtacataccatttctttctttcttttttattcttgtttttttcaatttcttgatttcttgatcggtggatttattatttgtttgtgttcttggaggagcaggaagggcgaggcgggtctcgatcggtggagggggaaagatttctcctccagttttcctctagttttgatcctggaggaggtggctgctgcatcttcttcttcaccgaagattggaggagtggatttcgtgtggttgttgcggccgaccgctttcttgctctcttggctcgtcggcctccgccgccgatgctgcgggatgccgtcccccgacgccgccgccggcgatattgagagcgccctcgacgacttcgcccgcgccgacgccgactgcatcgccgccgccctcgcctgcggccgcaccagcttctcctaccgccgcctccccgagccgcgccgcctccgcctcaccgtccgcaagctcgacgactcctacttcggtataccaaatcggctctcttccttcttgccatggaatcccctcccattggatttggggtgacgcgttgctgtgttcgttcgtttcttgctgcttgggtagatgtgcaaatcgcgaggtcagccgcggtgtgggagctcaaggcggccatcgaggacgtgttcgccgcgctctacgatgaaacggacaacaaggccatctcttggtacggctgcatgcacatcaatcttgatttgcaaatgtaccaacaaatgcggcgaaaaaaaaaagtttcccctctttgcattacattgtgaatttctaatattcattatagtttcctatcttggtttgtgaaaatgatttcggtggttcctgagattttttttagtttagtctgtgtgttgggttgatatattggtaactaagcattgttttgcttgttttaggcagcacgtgtggagccacttttgcttatgtttcaaggacgagaaattgacagatgacaaggcaacattgcgtgcatttggtataagagatggtgatgaggtatatgcatgatctctatttgtgattggctcatggatgaatctttagtgccgactaattctcctatttttcttgagtatgtgtcatgtttatgcaattgtgacacattagtacacgatagattgctgtatttgcaaataaaaataggcataatttctttgttcatgcacaagatatgcctatgatattaggcaattttcagaatagacactattgcgtgtgggtaagctctctagtcaagtactaccattgatttgtctgaattcctgttgacttttcatgatgccatttgtggtcctctcacatcaaattattgtttcagttttcagaaatagggtaagagcaaatctaattcagcaaaatcttgcactacttttgatctcttctatttcttggtcttagagatttaggtggttaccgagatcttgcatggtctgttttgtgtaaagaacgactaaactaagaaaaggatccactcttacagctcacatgggtttgactggataagcacattcaagcatgcatgtccactaattacatctgttcgagtcttaagaaatcctttgtaaattgagtcatgattctaaataactctccttgtgtttaccgccttcaatcttttgtgcaggttcattttgcccagcatctttctgttgaatacagaccctgcaagtccctttccctcagaaggtaccctgagcttcaaacgcccctgagggcttttcgtctatttgatctacatcttccattttgtacaactttattggatgttcagaattgatgacattcctaatgatttcttatgttaggtcaaggacttcattggatgatttcagtgctaggtcaaggagtttgttggacgatctcggcgaagatgatggtgataagtttatcgacacgaggcattctactagtgttttggaggaagggctatatgtttatcagcacgatgaggagcgcatggaagagagtcgcaagaagggaggcttctttagcggttggttctcctattctagattgaggggcaacagtaggacacattcagaggatgccatccaatcctcctgcgaaaagagagatactcgaactcggccaaagctggggagatggttgtcttccaaaaaaactaaaggcacatagcaatctagattgccaactgtatctcacacgtgttgctttgttcttctgaaatgaaaatcaaaattacattcttgtcagcatgatatgaatgcttcttacttcaacacgatgagaagtggctcctggcataacttggaatatatacctttaacttagtcaatatcagagttttctctgtatgtatatatacgtatgtgtactgtctgactcttgtgcagctatgcttggttgaagaaaaacaatgacaagtcctactatgtggtgcaaccgtgcaatgaaatatttctcctctctactgaatctttcgttgcataagagataagagacatgcttgatgcctaacagattttcacggaacatttagtgagccaactctctcaaattttgatgctttacaacttacaatttattgtcatcctacacatagaatgaacccaagacaacttgggccaaaaaaaaaaaactatccatactaaaatgaacaaattaaacatttaaacagcagcagcagtagaagatcaaagtgtagaagctaactgagaagaaagtgtagaagctaactgagaagatcttgattatcacacagagcttgagatccccagggctatgtctccagttctccacaacacaagactactaatgcccagggcctcgtggactcggtccggccctggcgacggcgaacaccggcagcctccccaccgagaacccgccgccgccgccaacgtgatcacgcagaggcctcgagcactccaccgccgtgcaaagcagcaacaccaccaccacaagaacagccagctgcatcagcgacaacgacgacgacgaccgaaaccccatccccaactccgccgcgctgccaagaacactcgaacaagctagctatcttgaagatgaagaagatcgcggtcgtaggagcaggagtagtaagggtgtttgattggcagaggttggccatggctgggaggaagaagaagatgtgtatataaatggaggaggcatagcagaagtgcaggacaagagacgtgcgttgaattgaacgcgcggactttggatggatgaaaagcggagaggagttgacaaaatggatggaggaaaagtggtgaagtaggcttgatcccgttaaccttcttcggattctgaacaaaatcttcttccttcccctctccttttcatcatcgtctttttctttttcttgctgacgttgcatttacacctcctgtttgaccaccagtgcagtgcagtgcaaatgcatggctagtttggaggtctggtgttttaatttgatttatttaacatgatgcaaatctgcatgcagttggtgctggtctgaatgttttgtgctggaatgacacattcagagcttttgcttggtgctttgataatttaatagaggaattctaaatgtaggggaaactggtgttgcggtatgttcaaagtttcttttttgagtcattgttacggtacagcggtcggtaccagtaccgcccggtaccaaaatcctagccgttggatctggcccgatccaacggctagtagagtttggtaccaggcggtaccaattctatccctatccagtaccacacgaagaactgaggtagaagggcaaaaacgtaacttcgtgtgcaataaccagatcgggagggatggacgggcagctcgaaccctagaagcggcgggattctcgatcgccgctgccgcctcgtggatcgacgccgctgactcctggaggtgaactcagccatcgctgtcgccgccgccgggaaggacgacatcgacgccgccgcctccgggaaggacgacatcgacgctgccgccgtcgggaaggatgacatcgacgccgccgccgccgggaaggacgacatcgacgccgctgcctccgggaaggacgacatcgacgccgccaccgccgggaacgacgagttcgctgttgccgccgacgggaaggacgacttggacgccgacgccgccgcgcgggaaggacgacatcgacgccgccgccgccgagaacgacgagttcgctaccgccgccgcttgcttcaacgccgccgccattgggaaggacgagttcgatgccgccgccgtgacctgcttcaacacatgccaaaatccgccgctcgccgccacttgattgcttcaacgcatgccggtgtcactctcttccgatcctacccataccggaacaaacggcagatttgtactggtactgagcggtactagtaccaagcggtataatttgctggaccataaaaaaatctcttcttttttttccctacctaatgttatgcagtcaatggaattctgagtgttgcgttgcttctaaattgcgaaggtaaattaaattggagtacctcctactcaaagtaaattcagcagtggtgttttctttgccagttagcaaagcacgcactaaattcgtcgtcggtaataatcaccgggaggtgcactttcaaacgctttctgttacatatttgaatggaatccagtccattcattcaaactgttgaatgctgaatcttttaccaaaggcgtccatactggttgttgctatccccgttcggtcatttatactacatatttttttcagctccttttcttttcctatccctcccgacagatttatcttagatctcgtcactcgtcagacgatcaactgtcatgcaaccttttggaaaattttcccgcattgttgttcgtttcttgtgccatgcaaccttgtgtcggtcgggtgtggcagaagccatgtgtcgccgatgtttagttggtggtttcggattaagcgacagaccatagcggtaggcggttccgagcgaaagcttagcccaatctttaggccaacagtgactatgctttcgggcgtgagggcattgttgaggtacccctcctccctcggtaaggagctctgggtgaaaaccttgtcccgtttttgggacggatgacgacggcgtctcttggagtcgcgaccctcgtgagggcgtcattttagagtctttacgccgttgtggtgttgttggcccggtggcgatcggtctcacatagcgacggccagttcggtactcggcttccctctctgtagcgtgtgtttgggcggttggtacatggttcggggtgtgtgccttggtgcacttccttcctcgacagccagctgtcgatgtaaaacttttcttctaatcttaattatattgaatgacctccttcggtcattccggcaaaaaaaaaaagttgccgctgttcaacaaaacccctcacaatgtgagtcctaaaaaaaatgtaagtctgataatttatcctgtcaaacaaattgataccagtgcccctattccttgcattttgtttggaagttcctactatattggtcccttcgaaccttagtcagatcaagattaaataagagcatgtaaaatgagaaaaccattaacgtatgataaattgtgttttaattattataaatttaaaaatatatttatttgatatcttagaacaacttatatatacaaagttttcatatgaactgtatcatttagcaattaaaaaaaacatactaatgaaaactaaaataaagtcgatatcttaattagaaggataattttaccatacctagaggtaccatatttttttatgtagaatttaacgaaacgaaagaggcatgtgtgtggcaaagcagctggacggctcaggtgcatgctggtgaagaaagccttggagctaaggtggcggccgaccaccacccgtctgcgctgctttgcaggactccgcggcgcgtatgcactgtttgcagctacgaaatgagggtgttgcattcgcacgcggcgggcgacgtacgacgacaccgacacggcgacacccgtgcacgaccgaccaatgcaccgggagggagagccaaatctgccaaagaatatcgatcagtagagatcagatcactgtgtgtgttgacagggaaacaaatctgttcagagaggtttcatcccgaaaaaaacaaatctagaactggatattatatattctagtacaataaatctgaacataggtatatccaaattcgtattactagaatatgttacatttagcataggttagttttttatgggacaaatggattacgagttacaaccggaccggggatgttgtcgtcttgatgaaagcatctgtgcactttgccgatggaaaaagaacgggaagaaaaggctcctgtggattttcttttcttctttttttcatttttcttgcataccgcgcgcgcaggttaggcaggttacagcttacagcgcgtggttgtgccgctggtgaggaggcgacgattgtgcgtgtcgtcgccgtgtcgcaaaaattccttgcttcggcgtgtgcatggcgtttgacccccggggcgtcttgacaccgccggcgacgtggctgacttcctcaattctcatgttgctttcgtcctttctccttgtgggttcggtaggttttacatcactccgattttttttcttttaacattttgatatttttaaaatttgttttacaaataaacacttgaaaaaaattatttcagaaataaacatttttcgtggctagagttattggcgttattcatgttaagtcattagcgtgaagagggtcgacaccaaagaccaatttattttttcctgtttgaaaataacttatttgtaataaaaatatatttataaatagattctagacatcagtttcattggccgataacctattttaaaaaaagatatatttacatgtttgtcctttttatatttttttacaaatatgtcatttgcgcagatccccttcacattgatggcttagctttctgggggataaggggaacggcgctggcgttgtcatgttagggtaagacaaactatagagatgttccacaaacatcttacttgaagctctgtttcgagtgcactaagcgaagaggcaagtgatgagtacaaatcatggaaaggtcagtatagcttgaatgaactacgtagtaaaggtttagtacagagcatgattaagtcacggtaactaagtacccgtaacgtttaatagatagaagtaagtaacaagatcatggcaccaatgatctaataagtttttaagagtgtatttgtaaaataagtttttaaaaaggtataaaatgtaaaagtaatcagttttacatcacctcttcatctcttcctggcctgcgccagcgtgagtgcgcgccaagaagaggaagatcgtatgatttgtgccacgaagggagggggacctagattgattttacatattcagaaattctatttcactaacctgagcctaaccttttccaggttgtttgccttcagaattcagaaaaaggttgtcgatttgcaatttcacagacaatcttcagctaaattttccggtgattatgagtttctggctgcgtctctgaaacttctagtgtatctgatttgaacaaggtgaatacggatgcacagtcatccttcagaattttatcatctgaagttatcttcaggttctggtcttctgaataactcttgagcttggcacttctgcacctctcatatattcagttcttcctcctcttgtaaatgagcacaaaacgttgtttatcttcatccgtgtaagcgcacgccgcgtcttcatcaacatcttcaatcttcatccgcatgaacaaatatgttttagattttttttagaacgaaataagttttagataagtctacttcaaaattctgcctccaaactgtgaaacgagattataacaaggaaaaacgaactactactgaagtactgattaactcgatttcgggtgtgttctttcccgactcaccgctctcattttgcacgcgcacgttttccaaactattaaacgatgtttttttcgaaaaagttttctatagaaaaattactttagaaaatcatattaatctattttattttaaaaaataactaatatttaattaatcatatgctaatgagttgttttgtttcacgtgcgtagagatagctcccaacagcacaaaacgaaagcagccttcggattggtctaaggcccattctccatgttgtgaatgggctcttgtatatcgtagcccacctaaaacaaatcgcatgtagggatttggaggattttactaattacttatcgtaaattcgctaagaaaattaactatccgaactatcctgaaaaatcatgtattttaaatgagctacatactataaccctatatactatcggatgagatacagcattttctgcttgaacaatatgtttttctactctttttaatttctgggtgggccttcaacaccggtttcacctttcgttgataaataaataatgttttgtcttcctcgcttggtgcccaaagtgcccaagccgaaaatctttcctcgccaatgggccaaaataatactgcagtatgaaatggactattaatattagccgtgctctatgtattactactagctattaatatttcaaaattagtattagctccccctaccctaaaaaaacgaatacatccacaattatatatacatctagaacatccaataaaaccagatctagcattgaatatattttgataatatatttgttttgtattgaaaatactattatattttttaataaactcaattaaacttaagtaaatttgactatgaaaaagtcaaaacgatatataatacgaaacataggtagtattattttttttcgaacggccaatcaggtgattggcattatattaatagagaggagtttaaatatagtattaatatttcaaaattagtattatctcctcctaccctaaaaaggccttacacatatatccacaattatatcctatgttcctcgtttcttcaaaattcattgtattgtttcgtgatgaaaaaaattacataggatacaatgaagggatcacctatacatttgttaaaaaattttctcctaaaaatttgacagatataattataatacaatcgtgatgcaattacactgtaacttactccctccgtcccataatataagggatt

SEQ ID NO: 11356 - DNA, 8901 bp, Oryza sativa
ccactagcagcctcagctccaccgtcgagtcgttcggcacccggccgcggccggtgctcccgccgcggccgcccccgccgccgccgatccccgacggtgactgccgcagcgactgcgggtcgtcggcgtcggtggtggacgacgactgcgcggacgccgccgcctcgccctcgtgccggctcccgttccagttcgacctcaacctgcctcctggtggaggcggcggcggcggcggcggctttggctgtgcctacgacgacgaggagctgaggctgacggcgctgcggctctgagcccccaaccccaccggtcgttggagaaagaggaaaaggagaaaaatatttggttcttcccttctctcgtagccgacatgatccttccgcgctttgtgttgttcttgtttacttgatctgatgatgattaatgtggcccgatctgcgtatctgcctgcttgctgctggcgatagatgatgattgctgcgtctcgcagcagctcgctgtggttgtgctgttgtaatatagcaacattttacttgcttccttcctgtgaggaagcagacagctaaagtaacttattttcaatctttagctacatgtgctcatcttgttcttaccctttatactcttttagtttttctttctttttggaattgggaagcttgaaacatcccacctatttactagaatagtcagaaggcttgtagcaaacaggaagcttaaatgccagaaatatacagctgaaattcgttctgttaaagcaatgatctagatctgcataagatcgtcttgcttccttgatgcttgtgttgttaacatgttattatgtcgatccacacctgttgttcctacatctagtttcacatttgctttaaatttgtgttatagcataagatcgctttggatgttccatataattccatgtttgtgtgatcaaaagaaattcatatgaaccaagtttagaagctattatttagtgggtaatacataaagaccttcagcatgaaataatgtagcagcctttggaatttagctgaaaaccattagcatggataatttggcatctgattagctgattcattgggcatcaagccataataggctctgttgggcagccatataagctgcagctgctgcggctgctacatcagaaatttgctgcaagctgcagcaatccttaactactgcagctgcagccgcagctgaaaaataccagccgaacacacccataaaagtggatgattctatgtggtgtaaactcaggttaactgccctgtagcaccatatgacattggcgtcaagatgataacgggattaattcttgcaggtggaaaagttatgctagtaacataatgtgttgtggcctaatatgcggaacatgtatttttctaatatatcattgttttgcaaataatcttttctgtatgatatagctaacatttgtttttgtgttttgtcaaatcttatgcctacactgatttgcaggctttcccactaaacctcatacctgttcttctgcgcaacattggcaatcttattagggttctcttgttacatttatgggaggaggcattgaccaaagcaaacgacaaggaaatattcttacataaatgaagttagtaataagttttgttagttgcatgatactttgtttatatcaggggtgatagtttcttataaataattaagttccattacaaatataagggtataatatgcctatgcacctaactcactttgtttttttaacgcaagtcatgattttatcttgaatatcatcaattcatgtccgtttgcattatcctttcttttgtgtgcattgataacattttattctgatttcatcatttatgttgggatgcaacaaaaatgtgctggctcctttctcttaatgctcccactgtttcaatttatgcgaaatttggatatttagtgtcatctagaaaacatggtctgggaaataccattgtagcatatatgaaaatgtagacatgttttccataattgactttgcaaattatcatgctattcgcctaatcagaatctgagcatgatgcactctggtttttttacctaataatgtaagttaatctttaacacgcgatatactttctacttgtagcttcaggttatcaaaattttctatgttgctattaactttggtcaattattatgcagttatctacatgattacatttcttcttcaataggaaatgtccatctgatctttaaacatcaccagtgagaacctatggtaggaaaaagtagtccagatatcatgtgaacgcatcttattatatagtagctattaacatggaaaacatttttatatttttggggtcccagtggtaaaactagcatgcagtcatgcacttcttttatcctttcttcatgttttgcctgacataccgtgaactaataatcctgctgatctactattggataaaaccagaaacattgttgccaacaaagtggtagaagtccaatgggaatgagaatgatttgggcctgtacagcagatattggaaccaactgatgcatgtgatctgtttgtgagtgcttctttctaaacacttacacattactctgaactggtgacgattcttccgaactctgggttgagtaaagtgcaattcactaaaaacatgtttttgggatagtatttgctggaccatttgttttcttaacttttctgttctgctttgcatatttgtgcttgcatgtccaatagtcttcggtactccattgccccagctgcctggttagatttaagggcattattgagcatggtagtgtttatttcctcacatactattggacagtgatactgataacaagaagtaataactactcttcatagatagatttaagttccctgtaccaagtcatgaggagttgagggctgggaaatatgtcatgacaattagatttaagggcattattgagcattgtagtgtttatttcctcgcatactattggacagatactgataacaagaagtaataactattcttcatagacatatttaagttccctgtaccaagtcatgatgagttgaggactgagaaatatgtcatgacaattagatttaagggcattattgagcatggtagtgtttatttcctcacatactattggacagtgatactgatagcaagaagtaataactattaattatagacagattcaggttccttgtaccaagtcatgtggactgggaaatatatcatgacgattgatttcctagcttgcagattcacttttggaaaacctctctctgggaagaagcatagctgatagctgtgaggataaaatggaaactggtttgttaaaaagcacttacctgattagaatcacttctaaaatctggatctttggatgtaatttatcttgagaaaaggtgtaatttagcatgtgtggtaggcaatatgtaaaaacaaaatgtacatttgtgctattcttctttctcaagttaactgtcttgttactgtatggcatccattgcttgtcttgattgatgatggctttgggtttctgtttttgtcttttcgtgctcaagttcattatgtcttattttattgatttgatgatgcctccagagagaattgatctatccaggtgtgcttcagtgatagcatagagtattgaaattgtttcatatagtcaagttggagtggactctaatctactccatgagccaaatggtgcaatcatgggcaaggacaaggtgaggcgaaacagaagaaaacaccccctgtactaaggactggtgcaaagatgtaatataccttacggttatgagttatgacttaagttgtttgacatgttgggcccctatttatatttgtctggctaaaatgctaaatatacttgattgcctcccattgtatgaattgttagtcacattttctttggcctcttattgcagcatgactgattaaagaaatagctcgatgactattttctgccataatattcccagctatgctcatcatggagtaaattcatcactgcatttgctgatttcatttctaaccctgactggtttgattttgcttggtgactctgggatccatacggagttacagtgatattagtgcatcagttttgcatgccttctcttatttctcttgttgagatctgcttttctccttttcacaatctaaatctattggggcattcaatgattgttggtttcacatgcccctggtttctttatcattttaggtattattggtggcactagttccaacagacccggccactgactacccacttgtttatccagtagtaaaatgcaacatgagcagattatggggtaacaagtatggtaatgacctatttggctatttccctgtgtgattgtcttatggcattatttataacactagtgattagtaccattttctgttgtaccttctttgttttgttgcaacttatttaaataaaaatggatatggtgattggtgacctctgttcattcctttaaatgcgtgtatctgaatgaatgctgcagtttgttttcctccatactttctcctgtccagtactactttctttttaatatcatcttgttagtttctggagctaaccttgatattgctgaacatatatatacctcacgatgctatttgctgctagaaagctaaagaaaaccatgaagctagccaccaaaggtgccgcaaatcttgcgtgcacaattccaggttttttccatgataatctggacgcttgtgctgttgtgcagagttagctgcgctaatggctatcactattatactaacattttatcttagcacctgctccgacattgttgccattagtttattgatgatgatctgattagtttcttctcttcttttttacacactggattaaactgactactgctctctgctcctttgtttcagctgctgctccagatcttgcgcgtcactgcctgctcaccagcacgcaggagcaaagcttcccatgtgcctgatgtcgcgccggtggtgtgcaattccggcgacaacgacggcgacggctataataatcgatcatgggcgctcgtaatgaagcttctttcagttattgggatcaggaaactattttaaattctcgagaggacatcctcttgttatttgtactctcgttatttgtatgtcatctaaatggttataaaaaaatttaaaaaaatcaacaaaataaattaatgtgtgataaatcacttcagaaacatgcaaggtcaaatttaaattctacaagttgcaaaaaaaaaacaaatttaacggtggatatacattaaatagcaatagtttaatttgtttttttgttgcaacttgtagaagttgaattttaacttctatgcttgtggagtgatctatcacatattaatatatctagttgattttgttttaaaaaaaaattcataaccatttggatgacatgcaaataacgatggaatgtccactccctattgaggtcgccatttcaagattttttttttctttcttttgcatcatcatcaagccacaggcggtgcgtcggcttgcttctcttaaatttctcttgcaatttggtcgctttccggtttgtgttgatatcttaaatgcatcagctatttgatgaaatgtgtgagccagctaatgtggcctgtactgccagtgcttttgatgtgccggaatgggtacaaattgctgcttgctttcatatggcaccaacaacatgagagcattgctgaaagatgtgtactcgaagtacgacagaccgtgcaagattgcacgatatgtatttgctcttttttctctttttggtgaatgtgaacatgtgattatctgaaatgtacagcagaagaatacgtgaagtttgtgtgaaaacaatagaaaaagatcactggatcaagacttgtgaggctctgagatcttgaatttcttgccctagttttgttattttgagcaaaggctcggttcagtttactcttcgttttcatccaatggctgagaaacatgctcccaattcgtgccggaacgggtacgaattgctgctggctttcgtatggcaccaacaacatgagagcattgctgaaagatgtactccttttgtccataaaaaaacaatttctggctacaaatctggatgaagaatgagtatactcgaagtatgagagaccatgcaaaattgcacgatatgtgtttgctcttttttcctttttggcggatgtggtcatctgaaatgcacagcagaagaagaatacgcacagtttgtgtaaaaacaatcaacaaagatcattggatcctgacttgagaaaatctgaactcttgaattctcgccctcattttgatatctttgaacaaggcacgttcactcttctttttcatccaatggctgagaaatactcccaattggggtagaaaaaggtttgttcagtctgaacaaacaaccctatctgacagagatcttgacattgcatacagcacacaggaacaaaaagaaagatatgctatgcatgagtagctcaagttcagtccagtaaaacaaacctgttgccctaggacaaaaccaggtgctgttcataccttgcaacttgccaaagatacaactccttatgaacatgattgcattaccaaaagcctaaaatactgcactttgcatgttcatatgctgcaaggaccaggtgagaagagagagagagagagaggagggttgcaaaagcagaagccaactcaagaaacaaacaaccaccatgtccttgggtaggtaggtagaaggttaaaggcttgagctgttcttcttctctcttttgcctttccagtttccttcacctgcaactctgttattgttacacctctctatctccataaaggcagtggtacatacactggcaggcagggcaagggcagcacattctctcttccagctgccaccctgttgagttttgcttgcacagagtcacacagctgggtgatctcctttaattaggaatttagggaggctgtcagttctgaaccccaatcataaaaccatccctggtttctctgtcctgtcctgccatcattcctgcctgcttctgctttctctctcttctcttctctcctttcctcttgagaaagaggaaagggagagagaaagaggagaagagcaatcagcccaagaaggagaggccttcatcttcacctgatcggttcttcttcttcttcagcaggcagcatagtacttcatggctgtgagtacaattaactgattaattttacatcttcatcttcttgtttgttgattgcatttgcatatgcttgtctctgcatctagaatcgttcaattgcttccaaacatgaaaatggtactcccaatccattcttgcttgatcatgtgagatgttcttctttctctgctccaattacggtgtgcccatgattgctgcacataatatcaccatcaccatcatttttctttaaattactcgattaaaaaaagcaaatattaggaaatgatctaatatcaaataattagaaggggttaggcttcgaacccagatcgtctagtccaccaccttgtggagctagccggaaaatctatgagtgtttctcaaattactcgattagtgtcgttgtgttcaagccaattactatcaaattaggctcatgagttgggcgaggctactactaccacccccatgtgcaagatgcaagttggtaacatgcataactgcacaacagtcacggcaatggattatggatggacagatggatgggttaggcagagttggactgacggatctgaacatgcgatgctctgagccggctgcactgcacatgcatgcgtgacactatgaatctatgacagcatgatccgtgctaagatcttcatggcaaagagagaggaaaaagaaatttggctggcctttgcttggtttagacgattagtagacgtcaaggagactcatgctggaaatgacaacgacataatagggtcatttgtacagattggagttggctggatgttggactagtagttggcttttcgtgtttattctcccttttttttcacctgacttagcatatgagacgcgtattcgtacatttatatggtgattcttcttaattaggagaggtcggaagttatgctcccttcgttttttttaataactgatcattttcttttgctttctcatttatactttgactattacttacccttaaattggtaaaccagagtacacatatttatgttcacatataggacatacctcactttagtaacatgacaccaattttttagtgtatgtaatattttttaaaagttccaaaatgaatattgtctagtgccagctattataaaacggaccgagttagtttctttggattttgtaaacaaagttagagtaaaaaaaaattctcatggtgaaattaaattacgttgttatatggcatggttaatctcatctcgagattcgtgcagggacaaggccccgtggtgcccaaattcggatcgtgggacgccgagaacatcggctacaccgtcttcttcgacaaggtgcgcgagaacaagaccgcgcccacgccggcgacggcggcgccggcgacgcacgacgacgactacgagttcgatccctacgagcactacgagaacctgagcaggaaagcggcgtcgcgcccgccgagctcgcacggccacgggcacggccacgcgccgccgccggcgcaccaccaccaccaccaccgggcgccgccgccgccgcagcagcagcagcatcaccaccactacccggcgtcgcagcgtagcggcaatggctaccaccggaggagcggcagcaacggcagcagcgcggcgtccgaggccagcagccgcggcagcaagttctcgccgcccaagccgtaccagccgcggtacagcagcaacagcaacagcggtggcggcggcggcggc

SEQ ID NO: 11357 - DNA, 9383 bp, Oryza sativa
tagtttcttttcttgcattatctgttgggactatactgtaatgatgatattatattgtaatgatgatattaggttgcatttctttcttcttttgtgctatatatattggaaacctccatagctattgaacacagcacacgcagactagtacaaatgtaacaccatgatgacatgatcagtggcagaaatgatgttcataacggtattatatattgacagaattatagcccatatggactttaagaagatgtaaggttcggtagaaattcagaatgatgctcctccttatagtcgaggagtaatagaatcacaaagcaaaaacattagggcaggaataatcaattttacctagtatcggcttgtaattcaaaattcttggctttcagatatgtgtttattaatttatttatgcaactgcttccagttagcacttcttttttctaagaacctaatgagccatgaacaatgcagaaaacttccttctgtaacttttgatgtgtggttcaacaagtagggacacggttttttttttcaggaatagccaataccccaacactttttttttctcatatcaacactcgcaactaaggagtatgaaatactcgtatgaactaaagcggatttctaagttactactgctaaataatgccacttctccgatccaccatagactaatggcgagaatttcatacaacaacaaccaacatcttgcagcaaaacaaattagtggaattccgtaacgagatgattcaggccagtacggtgtagtttcgagtttatcacctggtgggggcgccgcggcggaggggaggagtagccatcgtcgctcgtcggatccctagaggtgaggtcccagacacacgacgagttcaccgggcgccgcggcggcggagccaggaggggaggagtggcgcacgacacgatctaggagatggggggttgggcgcgccgcgcagcgccgccgccgtcccgctcgaccggcggcggcggccgccgcttcgcgcttccgcgtgccgtttcgggcttcacgctcccggtgagacctagtattggaccgttcagcagttggcacaagtttctaaggaataagttcatcggaggtcccttaacttaacagcgagattttttgtggtcccttaatcacaaaaccagaaatcttcatccctaaaatatacaaaaccgttcactcaaggtccctaggcaatatatatgggtggttttgctgacgtggcattctagtcagaaaaaaaaattaaaaagtacgtggggcccacatgtcagcagcacattgtttctctttttcttctccttctcctcttttctctcttctctctttctaaactttagtgagggaggccggcggtaggcggagaagcgcgcgcggatgcaagtggtgcagcggaggacgagcgcggcagcggagcggccgcgggcgcgagcgaggcgggccgagcagtggagtgcgagcgcagcggcgggcaaagaagcggagggcgagcgtggcgacggagcggcgatgggcgagcgcggcggcgggtggagcggcggagtgcgagccaggatgcgggtggcgcaacggagggcgagcgcggcagcggagcggcggcgggccgagcagtggagcgcgagcgcgacagcgggcagagaagcggagggcgagcgcggtggcagagcggcaatgggcgagcacgcggcgacccttctgccgccagcgacgactacgaggaagacccctcccagccttccctccttcctccttgagctccctcgcaccggcgccggtgctaggggcggaaagctgacagtgctggccgtcgtggttagctcgcttgccgcagcaacgctggtccgggcactaactggctgatgcttctgcggatcgatgccctggctcaagagcttgagcttgatgcgcgtgttccacctgcaaaaccaatcaatcagcaccaagaacacaagaagagctaaccgaagcagatggcaacatgttgaaatttgttttgcttacttgttcccgagagggcgtggagcctgatggtgagctcgtcgtcgtcgtcggtgaagttgccgcgcttgaggtcggggctgaggtagttcatctagtggaggcagcagctctttttggcagcggagtagccccaccgctttggggagggagagagggttgaccgggagctccgctcgccggcgggcggtgacgggacctgtggtcgagcacccggcgcgttcgaacatctccgccgccgagctcgccgtcgagccggccgccacctttcctcctctcccgccgctgccatcgggcggaccgcctctctctccctctcccgctgccgccgtccccgctccgccgccggccacctctctccccctctgtcgccgcgcctgctcgagagaactcggagagaagagaagagaagagagaaaaaaaagagaaatgtggaacccacaacattgtctcacttactcgtgggccccacatattaattttaattttttttgctgactaggatgccacgtcaataaaaccacccatatatactatctagggaccttgagtgaacggttttgtatagtttaggggtggagatttctggttttgtggttaaggtacctcgaaaaatctcggtgtaaagttgagggatgaccagtgaacttattccagtttctaatggcccagatgaatgggccggtcaaagtgggccgtatcgatgggggagttttttttttggaataagttcaccagaggtctttcaatttaacagcgagattttttttaagatcacttaactacaaaaccagaaatgtttacccctaaactcacacaaaccgtgcacacaaggtcctatggcagtatacatagttggtttcgctgatgtgtcatcctagtcagaaaaaaattaaaaaaatatatataagacccacatatcaactgcacatatttttttttcttgtcttttcttttctctcttatctcttctcttattgaggcctgcgctggcggagagccggcgggcgagcgcgacggcgggcagagcagtggagggcgagcgagcgcggcaggcgggctgcggctgttggcgccccgtttccttctattttcttcctgaatgccgtcggtcggaatgggtgggtgaggaggccgactattgctgttgctggcgcccgtgccgcccaactccggcagcgcccgagggaggggacggctggatccgcgcacagtggcccgccccctcagccaccgccgctctcgaggacagaggagctcctcagccgcatccacctccgcacaacagcaagggcatcaactaccagatcctctctccaacctaaccgtgttctcaccggcagccgcgagacgcctgagaggaggaaggccatgcaggctgcgattctatgtgcgcgtgcttgctctgcccatgcaactgtggggttcctatggccactgtatctttttttcctctcatcaggatggcgagctgagcttggcaaaccccatgcaggaatagaatttagcttcttgtttttatgtttgctcttctcctttccggttaattgtgggtgagagggagctcaaggtggaggaagacaagaaccagttgcccatggtggtggtagcagcagcgagtcgacgcccgtcggcgcactggccactgcattcggggtaaggccgcatcgtgtggtccgcgtccaggagcaaggaccgacacaacaaggtgtgcacgaacgtctccgaggtcgcctacgccgtccgccgcgctcacccgccgtccgctccgccagcagccagccgctgctccgctgccaggctcccccatcgccgcttcgcccgctgccggcctggagaagagagaagagaaaagaagagaggaaaagaaaaaaaagatatgcagctgatatgtgggcctcacgtaattattttttctgactaggataccacgtcagcgaaactacccatatatactgctatagaaccttgtgtgcacggtttatatgagtttaggggtaaatatttctggttttatagttaagggaccttaaaaaatctcgctgttaagttgagggacctccggtgtacttatttcttttttttcttcttcttcttctcttagctgttttctttttccttccggaaaagggtactcccatatgcttagagaaaaaatacatctcaaaatttgttgcagtatctactactagttaggtacaatggctgaaagtaagcttgctcgaacactcgaatagtactcctgatattcgcaactagcatatatactactaaaatacaagtcttctatttattaataaataatatcgttgacttttggacatatatttgattattcgttttatttaaaaatttcacataaatgtataagatataaatcattcttgaagtacttttaatgataaaacaactcgcaataaaacaaatattagttatgtaattttttaaaataagatgaatggttaaatatcattcctaattaaaatagcgaagctaacgtagctcaatgggttggttttccggtagaaccaacccacccgaatctagtcctatatctgacacttatggtcgtatttacgattcacctgtcgataatgaggttaaacgcgcttgtgtttgtatcgtatttctcaaacagaaagtaagtgaaatattctgctatttagccagcatggcaagtaacaagttcaagttctcattaacaacatatcctctgtccatacagttttgatccaacgatggcgacgccatctttggtttgctctcaacgagtctgtagtgtacacgtaaagtttgttatggcttttgtctggcacggcccaggtgaatgatcattaggagagcttgaaaagaggagagccattcaccaactgatcactcaacgccgccccggtgtttcttctgcaaaaggaggagagacgttcacgctctctcccctccaccattgtgtctcgctatcgaccttctcttgtacgctcaagctacacgtcttttcatcagcctagtgacatacaatcgccatactgattaatgaaacgttgtgcgtcacatgaaattgagagggtgtgttctcaactaagttatcctaatttttagttttcggttaaatggtatgtttattctcaacagttaaacggtgtgttttctttataaaagttgttttcataaagtcatataattttttttaaaaaaatatatcttttatttaattaatcatatgttaatctgttgttcatttttttcatgctaggagaagtgttcccaacccaaaacaaatgcatggtgagaatttcaatgtttaaggtggcaaatactaattccgtttcaaaatactcctataactgtaagcatatatattttcatgttttctaaacttttgaaaaaaaagcatagacatgcttatattttagaatataaagataataattaactgggcgcagagttcccaagactcaagtctcgtgttgtcacctgtcagaaggcgagatactctggttgttgttacggataaaatataaattttagagttaatttcgaggttttcttcgtagtttaaattttttagaaaattcaaaaaaatctattgataaacactcaatttaataaagactttatcctagaaacatcattgttgttatggttctagctgttcagattcgtaaatatagaatactccctccgtcaaaaaaaaagacaaaccatgggtttccgtgtgcaacgtttgaatgtccgtcttatataaattttttttataattagtattttcattattgttagacgataaaacatgattaatactttatgcgtgacttatcttttaattttttttcataatttttttaaataaaacggacgatcaaatgttggacacggaaactagggttagccttttttttcggagggagtatttcacatcggtattaagtttgctgttcactgggctccacagtcctttggacccacatgtcagtgaagaggatcccaattgtgttatattagggcggagggagtcctaataacacgcgcgacgacaccgcgcatcacatcaccgatcggcatcatgagccatggattttggtgtaacccccgcgcccccgcccccgtgctccgtagtggaatagagtaacatgctcggagacggacacacgatgggatcgcccgccgcccgccgcccgccgggcccccgtatcatctgccatccgcgcccgccacattcaccgcttcgctcggcccgcccgcgcggtcgtcgctgcacgccgagcccaacaaacaaaccgaattagcaaagcgccaccacaagcagcatgggttttccatgcatctgtccatccaccgatcgatcgatgaatcgatccacacgcatgtgtcgtcgttcgtcgacgaggcggatcacgtatgagctcgggggcttttattccctccgatccacggctgatcggttggtggggttggctggctgcttgctgctgcctgctggtcgtcgcatcggctggtggtggttggccgcccggtcggtctaacccaacccaacccaactcacatctctctcaggtcagagatacagggcatgttcactttcgtgccaaaaaaatcttaccaaattctaaaattttggcaggatttcttatatagttaccaaaatttggtagcaaactaaatatagccattttttagcaactttactaaaatttcataaggttaaaaatgacatcaaagtgaacaggcccgtagatgcactagtgcttttctcttttttttcattcgttttttttattttgtttgaaaccaaactttttttaacgatggatggaaaggcggtgggcatgattatggggtaaaaaccgagcaatggagcaagcaaaaaatagatgaaagcaaaagaggcaggctaaacaagacaatggggggtaaagtagtaaagaggggacaggagtaaagcactaaaacgttgttggggggtgggggtggggggaagggggttgttaattttcacaaaactatatgagattagtagaggtagttaaagcgggaacgtattatatacacacaaatttttcaatgtacactttatacaaaccaactagtaaatatcacaaaaaatatataaaaaattggatacatactttcagtagtattatacctatgtgtgaaatgttatctttaaatttattatactttcaatattataccatactatgccaacttgaatatccaattaactgcgtattttgactgtgtatagattcaacgtggttatccttctttactgctcttaatttgttatttcccgcgacagtggcatgtgtgagtgtgactaaggagaaaagtccggtttggtggatttcttattataagcttggtaaggaaaagtccagatccaacataccgcatttaaagtttgttaaaaaacaaacaaaaacatggatagatcacacacgaattctcagttattccatgcagatacatgaatgagttgctgttttgtttttccatactcataacattacacaatgttacaaaatttagaggcgacgtcctaaggtctttagtgtcttaattacacgtgcttttaagctttattgattttctttaccggaatttttgccctttacttgtcattttcacaacaccaacatacataccatgttaatagaacataaatagatcttctaaaacttactagcttttcagagggctaacatgtggaccccatagctcactatatttcatatgaaactttctatataaaaattgctttaaaatattagataaatctatttttcgtgtttgtaatgattaaaattcaattaatcatgcactagtggctttttccgcacttaactttatcttcatatttagtagaaataaataccacctaagtttactatagttgtctactatagtcttttgattccgtcaacattgcgcgggtattttaactaacaacgccttatttttctataccttttactatgtcttacactatatgagaaatgctataggcactactagagaaatgcctttctggtgccagttgccaaccacacataagtgccggatttggcaaccgacacatcgcaggtgggacttttgagttctctcaaaggtgtcggcttcaagaatcggcacatttgaggtgtatggatcacaaaaaaagagtacggctcggctccgctcaattcgagccgatgcctgcaaaccaaaaaagaaatcgaaaaatctaaaaaaaacatcggttcttgttcatcacaaacaaaaatcatcaacaaacaaaaatccaccgcaatcataatcataaacaaaatccgtcgctgcttgtggggagtccgccgccgccgacgggagaccaccgctgacgtcgtcccggtcgccgccgacccccctccccggccgccgccgaccctcccgccggatctagcggaggggagggcgccggccgctgctgccgcctccgccggctagccaccgtccgcgggagagaagggagggagagagagaagggaaggagacagagaggagagcgagagagagggaggagacgagagagaggagattgaaacttatctccttgtcgcctcgtcatggtggggcccgccggtcggctcatctaattactggctcggctcgatgacacctatattataggtgtcggtttttaatgaaccgatacctataatatattaaaggtactttttttttaaaaaggcacctatagaataggtgtcggtttttatttagtgccggcaccgataattgtttaaaggcgtcgttttattgcgatttcaacccacgaaagtgggaaaagatctataggtgtcggtttcagcacttccaagacctacttgatgctttgtagtagtgagggatgcatttggtcaattgatttacacataaattatggagataatgtgttaccgctggttagcatgaccctttgtcgtatcagcaagctactattgcgaaagatcttgtttccatatctttataaaaaaatataaatacataaacatgcaataataatcacatggaatatcaaaacatctcgcggtagtccatagaaaacctaaccttacacaaaagaaaaacaaaagaaaagacccccaaaaagcaattaaattttcttttaaacaacaacagaaccttagacaaaagaaaaacaaaagagaaacccaaaaagcaattaatttttcttttaaacaacaacaaaagaaaagaattaaagaggcctgcgagaaagaaaaagagaggagagagggttgagaaaagagaaaaaaaaggaggcacgcggccagggacggtggcggtggtggcgagtgggcagcgtcgtgggcggtggcagcacaaacaagcaaaccttcccaattaactcctcccccca

SEQ ID NO: 11358 - DNA, 673 bp, Oryza sativa
aaatgtaggtgcattattttaatctggtatagatttacatgagaaatagctaacatcatcatgttgaaatgtacaagtaacaattctacacggctatgtaccaaagtgaacctgaaaggtctccgtataattctcagtctatcaaaaagtacgtcaggtatgtctgctacaacagtagcaggtttttatctcgttattgatatctacgaccagcttccatgaaatctaatgcttggccttggcccgtgtttcccatttccaatccattagggcttctaaaggacccgttcggcagagagttagggcgatccacggacgtgggttgcgcgttgttctccagctgatcagggttgagaatgtgccgggcgtatgcgtgaggccataatcctgtcatcgaaaatttgaacaatgtaaagccgtcagaaacattaggagagacagatatctgaagctcgagaatatacaaaattacagtacaacttcagatatttcgtacagaacatggtattatcaatcacgcgatgcccaggaaattggccataaaaatttcaggtcagcgtattacagtacgaaagatatgtcaaaatacagtatcaaattgtactactcaaaatgaccctttgggggtgattttcatctctgcaataatcatgaagaaaagtagtctgaacta

SEQ ID NO: 11359 - DNA, 1496 bp, Oryza sativa
aaataatacgtgaataaaacttttatatacgtgttcttagtgatctaaaagcaaatgctgaaaaataaactttgataaagaaactttaaaatcaccttcaaattttaaggttgaaaattcaattttgatgataaggataagtgtaagcgaaaagatgaggcgcttcttctcccttcatctcaaaatataagacgaataaccttttcacaatgtctcataacatatggtatatacacgtataattaactagcacatccctctactgtaaatttgtttttttaatcctttagtacctttgataccattaggtgattttttttttaaatccttcactcttaatatttctaataccattgggtgcttgagccttgaggtgaccaaagcgaagaaatgataataattctcttatggtatttgtgtttagagctttatattttgagattgagaaaatatttggatttgccacaagtttaccgtgcaaataatgtactatcgtactataaatcatgtagagaatcaacgtgacttgcacaaatgcaacttatttcatcatccgttaacaagttcaatgagataaacgtgtccgaatgtaagtggtcaatcttacataatcgacgagataggatagtgtactccgtttcatttcataaatcattttgacttttttctaataaaaatttttaaagtttgattgagtttatagataaagtagcatttccaacacagaacaaacatattaccaatgtatattcattgaatctaatttagtgttctcaatgttactaaatttatctataaatttaataaaacttaaaatgctaaactaaaaaagtcaaaataacttataatattaaagtagtacatgatacgacctacgcgcaaatcgcatgcaaattttgaagtcacggggcaggcctatctgatcacgtgagtgggaagctgtagctgcaaatataacacaataacggcccaaacctcctgtgtggcaaactgtgtcgacccgaaataaatcagaaacaaaacttgacaacgccacagaaggaatacaggagtgatgacactccaaatggtctattgtacatgtggttaaaagaacagaaaaatcatacgcattagattgcactatgacctggacctacaacaataaataggtctgcttcatctttaacccttacagataaaaacatgacttctaaaattgtacaattgatgaagtcagaggaaatatgggacagcagtcctcggtcctcgcatctggttattctcctctgtctctgtgaagaatttgacctctctttcctgatgttttagacaaaggatataaaagatcagaatcagtgcgagcttagagctcatgaaacaaatcagatacttcacagcagtatttgcaaaagaagacatgttaacatattcagatcaactaatgcaagagtcagaccacagataagataacaatttcacactagtagcaagaaatcttccagtacttgtagatg

SEQ ID NO: 11360 - DNA, 1050 bp, Oryza sativa
cgagaggcatccacgccggcgactcaccccacccgcgttgccggccatcagatccgtcgtcgacgcatcgccttgcaccggatccgcgcggagatggaccccaacggcttcgatttcttctcccaagatcccatttcgtccgccgccggcaacatttggtcgtcgcagccgtcggcgtccggcccttcccacggatccgttccccgcgccggcgtggacacgctggacctcaacacccaggcggcgtcgggccaggagttccctcacctccacgagtacggtgccttcctccagggtggcggcgaggaaggagctggccgcggccgaggctccggtctccctcccatccgtgcaccacgctctctgggagtgagggctggtcgagggggcgccgggccatctcgtgctgcaccgcgtgcccgccagctcaacttcggcgcggtaggtggccgtgctggacacggtggaaatggtgggtcgtcgtcgggcatcggcggcggcggccctgggcgaggcagctcctcatcaggggcaacgggtcgccgtcggcagcgcgccatggcaaccaaccgtggccgcgaccgcggacgtgggggccgcggttggcgtgtgccgaggagtgtcggcacccaggaagcacccatcggcgattacgtcgaccttgacgaagaaggtgcatgggacgatgaggtggaggaattaggcagcttcggcggccctccggtgagcattgctgaccgagctaactggactgataggaataatagtattttgttagcattgtgcatagagcaagtaagagcaggccactacaatggtagccaaatgaattctgatggctataatgctatagccgagggctaccatgccaaaactggtttgatgcacatcgtctgcagctaaagaatcaaattgggattctcaagagcacgtactccttctggcgttacttgcaaacgcacacgggcttaggaagaaaacctgatggaacagtcgatgctgattctgatttctggagtagtcacatagaggtacttttctaccattttt

SEQ ID NO: 11361 - DNA, 16370 bp, Oryza sativa
  unsure (1)..(16370): unsure at all n locations
gaggtatagttctattagtgtatgaaatatcttatgggcataactaagtatattaattaattagttggtgtgtgatttggatcgatctcttgtacatatatgcatgtgcatttgggtagtctttgattcaaaggatatagtaattaatgtaaacgtagattacaattgatttgggggtgcaacgggatgcatggttaattaattagtcagttaattactgtaattaatccaatttgggagagaggttggtcgacacagttgctgcagtgtcttgaccattagctttggatgtgaatgggctgtacatgtgactgttaatctgttaaatatacggtccaattggaacaaactgtgtcggcctgtacataatcaattaatggaataattaagttggtgatgcatattttagtttttgttacacccacaaaaaaaggctcaattaaacaatcaacacgttggttggatgaaaacattgataatatatatatgtcaatttggacaaatatatacgtcgccccatagcgacttttcatggatgtcggctctcaaaacactcgcagctaattcgtcaacccaaacaactcatttttcatccatgaacagttttaaacacctccttggagatctataaaacaaatatatattttcgaacatccaaatgataagacaataaagatgttgcttggcaacggtatgataagtgatcacaaacaaatttatatgtaggttaattatgcgccgtgcaataatattaacaatttaattactaccttactttgataatatttacttattgtttccattgaaaatgtgatccgattgagcgtgtgactgcaacagctagacggtactagctgactagtcgacccttgtatattttgcggcccttaattagcaaaacaaattaagaaattaatttatgatagtggcctctgtacccaacaatactgtcgatcgatggaaccctatgtactaaatcaatgctacaattatatcgtcttaggaagaaggtgtatatcatatctaatcaaaactagtgctgtagatcgactactatagaatgagaaatagctccaaccattttcaacctatatgtatacttctcaagcttgtaattttggagtcgcattgatattttttaaagatatattgacgttggataaatgtgaatcatatgtgtctagattaaaatgattttatagtattataattaatttattccggttatgtacctctattgcaacagaaattaagtcgtttgtatatattgattttcaaatttcaaagcatcatgttttcaagaccagagagatatcatatatatacatcaactgatcgtgtaatccctaacaaaagctagaaattaattgagcttcctccttagttgatgtgcttattattattatttttgaaacacgttgcgctcttataaacgtgtgcacgctcaatctatgaatacacacatgcataccctatatatccttatgaacacatccaaaaactaggttggcatcttaagattcacaaagttacaatgggcatctcgtcgttgatagatacgttgtctagctaccactgaaagaataattagtcgtaaatgcgcgcgcacctataccaagtctaggattaggacttgaatccggctagataggttccaccaccaggaaccgaatcaattgagagctgattacttcgtgatgtgctaattaattttgttccatcataatatatatttcttaaaacaaaacatgatggagaaaatttcaacatgaatttcatgtacatgcttttttttaatgtttggagaatataatagtcaaagagatattaggatacagtaagttcttgtttaactgatcgatctaaatccggtacaatgtataaataaatacccacaaggcttaatattgtatcttacataagtggtgaagaagccaacgacactttcaaacccaaatgactaatactccctccatttatttttgataggcatatttccaaatctgaaaaaattatttttgataggtatatttcatccaacaacttatcatcttaataactttctcgaatttaatacatgactctctattcttccacacaagattagctacataggcattgaaaaatgtaaatattaataaatcgcttgtttacgaggaatgactagtagcatgtttaaatagatgataagtataattatttatctttggtctgtgtgccaatataaaatgaatagcatttatcgatggtcaatcagtttaatttcacggaaatcgatgccaatcggtagcggcggagcccagcccgtcggccacctggcttgcataggagctggcttcaccactgtccagtactccacggtattatctcctttccaatcttacacatatataccctttttgttgtagaacttgtgtgagtacgaatttaattgattgatttaaccatatcaaggtagatctaccaaattgtgtactactgctgaaaaggcccagtgacaatggattaaaggctttaaagctgtccaagatgcaatttttgtgggtagccctaagcttaagtgaaggcaggaaaagtgacagcacaaaagataaaaactaaagcaaaagatgatcaaggagagggtcgacatgcacgtgaatgtgtgtgttcggttgtttctgaatggctgcgtagatcgagcagaactaagcactattgtgtcctatactactatgtgtacgtaattaattaaaaattaaatcagctggctagctctcttgttcttggagatgtgtctctaagataagagcaggtacaataacaggctataagccagctataaccacatatcgatatcgagaagaaaaaataagagagagaagaaaacgggctacaaatttatagccggctgcaacacagactccaatacgttatgagtgtatgagaggtaggaccggatattaatgatgtagaatatttttataggtaactattgtatgaatgggctatagatgatttggagccagcggttggctatactattgaacttgcttaatcagctgggatcgatgatctcgtacacgaggctcgatcgtacttactatatatatatatattaattgcttgttacagtaattaacaagctagctagctnaaccgttttagggaaagngtttaatccattgggcgaaaccaatccaattaagcaatggatatgatgcaattggtcgaattgttgatcagctaacataactactgggttcatttatctttatgggcgaatcaaattaattagttggtgtacatgttcaattatgcgtctgactagatattattatggtaaccttgtttacgggtgtacttcctctctaaaaatttccaagatataattctttatgttttatacttttactagaaaaatgcccgtgcgttgcaacgggtgaagtctattttaatcttattattgttatatggtttagttaagatgaaattcactgtaagaattcgtttggatatatatatttttagaaaatcatgagctgcaattaggagtctgatcatctcaagttagcatgtgagttttttaaaaacaaatttcttatatgattccttctgtattaccaaaagtgaacaatcttgaaaactgactcaaatacgaatatgtatttctaaaagcaaacgaacttaaaactgactcatacacgaatgacgtaccaaaataccggcaaaaacatcttcaatttttataatagtatagatgtaagtctttaaaaattaataatgtgaaagctttgggtaggatgaaccttctcttttcagataatagaaatagtttatatctcttgcctctatcaacaggacacatgaccaacgagtctaagaaaagagataaacaaaaagactcgaggttatgagacaaatccacacatctcctgtccaataatatttaactaaaataccgaatagaaaacacatatagtctgtaatgttattttacagtaactacgccattcaaagtgaaataaaagacttttggctattgattttaagactttacctctattgtgtacattatcctgctcctatcgtgaaagcatcaagaattaagaatgcagttagctaaaagacatgaaaataacctacattagttagacaattttttgttattgaaaactactatatcatcgcgacaatgccaaattcaacagtataaagcattagttccaaacaaaatcagttttttaacggatctaggtactcccataagccaattaccaaaaagtatttttagcatttcggggaggagaaatgttgaaagaacaaaaagaaacatcgccaatcttaccgtgcgacatggcaatgaaagaaaaaaaaattgttgtatggtttgattttcatggcaaacttggctacatcattttaatacaataaaactatattgtaaacctggttataattaacgtaagactaactcggatgataaaatggttcctatattctggtaaatgcatgggtcatcttctcccttaatcagtgcaagataattgggaaaaatgatggtttgtgtcagtaaatttgtgctaagcttcgaggtgaacgatcgatgagtaccaaaatttacacagcgaatcttttgaccaaactttagctcaaaattggtgaaatgcatgaatacacgaaaggacaagtgggtgatattgaagacggtgtcacgtccaaattaaaatgctgaatgcggacgaatatatatagagcctaaatatatcctaatcccttcacagaaattaagaaagtaagtgaaattaaatggtgcaacatttgtgactgtttgagaaagaaaatagatagagaaattaaatagaaaatagttgtaattgcttaagatgaggggtagatggagaatagctatatattaaaataaaattgaactaaaaatatatatattttgagacgaaagaaatagcatatatcataactaatttaaaagtttcataacgtactctctgaatgaacctccaccaaagaaaatttatgtccaatacttttgttgttaaacgtcatatcatagtatgtatttgctgggccagctaactgtggaatggcatatatggtgccataaatgtggaacagtgtagaattaagccctaagctagccactgctgaaaaaaattgattttgccttcaatctggttaactttcttttactataagtaacttggttgatagtgttttaggtcatttccaacccaatgattaggatggtgtcgccatctaaaatgaaagatgatgtggcaagtgagtaaatgaggaaagagaaggaaaccaggtcttgcatgagacatggtttctacataacattctaggcatcatgtgagataaatagcattaaatttaagtatgaaaaagtggtgtttgtattgaaagagtagtgtctagtactagtttcttaatgatgtggagtttatgaaaactatgtctagtgtcttgggttgggactggccttagaccaccgctgtcttctatcagtcactaattttggatcacattagtctcttctacctgtcactaattttgtactgctaaataagttcaatcacaaaatttttttggctaaatagtgtaaatgtttcagctaagtactgtacattagttgtgatatttttcatgtagacttttcaaaagaacaagccataagcacctaattaatcaagtgcatgcagttcgacctgacaaaactataaaatcacactataattatcatggagacacactctaatcaaatcatgttccctcaaatgttcatttgccatctgcatttggggatagccttaaactgcattgtctgtacaaagattcaattccacaaatatctttaattaaccacggatgttagaactagcattgtttggaaatctagtaggctgctataaacggttgtataccaggtaatatagtactcctacttcagtacatggcagaggaaaaaaaagtttgattagacagtcattggcatcctttgattcttttctgtgcatagacaaaaaaaaacatcactcaaactgaaaaaaactgttgcttctacaagagcaatttaaccaagaaaccagtagcagttgtggaagtcagttagtacactatacactggctaccacagcataaaggttgaagagatctagggacagttacacagctgcctttgcctgtcctcattgttttttttttcctaggttcatgttttctttgcttgctttgctgagttctgttcccaatggttgctgctccagttcacagcttgactatatctggcaagtggcaaagtaggttaggatgataaagttcagtcagagtagtgcttactagaataaataatgttggtgaggttgtgcagtatgtgatcactgtggttagaggaaatcttgggtatgtgtgtcttgggttggttacttggttggcatggctggattgttggctgacaagtgtaattttagtttctgaaaaggaaaactggagcatcaaaatatatatttttggaacttcggtagtagtttggtagaaattagagaatctatttgttacacaaatagaatgaaaagaaaacatatttttgtttaatgttggacgcctaagctaatcatggtatatgttcatgactaatcaactcacggtcatatgaaattgtgtcgacatcggtaaactagtcaaaacaacgtattatccatccatacacagttataaaacagggacattgtgatggctttcatcctctgagcaacaaattatggctagcccaagcgccacaatgtgaaaaacaaaccaaaaaacacacaaacgatacaaaaacttacgcaggtttatttagttgcaaattaagaagaatgggcctacctgaaagggtccatatgatcaatgctctggtgatgttttataggggcagccgttgtgcaatggtacatcatgaacagtgtttcgtgttgaatgctgcgcagagtggctggccacggaagatccaaggacggatggcgattgaattaattttaataatcaatgatactagtagtaacatctacttactgaagttttggaaaaattaccacaagggctttctttgtgtcacgaaagcttcctctcattggccagctccagctgctgcctctcctctcttcctgccttggattcagcagcagcttacctgcatatatacacatagaggtagagagatagatggtcagatagattgagctaagcacacacacacactgcatcagtaccttggtttggttgatttctctgagtttgtgttcttggcatcatcatcattattagccatgagaagtgtaggtggcttggtgttctgaattagtttcagtgttctctttgcacttccatgtgttgcacttgcatcagctatagttccaagaaattgtgtttttgatgatataggcttctctgtctccatttctgcatatgtagtttgctttcttgggctgtggtttcaaacttccaagcttttcttccctctcatggaagaattttccgttcttgcaggcagctctgagcttccaagatcacggccatgggcttcaggcgatcaccggccgtggcggcaatggcggcgccgccgctcacgcattgccatggtgggctggagccggagccggagctggatcccaaacactgcttggaacaggaggaggagaagaatcattctgccaattaagcaacacaatcatggaggacacccgaatcctgcaaaaccaccaccaccagatcctcgccgccggccggcagctgcagcagcgccaccacttcccggcaatgccgccggagcgacaccaccaccctcctcctccagctcctggaagccctgccatgaagttcccaatcatctcaggtgagtcccaagaacttgtccaagatttgtagtaagatgatcattggaggtgtgtctcgttcatggcgcattcacgccgtcgcggtggcgccgctgtcctcccatggtggagatggtgtaccggccggccattccgggtgttggccgccggccatttcggttaattactgcggtgcagtgaagaaaagattgtagatatgatgctgtggtcctgaaaactttcatggtccaagtcctaggaaactttaaatgatgatgattttggggtcactgattctgtgaaggaggtgaggttgttgttgccacagttattaagaggtgtttctgctcctaatcatctttttgtttcttttcaagagtaagcaagtagtactgggcacataggagattatttactgtcgagtaggaaagctgcccaatgtcatgcagctttacaactgaagaaaactgaaaaagaaaaaggagagatgttaccactggaaatctggtagtaccagcacacagaaagggtgggcctggatgaactgagttacaaaacttgggaaaaagaagtgttttattttaaactatgttttgaagggggtacagattagaacattattttagtgttaattaatttgttttgtggaaatctatgtacttgttggaatgttcattactggcagatagtatggccatagttttgcaagaatggaatcaggctcccctctaaaggctttggactgaaccagtgcattttattcccttttataaaagtggaactgaaagtcttttgggagactgaacaagggaaaaagctttagagcaaatgacatcactcttatcagaaaaggatctaatgcttcaaatgttttaataggcagcactactctcttctgtattctagatgagattccaaaaacattcttaattgttattccctggttggaatcttccctgcccactaattcccccagcagaacatagtcagacaagatactttgataaaaataaaaaaatatattgtcaagtactaagaaatatccatgatgacaaaatacctctgtggttttcaggtgactctgatcttggcaaagatctgaagttccatgagtcctccgcgccgaccatcgccgcgtactcgccattgcaggagtaccaaggacactttgagctagcccttggccactccatggtgagaattctcttacccaattcaagatttactccagaaactgaatctcaaaaacatctttggttgaaccagctaactgtttgtttctgcaactctgaaggtttgcaccaacttctgcaactctgaacaaagctatggtgtttactccccctatggagctcaaaccatggtatatatgttcttcagttcttgtcttcttgatctctgaacatctctgtccaaatccatgtgtaaacttcagttcagattcagcatcagtatgccatgccattttgacaagaatctgaagaagtttcagatgcttactgtgaatattttctctgaatgttttgtgtgcttcaaaggctgggaggatgctgctgccgccggcgatcgccaccgacgtgggtccgatctacgtcaacgcgaagcagttcaacggcatcatccggcggcggctggcgcgcgccaaggcggagcgggagcaccgggtttcccggagccggaaggtaagacggcggcgacggcgacggcggcggcgagtgctcgtcgtcgtctccttcccttgtcaattcgccggcgaacaggcagtgacagtgactgactcgtcttcttcttcttcttcttcttcttcggcgacggcgcagccgtacctccacgagtcgcgccaccgccacgccatgcgccgcgcgcggggcagcggcggccgcttcctcaacaccaagaacgcctcctccgccgccgccgcggccgccgacgcggcgccggtgagctccggtggcggcgaccacggggcgagcaacaagagctcgtcggcgtcggaggcgacgcgcgtgtacgacgacgacgacgacatgggcgcgggcggcggcggcgacggcggcgacttccaccacgcgatgggtcacctccgctcgccggcgttcttcccgtcgctggccgcgatgatggacggcggcggcggcggcggcgaggggaagtgggcgaccgcgacgcctcaccatggctgccgcgtcgacctcctcaaggtgtgaccgccgccgctggccgtcgccggcgaacctcgccggcgccggtggcaattcatccttggctgtagtagtagtagtagtagtagactagtagtgtatgcgcaatggaaatcaatttcatgcaactgatgcaaactgcttctcagttgctcatgtaaaaaggactagaatttgattttattttgatgcagatttgtttaaatctaggctctcattttgtgtgtcctttgatttttgatgtctagtttgatcttggtgcttagatgactaggtttattaaggtgttaacactgttttaaaaacaatcagagtttgctgacaatgattgtgttgtagaattagttgcaagtcatggaaatcttatttcatagactaaattttatttgggtacaacatttttgtagttaataacattacttaaaagttgaaacaacataacatttttgtagttaatagcattacttcaaagtacagtaatccagtctccataaatcttcataagtgatgaatcagaacaaagtcttgcagatggtaaactgccaggttttccatttgagcaactgaaagaattctcatattatagaaatgcaataaacagcagggcaaagctgaagcatcatccatctataatttctcaggaaacagctgctcttccttgtttgaaaaaaaaaagcaacaagcaacaatcagtgataccaaagcagccaagcaatcttacaaaaacctcaagaattcagaaggtttggttcttgcagctcgtcattcagaaggttaattgttagggagactatatcagggagatgagaaaaaccacctagcaagtagaaaccaagacaagtcatggaaatcttgtatcacagaccggattttattgagagttgaacatttatattagttaatagcattactgcaaagtgaggtacagtaatccagtccccataaatcttcatatcagatgaataagaacagagtagatgcacagtagatgatgaatggagggctgcagatggtaactactaccaagttttacatctgataaagctgaaattctgataacattgaaacacaataaacagcaggacaatagggcatgctgaaggatcatccatctgtaatttctcaggttagtcttctcccttgtttgactacaagcaacaatcagtgataccaaagtagtcgatcaatctgacaagaacataaaacacacactcggtttggttattttgcagctcatcattcagaaggtgaatggttagggagactatattacagagaagcaaaaatcaccttgcaaggaaaaaccaagacaatatacgagtatatgaccatatattctgaattagtctaggcatgtctgtaatctgctggttgctttagcctacacaacaaaaacctactagaccatggaaattttattaatttggacaaacaggagaaatactcgagtcaacatagcgagatgtaaatgggtccatcccaatttaaaacactcctcagttatctcacgtaatactagcagggtaaatcttggatagttaacaagacaatgtaactaaactttttattgcacaatattccaatcctcagacaaatgaaatactagcctatccatcaagcacaatacctatgacaaatttatactgctgctaacagacagtttccctttttcaccacatgatcagaggcattggtcacattagtaccatataaaggccttgttacacaaatatggccaaaatgaatcctataaaagtttaaccagaaccaggtaaaaaaatgcagtaaaattttcaataatatttaaacatcagattgcagtcacagtattgttcacctgagatttctataaaagaagcatttctgactaaaaaaacgctagcaagttactaccaactaaaaatatcgctatcatttagtacaacaaaagcaattgcgattgaagactaaaacctcacagctagtgtatgtatactatgtccagttctcaatagattttagaacattctgctcatggttcatcacttaggccaaacttatccagcatagcgatttcagtggaactcaaaattaaacaagattagacattgcaatcaccagcagtaattagtaactacccagcagtataaaatcaatgcaacaagagacaacaatccagtacaggcaacctcctcatgggtgtgccaaaacaacataatactagcatcaaaatttcctcagtaaattgcttatcatgtccaacaattattccgtaatcggctttatttcccccacaaagggacccaaaaattagcttgacgaatctatgatatagtagctctgctcatatcaatcacagtaagatcataaactcaattgctaaccaaatttgaaaaaaactgttaagttactcaggaatcagccttttcagtcaccacttctttctcctttctctcgtcaatggtggtggtcggcgaggaagaagacgacgacgacttctcctcaacctgttgtttcttctcgtcggcggcggacgcggcctcctgggccaccgcatctagcttcttctccccgccttcctttgccttgtcggcggcgatggcggcgtcggcgtggtcgttgacggcctgctcggcgcggagcacgggggcgtagtagtccgcgtgcgcgtccatgcacctcttgaggttggcggtgacctcgaagcagcgctccaccatgtcggagccctcctccttccccgccgcctccacgcactcctcccacgccacgaacgcctccttgcatccccctcccttcatgaacaagcagaacccacactccccttcctcctcctcctcctcctcatcttccccttccccctccttctccacatccgccgccaccaccacagcctcctccgccgccgccgccgccaccgttacgacggcgggttcttccgcctctaggtggggcgctgcgatggcgggatcagacgccggagacgccattgccgtgatctggtggtggttacctctgcttctttcttgggaaagaagttggggaggaggaagaagaagaagaagaggaggagtcgcgccgccgcccgccgccgagttggtgtcggagagggattcctcctcctccaccacctccttgggccctaatgggctccaggcccaaccaaagataggcccaattacaatgagcctagttattaggacgtgttgaagaagttcattttacatcccacaattcgaccgtggcaaagatgagggacgtaaataagacttatttagtacggcccattaagaagcggataagagattagtagtagtagcaacgccaccaccgctgctccactcctcgcttctcccgccatcttctcctcctccacggccatggccgccgtcgcgttccgctcgctgctacaccccgccgccgcggccctcaccgagcgtgtgccactgcctcccgctcacctacggctccagggccttcaccgccaccgcgtcggcgtcctcaacctcttcgtcgcctccggtcatcgccgccgcattctgcttcccctcgccgccgccggtggagagttctcttcggaagaggaggagtacgccaacgaggaggaagaagagggggaggagtacgtggaggaggaagaggaagatggggaggaggaggaggcgcggcggtggcggcgcctcgcggatactacccgccgagaagccggccggcgctcgggcaagagcccggccgcctcttcgtcggcaacctcccctacaccatgacctccggcgagatctcccagaccttctccgaggccggcagggtcgacaacgtccaggtttccatgaccaaccaatcaaaaccctcaaaaattttcccccattttctgagttatatcttggtctgaatctgatggtggatctcatactggtgcagataatctatgacaaggtcaccgaccggagccgcggcttcgccttcgtcaccatggccaccgccgaggaggctgccaccgccatccagatgttcaatggggccgtgagtttttttcacacaccaattcaaagcaattctgctccatttcactgaaattgagctattggagtaaatgaagttatgaaatctggtcaattttgtggcattgtggctgtgtgccttatgtgtagctgcttggagggaggactgcaagggtgaactacccggaggtgccgcggggaggggagagggcggtgggatcggcggcggccacaagggagaacaggcgcgatgacggcacattcaagatctatgccgggaacctggggtggggtgtgcgtgccgatgctctgagggcggcgttcgaggggcagcccggcttgcttgatgctagggtcatcttcgagcgcgactccggtcggtccaggggtttcggattcgtctccttcaggactgcagaggatgcacaggctgcattggaggcattggatggagtggtatgtgttgtctaaagttctcaactatctaaatctttcttcttgatggacctgaattagctgatgccaactgatttaatagcataagtgaactactggggtgcaaatgttagcactttagcttccattatggaatgcagcaacaaggttactaaggtttgatttgtgatagtattttgtgctcaaatgatggtcacactgataatttctttgttgcttctttatcccatggatagataataatcatacactatgcaaaactcttatgtttgctaaattcaaaatcatgttctagcatgattggaagcttcatttacaaatcagtggctaacatgattgtatatgatctgcaggaactggaaggaaggccactgaggctcagtatggcggaacagaacccaacagctggttctcctagcacagtgcagtcacaggaggaagaaactgcttcagaatcatctgatgcagagacagagcagagcattacctcagaaccttctgaagctgaaacggaagagagcaacttgcagacagctgccagttattagtatctaattgatggttgcactgatttacttattctgccattcggcattccaatctaaattgtacttgtccaattgaaaattttgacacaagagatgctaaaatgggatatgagccatagccaatagaatattattagacatagaggtgctccgagtttcagttattgctgtaatatattgtgcagaaatctaaagtgcaactgttttgcttcctatatttattcagttaatatgttctctgtgtaatatgaagtaaaatattggattcattaaggtgtacctattacttgaataaattggggtgatacttcgtttctacttttcttcaatttgtttctactttttagaaaaccgttacttctagaatataactaaacttgagtaatccaatgtgactgttatagtagatgtagtggagattcacttccttattaacatttgtagaacatgaacgacactctcatagcaagccaatttggcaattgtcgaagtacaagatctttaaccaagcaaaaaaaaaaaaaaaggtagcaaacatcgttaagtgaatatcaaagtaacaaacgctctgtcatgtcccatcagctattttgaataaacgcaccactctcaagctgtgcatcagcagaagcatccaggtcctgagggaagaagagcctgcaaggtagagaaatgaaagattgagctcaataacatgatctgatgaaaattggagacatgcagagctgtagcatcaaggacaaaattactagtaaaatttagagaaattgactgcattagatgagtacttagaccagacagcaaggcatgacgcacggacagcttacctgcacgtgttgtggtacagagttttacttaagccttcaatgtcagcaattcctttgcatccagctacaacctcaagaacttgcctgggattgatgtatcttcagttattaattttcttggaggaaaaagttaggcgcaagtgtaaagtataaacaaaagaaaaggttgatgaaatcaatttccgttccatcgaaagattcatgattgattatgataagaatttaaattgatttaaaatctgggcaaatgattctgcatctatggaaaatgctaaccaaataaatatctgcaaaacatcatattgaactgccaatggtcagtattttgttagtcaagtaagacatttcaacaagcatgtggtaataacaaaatagtttaatgttctcagaatgatgagcattacttctactgtgtttcctcagaagaaccaagtaaaaggagcatgaaaagcaaataataacttcaggtgttcatgcattgcaggccagtcaaatacttactgaa

SEQ ID NO: 11362 - DNA, 9948 bp, Oryza sativa
aagtgttgtggtactctgagttctataattatcaaggtgcagcacatgcaaatttgtaacatcaaggggtgggaaggagatgacctataaacatcttttcaaaggaaagaagcttatcacggtcctctgcagttccagtgaaggagtgtgtaacacccccagggaatctgcgatggagaaatatggttctcagacttgaaaatatgcaaatacgtcaaagtgattttcagaaagtgagacataaagaaacgtaactaaatcttattgtcagcttctttaattgtgctgatctagaacactggaggagtacaaagcagtactcctcagtagtccttggctccttgcctatatagtattggtatacagattgagtattacctatacagattttctgacacaatctcacagaagtcttcaccagcagcccgcatgtgaagaaacattggcaattttactgcttcagccaattcaaattgcttcttgaagtacctaaacagtataaaattgctcagaaaaatatgtgaataactatcattattcgatgtgtttatgtgagagtatacttcttctgtacatccgatggacaaaagtgaagtcgatcataatccagaccacattctcccactgctacaacctgtaggaattgaaagccatatcagaatattgcaagttttgactccgaaagacagaacaaaagagtaagtaaataactgaactacttatgcaaaagattatatgttcagggaatccaactcagggtatatttataactagatattgttacatagtgagtttgtttgcactttacaacaccattagaaaatgcatactgcaaagaagatagaactctgctgctcaatgattttggtcttctgttaatagtaagaactacagacataattcagtgagtccaattattttcaagcaaaatatatggcaagattgcaataacatttcactacaggacacggcttgggaagtctacaagcagatcaagcactaccacagcagcatttcagcactttcttcttactattcttctggagaatctggaaacactgtaatgggtgatcttcaatagcttacctccctcaagaacaagactgctacgacaatgcatttaagatatctaattcctgaaaaaaacccgatggttgacatgtaattcctatatggaaacaggtactttctgccaccctatatgttctcttactatttgcatggtctttgaaaaagaaatgccaaatatattatatatttaggaggggatccccaggtgaacttaaaagaaacatttcactacatgatagacctgcaggacaagtgatacacacaccttgcctttcgcaattccttccttcgccagagccagcagcgcctggaaatgcccttccgggtctccactctcctcaaactcctaacattcagcaaagcactaattacatgacccaatcgcaaaaggcacccgccaatctcaggtaccagcaatgaaagaggaatggaacacaatccacccctaccccgcatctcgtcgggtgcacgcccaccgtgcagaacagcctccctgcatcgtacaagcacatcacagcttctcaggcacattacaacaaacaccttgaaggcaccaaggagaacatagtcaaaacaacccgcatccaagcagctgagctcaccgtcggtctcggcgatctcgagcgcttccctagactccttcagcgagcctccggtgaccttccgcccggaccaaaccaaagaaagcaagagattaagcacaccaaagccgagccataagaaagtagaaaccaagcaagaaagaaggcgaaagggggaatggccggcagcaaagcagcgtacgatgatgcggtcgacgccggccgcccacgcgcgggcgagcacggcggggatgtcggcggcgtggcattgcttgccgtggtagatgcccctgaacatgccatcttcagttcgttcgcatcgcagcagcaaagagcaagacgcaagtagaaaagcgtgagagccagacagtgagccgagaaaaacgagataagaatcgtgaggagaggaggaggtgggtaccggtgaagttgacggcgatgtctgctcgtcgcggtggcgccggagacggagaagaagatgagaggaggagtagaagaaggccgggtcagtccaggtagaagcatgagagtcgcgagcgagagggaggagagggaggagagagagtagagcactcgccgatgagcttgacgccggtggacgccatcgccgccgccgccgccgccgtcgagatggggagagagtccgaattgggccgaggccggtcttcgtgtttgggcctccaaggctccaactaaccaaacttgagtttcgtctcgttcttttaattttctttaaactagaaaaaatgcccgtacgttgcaacgggtgaagtttattttaatcttattattgttaaatggtttagttaagatgaaatttattgttaaatgcccgtgagttcgcttggatatatattttttttagaaaatcatgagctgcagttaggagtctgatcgtccaccggtttccagcgctccagagcggagtagagcagtttggtagctcacgaggctcataaccttgaggtttttaaacagatttcttatatgattccttctattatcaaaagtgaacgatcttaaaaaccgacccaaatacggatatgtatttccaaaagcaaacgaacttaaaaattgactcatacacggatgacgtaccaaaataccggcaaaaacatattcaaaatttataatagtagagatagagatatacgtgacgagcttcatgatatgcccgtttgagattagtcatctgtgacaggtgccataactaatctcgtttgactcatatgctgggccaaacctatctatgacaggccttatacttagctcgattgagatcactataatccatgccggccaaatacccgattaagataatatctcatatcagtgatctttgcttagtgacggtagcccttcccgacaccgattgagacctatcccatgctagtgaatccagtggctaacagaaggtcgcagcacaatcgaacctctgcgtcgtgactccatggccgtgggataagcagcagccagtcacctcctcatcgcagaagcttgctattgatccgatccgatttatgaaaaaatcggagggagatttttttttttctgaaacaagaaggcatcgagtaatgaactgcaggggaaaagttgatgtttcacatgaactgtaccataaaaatagttttgcaaccaaaaaagctaaaatttgctcaacaattaacccaccttacaacaaaatcacgatcagttccttcaagtaaacaagctcacagccattgcgtacaaggatgaagcatcatgctcaccggaggtcatggactcctaccagggccgatgcagccacctggcctcgtcctccttgtccaatcacgaaaaaagaccgtgtgattaatgaagcaaatatgggcgttgttatatggaggcagtgaaacgcaagagatcagttcgaattgagaaagaggagacgaagagatcgagtcggagaagcgtcccttggagaagcgtgggacgggacggacaggtcaggaagaggtgaagctgacggatcaacgtgcacgcctaccgaccggcggaaccgacgaaactccaaactcctgaatcctgatccgatttggacacacaataactgacaaaaaactacggcaaaaacatcttaaacttttataatagtagagatttaaataaatttatattttgagtttataataattgaaacctaattaatcctacactaatttttttccttttttttttgcttccaaatgttgttcggattcggaattattgagcacttctttataagcagcagcaattgcagtgattgattcgttcaagaacaaaactcttcaaaatccaatcctttttttttatcggatcgactgctgagatggctgtctccggcatccgcatcctgtccaagaaattcacgccgctactgtgcagatcatcggtaagtagttcatgaaatttcttaggctttatgatggcagtgtgacaaacagattaaaccctagtaatctttgatcatcatgatgatgttgattaccaatgcatgttccaacctgccatatgtgactggccagttttccttgtttaatattattagaatttaacttgtggttttcatcttaattatacaggtagcaagaactggcatggccttgactaaaaccaaccacatgagtacaccatttgtggattctcttaatggggctaagagacctttttcatccagttccatcatcgaggaccgtcatttgtttcgtcaatcttggtatccatggcctccagtgccaaagtaagtaaatcatatattactagagcccatgcgctagctctaattgtttttttctctgttgattgtgtgttcattatgttgctcaagtacaaattttgcagtctcataacatttctctctttctatttttttgtgctttgcagtattgaggaagaatttacgagacaatggaggattcgtttccttgctaattttctgttcttagtatattccagtggatttatcgcacacaagcgtaggaatttaactcataagatgaaattaggagctactagctttcaagcattgggagcccctgcctgcccacctgtcctccccagagacagagaagagcttgtaatttaagttttggttgtttgatcaacttgtaagtgttgttagttaagtgttactataatggttgtggatgtgatccgcatgattgatgtcatcatgaatatatgcaacatatgtatgaacttgatgcttattatctcaattaaaatctgtcattatgggtgtgtttggttgcctgtacatagggtggctcgcatccagcgccagcgggatgtggtgcatgtgtttggctgcctgctcgcacgcgcgaaccaggatgcgctgatgcaaaatctgcctcccagccaggctgagggggaacgcccgattccttcgtagctcctcgtccaggctcgacttgtgcagcgcgtggggacgagtggatgcaggcgcgcacgagcgggtgcaggcaacgcgtaggggtcggtcgatcccccatctctcatttgtttctctcgcccatccgattgctcctcgccgctcttcgccctcgtctccatcgtcgtcgccgcccaccatcgtctccaacctcgagatccttaaccctcgccgacttctccacagcctccgtctccgtctctacttcacgggctagaaccggcggcctcgagcacgtcgccactcgccaagtcgccatcggatccagcagatagaggctcgacggaggacgctgctgccatatccaatagagggaggcgtgaaggagctcgctggaggtttcggcgactgcccctctctgcgccaccgcctccaacctcgccggccaccggattcctcctcactggtcacggattccccatcttggctgcatctcttcccttccttcatcagccaaaataccaatggatccggcggccacgagctggacgctgccagatccagcagcctcgggctcatggccaccggatcctgttgctccgacagctccgaacagcagcgcacacacgacggcgaacggcaggtcggggcttcggcggagcggcaggcctagcgacatcaacgaagctcctctcctctctgtttctttttctgtttttttttcttttcttttttcaccgactagcaaaccgtgaccatgaaatgtgggaatataatgatgtttactgtatgcattgctaattatttcacttattttataactttgtgccgtgcagatgtgctggtgtatatatatcctgcttatttgacgattcttaaaataattgttgccacgaatcaatatcaataattaatatagaagataaaatcaaatgtttagtacttagaaatttacactcttcatgagttaaattttagcttatctaaatggtagtccacaagttttaggtggtaatctcaccctttagaaaaagagatacctacccctaccatccatgcaaccaaccaaacgaattctctttcaaactgtatttcttatacgagtaaccaaacaaaatctcgtgtcagcctagctagtctaatgcaaacaaccaaacagctgcatgtgcatcatctcaaccaggccaaactcagcctggatgagagagatgggctaggctaggggaatacgagcaaccaaacgcactatatgtgtttgtgatctcgtatgtatgtttttcttttgagataggtatgctggatgaagagaggcgacaccgggacatgcaactatgtcatcagcttcccttgttgagcgagaaagaaagagcttgtagttttaggttttgcatgtttgatcaactagaaattgttataaactgtggttgttatggtctgcatgattgatgttatcatggcacagagtgcccaaggctgcaactctgttcgtgcaagtataaagtataaacaaaagaaaaggttgatgaaatcaatttccgttccatcgaaagattcatgattaattatgataagaatttaaattgatttagcttaaaatctgggcaaatgattctgcatctatggaaaatgataaccaaataaatatctgcaaaacatcatattgaactgccaatggtcagtattttattagtcaagtaagacatttcaacaagcatgtggtaaaaacaaaatagtttaatgttctcagaatgatgagcattacttctgctgtgtttcctcagaagaaccaagtaaaaggagcatgaaaagcaaataataacttcaggtgttcatgcattgcaggccagtcaaatacttactgaacaattaccttattagagtttacgcataattgtgttgaattacctgactaagcaggcctcattgcgaccttttactgtagaatccggctcgtacttttctttcttcttggatggccagacagactttacgagcttgattccagcatgagtatttttaatatcacagtatggagagtctgtctctatcatcattctctctgcaggaataccttgtagaacctcgaaattttcactagtcttcagagagcatccattaatacatgcattggtacattaagtcagtatggtttacctgacataactgaattataatggaatgagaacgttttaattgctactaatatttttattcacatctaattgcccaaatggaggtcttcaccaaaaaaagaacaaacttgcagcagaaactgaaatgaacttcgactacaaatagaagtgttgtggtactctttaagttctataattatcaagatgcactacatgcaaatatgtaacatcaaggggaggggggagatgacctataaacatcttttcaaaggaaagaagcttatcacggtcctctgaagttccagtgaaggagtgtgtaacaccgccagggaatctgagatagagaaatatggttctcagacttgaaaatatgcagacacgtcaaagtgattttcagaaagtgagacataaagaaacgtaactaatcttattgtcagcatctttagttgtgctgatctagaacactggaggagtataaagcagtactcagtagtccttggctccttgccaatatcattatttgtctttgtggtcattatggtattggtatacagattgagcattacctatgcagattttctgatacaatctcacagaagtcttcaccagcagccctcatgtgaagaaacattggcagttttactgcttcagccaattcaaattgcttcttgaagtacctaaacagcacaaaattgctcagaaaatatgcgaataactatcattcttcgatgtgcttgtgtgagactatacttcttctgtacatccgatggacaaaagtgaagtcgatcataatccagaccacattctcccactgctacaacctgtaggaattgaaacccatatcagaatattgcaagttttgactccaaaagacagaacaaaagagtaagtaaataactgaactatttatgcacaagattatatgttcagggaatccaactcaaggcatatttataactagatagtgagttcgtttgcactttacaacaccactagaataagcatactgcaaagaagatagaactctgctgctcattgagttcggtcttccgttaatattaagaactaaagacataattcagtgagtccaattattttcaagcagattgcaataacatttcactacaggacacggcttgggaagtctacaagcagatcaagcactaccacagcagcattgcagcactttcttcttactattcttctggagaatctggaaacactgtaatgggtgatcttcaatagcttacctccctcaagaacaggactgctacgacaatgcatttaagatatctaattcctgaataaaacccgatggttgacatgtaattcctatatttaggaggggatccccaggtgaacttaaaagaaacatttcactacatgatagacctgcaggacaagtgatacacacaccttgcctttcgcgattccttccttcgccagagccagcagcgcctggaaatgccctttcgggtctccactctcctcaaactcctaacattcagcaaagcactatttacataatccaatcgtgaaaggcacacgccaatctcaggtgtcagcaatgaaacaggaatggaatacaatccacccctaccccgcatctcgtcgggtgcacgcccaccatgcagaacagcctccctgcatcgtacaagcacatcacagcttctcaggcacattacaacaaacaccttgaaggcaccaaggagaacatagtcaaagcaagccgcatcgaagcagctgagctcaccatcggtctcggcgatctcgagcgcttccctggactccttcagcgaacctccggtgaccttccgccggaccaaaccaagaaagcgagagattaagcacaccaaatctgagccataagcaagaaataagaagcgaaagggggaatggcaggcagcaaagcagcgtatgatgatgcggtcgacgccggccgcccgcgcacgggcgagcacggcggggatgtcggcggcgtggcattgcttgccgtggtagatgcccctgaacatgccatcttcagttcgttcgcatcgcagcagcaaagagcaagacgcaagtagaaaagcgtgagagccagacagtgagccgagaaaaacgagataagaatcgggaggaggaggcggcggttataccggtgaagttgacggcgatgtctgctcgtcgcggtggcgccggagacggagaagaagatgagaggaggagtagaagaagaaggccgggtcagtccaggtaggagcataagagcggcgagcgagagggaggagagagagagtagggcactcgccgatgagcttgacgccggttgacgccatcgccgccgtcgccgccgagatgggggagagtccgaattgggcccggtctccgtgttgggcctccaaggctccaactaatcaaaaggaaaaagtacacccaaggtcccttaacttatcattgaattacaaaatcgtcccctaaccgtaaaaccggatacaacacgtcccctaaattacaaaaccagtgcaaactaggtcccttggcggttttgatctcggttttattcgatatggcagctgagtcagtgtgggacccacgtgagccccacgtgtcagtcccttcttccccccccctctcttctttcctccacagttcggctcggcagtgggcaaggcagccggccggtgggggaggcgggagaccggcggccggcggccggcaacgggtgacgaagcggcggtggcactgcacggtctcccgcgcatgccctcccacattgccgccaccgggggaggagctgggcggggct

SEQ ID NO: 11363 - DNA, 588 bp, Oryza sativa
aaaagagaaagaatcgaaaaccctagcgttccgctctttccaaagctgtaggaaaccaagaggaccagagagtcgaaggccttacgaagatgctaaggcaggcaagccctatctaccggccaccagacctgaagagaatcgctacggaggggccgagcaagcctaggcaagccaaagggagaccggatgtagtgccaaacttaacgagcgaacacacagtcgagcatgatgtggctcgctatttcatgcttctgagcgcaaaatgggcaggtcgagcgtctgtcaatgccgtgcttatgcagatgatctgccgcctagcaacgctgttggaacacgtgacccatgacatttgaaatcgaagttgggaaaaccaaaaataggaagaataagaagaataggaacaggaaaaaaaagaaagaaaataaaagatggcaaggaaaaataaggaagaaataggaagaacatgagaaaaattaggataatcattgtgaaaaaaatagatggccaacggattaggatccgctgacatgaagtcagagggacgtggtgactgatatgtgggcccaaccgctcgcgagcccacctgtc

SEQ ID NO: 11364 - DNA, 2519 bp, Oryza sativa
catccttgtaggtaactcgatcgtcagaggcaatgacgattgtggaaacaatattttagcaatataaagggaatagcgcacgagacctaaaagtggatggatgcggagacaaaggatttagatagttcaggccctctcaatgagaggtaataccgtactcctatttggggatttgaatccactgggtgtcttatagatctgacgatctgattgtgtgtcaccttatataggatggggggggggcatgattacaagatagaaaccttaaccaatccgatatcggtttcctaaatctactttacaatattatcaaaccaagactttaggccgttccataatatacaaggaaacgtaatacccaagtcatgatctgttacatattccatagatataagttatcccctataactagtcggattaccatgtcgtgtgggtatggggtacctataatctccacagtagcccttgagaccttcacagtcgaaaagataatcttctctcgaactagattactccaaagccgagtgtttcaatcatcttcgccattgtctcctgagtacttttaccaaatcagaagactgtggagggctgaaaaataattaaatgaaaatttaggtgcatcgactagatgtacctaataggtgtagccccgactacgtggttacttgaacaaaccaagcatagtcaaggaataaataacatgatccgagtgatataccaactgctttgtaaaatatgatgcgcgcaacctaaagttgactacatcattgaaaataaaatagctataaagaagcttatatgctgtgaataaagaaatttctaaagtattgggcacacaccatgcacacattgctttaacagatgtgcttaagtctctaaaagacacatggttgcaccacacccaaaaatatatggcatatgtggtatgaaatccgagtaaataaactcataaaggatttaccaacagcctagaaaatgactggaatatataatcagcctaagccataatattggttaataagaaatgcacacttacgtggcaaaaaagcaacgatactgtaccaatcgattgcttttataaacccaaacagcgccatgacttatataaaaaagtcagcgggatagcgatataaagcctcactatttgataccttttaaaatgcattctaccaactcctaaatagttgagtaacagcggtataaaaggattttaaggtattgggcacttgatcacgcgcacttttgcctaagcaaaaaatgcctaagtccctaaaagaacgtgacatgccacacctgaaaatatgggttgtagacatattaggcctagacctaaagtatgtctaccggtgcccttaaaatatgacgtatagaacacaccaattaatatgatcccaagtgataaatatcctgggtgatgtagatcatgcatatctcatctgagtgggttctgatctgagtaattatccctcatggagaataccaaaatagatgtgataattgaatcccgactggcgcaagtactcagttgatggccctcgtgggaaataatgaatagtccaatcgttgagcatgaccatgaatccatgttgaatgtaaccagaataagtccgaactaaaaatatgatccttgtgtttgagctaggaagcccctatgcatgtagcttatccttttgttgtagtcacaaatgtccattgatggtagctgacacagttggcatgtagacgaaatgaccaacatgaggatgatatcacccatcaaagccggcggagatgttgatggtgctaaagacaatgacaccaatcaaaggtgacgaagtcacatagccatggaggcgaagaaaccagtcggcggcagacaagttagccaatagtgaagacaaaggcgcccagcaacggcgacagagttgtgcagctatggcagcgaaataataagtcgataacagacgaggtgcccggtgaagaagacgaagacgtccatcagtagaggcataataagcaagccgtgaaaacgaagacatcatgggtggcggcggaggcaagccggtggtgaagacgtggacgctcatcaatggcaatggcgaagtccatcaatcatgcaaaagaagaaaacaatcggtgacggcaaatgcaatcggcgataatgacaattggcggcaatagagatagccggctatgatgacgaagttgcgcatcaacggcaacagagtaggtatagcccaagaggcatggtaggatgttgatgaagataatggtattgttgatccaatcaagtagtgtagtagtcaatgataacgataaggtctcccatcggtagttgcatagcaggccaaccgtgaagacgaaataagaagtcggcgatgatagaagcaaccgaaggcgaagacgtcagggccgatgaagtagaggtgctggtgatgaagtagaggtgctggtgataatatcaaagcttgagtagtttccttgacggtagggtgtgggtattgtagattgatgcaacgcctttttatttatgaaaaatg

SEQ ID NO: 11365 - DNA, 518 bp, Oryza sativa
cttgcaccccctccacgggggtcccttttataccgtggatcatcttgatctccaagtaagacttggagacatcggatcccgtacaacacaatagaagctgtatcccctccgtgtaggactttgtaaatcacccggcccgtagagatattttctataattcgtaacagattcctacaacgcatacggaaacaacctgtgtacgtaaaggtataccatactcgtatattctataagtcgtaggataggagactttcataggtcataaactgccctcacagaccaacacatgtcttttctgcaacactttgtcctcactcgtgtgcacccggaaagaatttctcggtcggccacccatcccaaattgctccaggccaagcacgcttaaccctagagttctttggagattggcttcccgaaaagaagttgcaacttgttgatataagcattccattaatcttattaagccctaggccgggatgttacattacatatatatttttttttttcaaaaaacctgg

SEQ ID NO: 11366 - DNA, 838 bp, Oryza sativa
caaccaacgttcaagtacctacagtccagcaacagtgcaagttatcagaatttctcaaaactgagactccaacctttgccattgtcgtcgaacctatggaagccagtgattggttgcgcacagtcgagaagaagctggggttgattcagtgcacagaccaggagcgggttgtcttcgcaactcatcagttggttggactggcttcagaatggtgggatagctacgaagcatcacggccagaaggacataccatcacctgggacgagttttcatctgtattcaagagatcccatgttcccgcaggaatgatcacactgagaaaacgagagttccgctacctgaagcaagaagatttgaccgtcacagagtacctgcacgagttccatcgtttggctcactatgcaccagaagatgtggaaaatgatgaagacaaacaagagaagtatctccaggggttaaaagatgagatcgcagtgcaactactcctagaggaatatgaagattttgagaaacttgtggacaaagccatacaactcgaaagtgagcataatcggatgaagaactgtaagagaaggattgtcagcatcccagtattcccatgtggtaaccaaagacagcgcacggagccacttcagatcaccggatcttctgttgcgcatcaagagtttccgccccaagaagatggacacaatgcagacaacaacattagcaatactaatgatgatgataccaccaacaaccatgcttcttgccccattagtgaccactcaaatcaagcgtgcaatgtcaacatcattcaccaaggtgtcgacgatagtatcaatgatggcacccaaaa

SEQ ID NO: 11367 - DNA, 546 bp, Oryza sativa
gatggagtatttgcatgagtttaacaacttggcccggtacgccccggaggatgtgcgggaagatgaggagaagcaagagaagttcttggcaggaatggacccggagctgtctgtccgtctagtctccggtgactatccggatttccaacgtctggtggacaaaagcatccgcttggaagccaagcacaaggaactggagtcgcacaagcgtcgcttggcgaatttccgcaaccaacagggtgctaaccaaaggatccgctacaccaatccctatccagggggatcttcctcgcagcagcagcaacctcgctccgcgcctcgacctcaattcgtggtgcgcgtcccacagccgcagcaacagcagagccagcaagggacccatgcgccccgtcctcctacgccagccgcgcagtctggtcaaggccgcagggacgttcaaggtccgcagcgtctgtgcttcaactgcttcgagcccgggcactttgcggataaatgcccgaagtcgaggcgccagcaaggccaagcgcctccctgctccaacaacgg

SEQ ID NO: 11368 - DNA, 606 bp, Oryza sativa
cctattggatcttctagtcgtgtgtctcagtactggattcctaaatttttgttatcatctaaccccagtactgaggcttcgacttctgcttgtgtgtaggctttggtggcgcggaaggagaacatgtggatcgtagattccggttgttcacggcacatgaccggtgataaaaattggttctcctccctcaaaaaggcatccaagactaaatcgattatctttggtgatgcttctacaagtctcgctacaggtttggttaaggtaaatgaaaattttgaattgaagaatgtagctttggttgaggacttaaagtacaatttgctttcagttttacaaattgttgatgaagattttgaggttcactttaagaaaactggaagtaaagtttttgattcttgtggtgattctgtgttgaatatttctcgatatggaagagtgtttaaagctgattttgataatcctgtttcacctgtgataatatgtttggtagctaagtttgataaagatatgatgttttggcatcgtagacttggacatgttggttttgatcatctcactaggttaagtggtttggatcttgttcgtggtttgcctccacttaagaaa

SEQ ID NO: 11369 - DNA, 1490 bp, Oryza sativa
gggtgaggatttcttgcttgaatagtcttgtgttcttagtagtcacactaattcagagcatttacatgaaatttggttgccatgacttcacttggcacttggcaggtgaaaagcaaacttgttttagcgtagaattagcagaccatatagccaactataacagttcaagagccatccacatttttttatgttgaagctagaaactgatttcgtgtgtttagatggcaggggtcaaaccagatggtattacttttgttggggtcatcttggcttgtacccatggaggtttggtgaatgaaggcaagctattctttgactcgatggaagcagagtttagtctgaaaccgagaattgagcactatggctgcatggttgaccttctcgggcgtgctggtctcctgattgaatcatacagtctgattgcgagcatgccagtggagcctgacgctgtcatctggggggccttgcttggtgcttgcagcttccatggcaatgtagaactagcagaattagcaatggacaagctcatccaccttgagccacaaaacacggcaaacctagtgatcctttcaaacatatatgcgtcatctggcaaatgggatggtgttgcccaagtatggaagttactaaaggagaaagaccacaagaaatcagctgggtacagcttcattgagttagatggtacgatgcataagttccttgttgaggataagtcacatccaagatttgaggaagtatacaatacccttaatagtgtcacaatgaccatgaagctggttggcttggaaaacctggaagaattgaaaggctaggttctctgtcagtctttggtgtagcctgtaagacaccaagcaatgggaataaaacgtgaccaagtagtacaagatttcttgtgaactatttgtctgatctttcatgttgaattggcatgcaaagggatgcaccaaggagacaatcagacaaaagacataatggcctggatgttgagtctctagcacatatttcaatataacaaaatggttctctgttgtgcttgttattcattggtataagactactaggcatattgcagctaaagcatgtcaatggcagatataccacaaggtaaatctcttcttattaatagtgaaatttagaactgacaatactgctttagtgattttccttatgttttattgcatggcatgaatcgtccaattccaatggttgtgtatttggtgccctatattatgcttcagacatgtgatggttatttcaaaaaccttaacttgtgattttaaattttctttgcatgcttgttgacttgctgtggttgagatcatgtttttttttatgcctgctattatatgtttgaaccatggaactgcaataaccctgacactatatacccaagaaaaactaggaacagtggccttaaccttttttttttttgggaaggttctctggagtattttagtcatattagttactccctccatttcacaatgtaa

SEQ ID NO: 11370 - DNA, 594 bp, Oryza sativa
tcgccgtcgctcgggaaggtcgtcatcgtggtcgccgtcgcgtctccgtcctcgtccgccccttcgccgtcgccgaagatcgccggagcaccgtcgccgccgtcaacccgaagagcgtcgccgcttcttcctcgtcgtcgtcgccgtccgttgatcttccgccgctcttttggtcaccggtgagttcgccgcgtcgcgctctacccgttggtgccttccgttcgcgccgccgtgccgtcgttcgccggcgagcatgcaagcccgagccgccgagccgccgccgccggtggtgacgtcaccgctgacgccatcatcgccctctcccgtgaaccggtcgtggaccgttcgatctcggccatccgttttggatcaagtcgatctcggccgtccgttcgcgtgaaccgtcgccgtgcgcccggtccaccgaaaccctagcccgctgacgcaataaatccctttttccttttcaaaaataatttattattgcgtcataattcaattaaaatcaatttaagtgttttaatccgatttaatcttcaaaaattcataactaattcatcttagctcggatttagttggttcaagtctctaaat

SEQ ID NO: 11371 - DNA, 923 bp, Oryza sativa
tgaactgttatagttggctatatggtctgctaattctacgctaaaacaagtttgcttttcacctgccaagtgccaagtgaagtcatggcaaccaaatttcatgtaaatgctctgaattagtgtgactactaagaacacaagactattcaagcaagaaatcctcacccgcaacttatagaacaaggcaagggcctccctccacaggccatgcacagcaaatgccatgatcatagagttccaagaacagagatcctgctgacgaccgataccctgaaacacctgccaagcttgtcgaatgctgccacacttggaatacatctccagtagtgcattagccacgtacacattcctcaggaggccttttcccctcgcatactcctccaccttcctcccaagctccatcgccccaactgctgcgcatgcaggcagcacactgctcactgtcaattcattcggttgtacccctgccctctcccacatctccaagaacgtctccaccgcttcctcatgccgaccgttctgcgcgtacccagacaccatcgcagtccaggaaaccacattcctatctggcatttcctcgaacagcttctctgccgaatcgacgaggccgcctttcgcgtaggccgaaagaagcgcattgtacacggccgtgtccctgcacgtcaattcgtcgaacaccttcctggcttcaaccaggagcttgctcttggcgtagaatgagacaagcgcggaggagaggaagggatcgcttgatgcgaagtggcctaatttgataagcagggagtgggagcagaggaagaagggggtggaggaggaggcggacgaggaggaggaggagaagaggagagtgaatgacagcggagtgaggaggcgaaggcgatggaggcgggagaagaaggggaggaggagggggtgggggcggt

SEQ ID NO: 11372 - DNA, 560 bp, Oryza sativa
ccgtgcgtctcattcgcatgggtgttcatttctgttttgacacccatggctttgaggttagtctggtcattaggaaggccagcagctgccattagttgctttggctcgtgcatgttttgtactggaagttttgctgcagtttgcttgggatagctcttcagaccctctgcagatgaacagggaaaacattaaacatttcaaagcataaaaaaattgctgaattttacagggaaaaagggggaaaaacagctgcttcgctgttatcactgtattatctaaattggtatgctgttataatctagtatccagcaacaataataataatttaccaggtaatccttccatacggcaaccacacaccaccatagctagttcaaaaaccatgtttaccaagtgatatcataacaacaagtatatgatgttggatttggtttgccatggatatgcttttactatctagccctgtaagcattttccccaaacaatagaatatctctcaacacttcagaccaaaagaacttctaggcttatgcttattaccattttcatgcaaaacattg

SEQ ID NO: 11373 - DNA, 4841 bp, Oryza sativa
ggtgggggcggtggaaggaggctagagcattgatgaggcggttgtggagcggcgcctaaggaggcgccgggtaggattcgaggaggcgcgcggcgtaacactggacgccggcggtgaggactctgaagagcagcggctgcagcaggcgcaccccgcggcggagcgcgcgcgcgtgcagctgcttcgcctcctccatggaacatgggaaacacaaggcaccgtgctagtcgtttcagacacgacgacgccggcggctcgagaggatgctgagctcactgacggtagtggaccggagaagagcgcggccgcgccgtcggcggcgggcggcgaacggcggcgggtggcgggtggctggtggcggcgagagatcgtcgctggagaaggtccaaagagtaggagccgaaaaaagaggcccatctagcagattagtactagaattcttttttttttctctctcgaagtttcaaaaaagcatgaaaatttttacgtggtccccttacataacatggaagtttatatctaagtttcaagtttttttatatttattttctagaaaaaaatatatttgtatggtatatttgagagaatttacttacacaaaagataataacacaaaaatatcttatgtggcatatgaaaggtgatttatattaaaaacaccaaaaattattttgtatagcataacacaaataagttatatattaaaaaaaattgaaatgcaaaaaatttgaaacttatatacaccatattgtataaggaagccatatgaaaattttcatagtttttttaaaacttctagataaatcgattgttaatcttatatatccatagggtattttcaaacaaaggttcggtccaatagcatattatataacaatagataaaattattggtatattgtaaaaagagataatatcagtgataaattatagaatagattctctcaattaaatatgcgacggaagcgtccctttcaccaccttcttctaaagtggcaaggcaaaatccaatgaaatatctgaaccaaagcgaccacgtgagacggctcgcagcacacacaaccatgatgtcccaccacgaagcaagtgtgccaagttggcaggaaacctgctagtctattgagccacttggcacctccaaattgctagaacattagaatcatctaaaaaaaaagaataaaaatctttaggagcataaacttccggaaacttccatgttgcatattttccaaatactcttttccccttttgcactatttcctttgcaacagtttaacaataacgacaaatttccatcaagtccccaactgaagtcaacaaaagaatatcaaaatggaaaaaaaatagcccttctatttccttttgaattgcttgagtaatatgtctagaaaactactgataacttggaatgatcatatctagtaaatcacatgcatatagcgagtacttttacctacttctctatgcttgagagaatgtaagaaacaaaatgagtctaatactaaatatatttaaaaaagaaattatattctctaccttctgtacaccactaataaatcaatatgaaaaatttagaatatgtttcatatgaaaatattaggaattctgattcttagggataataggaaaatctcgatatgtcataggttaaatagaaaactaaatggcattcactaattattttatattatgcaaaattgttgtattctaaaggagaatatgaattgtggaagaatgccaataagtccaataggaatacgaaaggtgccccaatcgatccaaccccgaggttagactcatgagagctagctaagggaattttgaggtttttcagttaaagaaatatattacatgttaagttagaaattaataacccatcaagtggtccttctaggtgttgatagaaattcaatgggatatgaactaactccataaaaaaaagttcttaacttttgtgtgttctaaacatgacataaacaatatagaagtacattgacttattaaaaaagtacttaccaaccgccttatttgatatttatagtttgaaagaaaaaatgaatataactttttaacaaaaaaatgacacataaatatttatgagctatttgctgaaataaattaaaacatatattattttagattttttataaggatggcagtaatttagataataaaactcataatataacaactctaaataatacagcaaatagtgaatatctagaatataataaatgcagtggctaaatccagtgggtgcaccaacaggggcatcgattatctagtatagaataaatgctctcaattaaatatgcgacgcaagcatctctttcgccacttttttctaaagtggcaaggcaaaatccaattaaatattgacgaaccggaggaaccaaaacgaccacgcgtgagaactgagaaggctcgcagcacacacaaccatgatgctccaccacgaagcaagtgtgcaacaagcgcgagaggaagaagaagagcttgatcaccatggcgatccgatgatcacctcccctctctgtgagcacccagaacccagaagcaagatcatatattgttatttcattttcctttttttaacgaataagatcaacgagattatatatatatatatatggccttcatcgtatatatgttgctgactgatgatgctcgtgcacagtgcgaccatcgacgtcgggcagctcgccggagaatggagaggaggagaactcaccggtggagctggtggcgctgacggtgccagtgagcgacgagccggagacgccggtgctgacgttcaggatgtgggtgctggggacggcgtcgtgcgcggtgctctccttccttaaccagttcttctggtaccgcaaggagccgctcaccatcaccgccatctccgcgcagatcgccgtcgtgccgctcggccgcctcatggcggcgacgctgccggagcacgccttcttccgtggccggccgtgggagttcacgcttaatccggggccgttcaatgtcaaggagcacgtgctcatcaccatcttcgccaactccggcgccggcaccgtctatgccatccacgtcatcaccggcgtccgtgtcttctacgggaaaaccctctccttcttcatctccctccttgtcgtcctcacaacacaggtgcatgcaaactagcttctgcctaaacatttaataaattaagttgtcaacgccctgatgctagattagcttaattacctggcaatcaaaaatagaaaaaaatatttcttccttctcatgcgtgtacgatacagtaccatcagatgctggggttcggctgggcgggaatattccggcgttatcttgttgagccggcgtctatgtggtggccatccaacctagtgcaggtctctctgttcaggtacactgcttgaaaaccagagtagatagtatgacaaaaaatcttctcaccagagttgaattcttgcaaaattttgatccactcaaacctccacaccggcaatgcaagagtctgaaccaccacatatgttccacttggaagttggaaccgctgcagtgctgcaccgaactacaacaaaaatggaagaagaaaagtgacatagttaggagctgagggacctcttatatattttctctattattttttcaagaagcttccctagctaagaatgacaggacaaacacaaaccaaattctgtttgagtatagtaagaaatccaagatttaaacatatgtaaaactaaaactaaaatggagttgtgcatatacacattcttagctctgaaacgacaaagaagtttgcatttgcattccgtaagaaaataacttacatatttcttatactagcgcacttcatgagaaggaagcacggagaaaaggtggcttgacgcggaaccagttcttcctggtggcattcgtctgcagctttgcatactacatcttcccaggctacctattccagatgctcacctccctctcctggatctgctgggtcttccccagctctgtccttgcccaacagcttggttcaggtctccgaggcctcggcgttggtgcaatcggtctcgactggtcatctatctcctcctaccttgggagccctcttgctagcccatggtttgccactgtaaatgttggtgttggcttcttcatcgtcatgtacataatcacaccaattgcatactggtttaatttctacaaggcacaaaatttccccatattttctgatggcctcttcacctcgactgggcaaaaatacaatgtatcaagcattgttgactcccatttccattttgacaccaaggcctatgagaagaatgggccactatacctcagtacttcccttcttgtcacatacggtgttggttttgcaacccttgctgcaacaattgttcatgctctcctcttccatggaaggtatttttttttcttagattcgccactccactgtctacaatattaaaataatgtggttaagaaccatgatacttgtctccagtgaaatttggctattaagtaaatcagcttttcaagaaaaaaggatggacatacacacgaaacttatgaggagatataaacaggtccctgagtggtggttcatatgcatccttattgctaacatcggaacgaccatatttgcttgtgaatactacaatgaggaactccaattgccctggtggggtgttttgtttgcatgctccattgcctttttcttcaccctcccaatagggattatcaaagcaacaacaaatcaggtatgtggatttaacacattggacatattatgtcatacagatctaacaagttcaccttttttcattatatacagactccaggcctgaatgtcatcac

SEQ ID NO: 11374 - DNA, 1804 bp, Oryza sativa
tacaaccatgagtctctgaccgcctgctactgctgtctgtatcttaccaaatactcctaccaactccaatctctctcaagcattaacctacagaatttgcagttcttcacggtatcgcatttccagctaatatttttaacgatgcaagttgtatccaacctattaaatgaaaaccgttatctaaaactaatgaaaatccatgttaataaatcttatattcgcatgttttactccaagaggacatccaaaagtattacacatttgcatgtattattcaaccatcgcttaattctaagctaatagtacatatagtttattcaagctcacaatgatatttagctaatcattttgggatgcttaggtccaacaaccgtttataattcttcaactacacgtgcagttgcaagaatactattatcctatggttcagtccaactaaaaatgcagccggcgaagtttcattagtccaaccatttgtcttttggtgtcagttagcatgggcaaagtttcagagtaggaagttgaacaatctacagccgaacctaagtccaacacagacaaagacaatctcgccgcttccgatgtcgcatacgagcgtctcaatgtctgaatttttagatgttagtaaaagtctcgagtacaatgcgtctcagcaaccgctgattagctggttagcatgcatgtatcctggttcagagttcagatatacatgcagagaacagaactgttcaccaaccctttctccaaatccttcaaacaacttgatctttcaagtcacaggatgagtcacctgcaggtattcagtttgaactttgaactgtacgttttcttcagcaatcggataagggtaatctgaggcttttgatgcgaagaaagaatttgctttaacaaagcaattgttcagacaaatccatactcgatctcgaggccacatgtcatttgtagtcaaatgtacatcaagattccacattagcaccagtgcaatttgacaggaacatactaattttgattacttgatatacaaattaataacatatagatcagtgcgtctgggcatgattactcccaagttggtgttcagaaaaaactgctgcaactgccgctatcaaagtacttctacttaccaaacatgtcgcaacagtgcatttcaaaaaattgcagtttgaccagtctagcacgtgtgatatcgctctctggatgcatatgcatcttgaccatttcatctttgtgtactgacgagacctgaacaactgaacatgcagcagaggaagctgctccgttcttgtggcaagttcaccttttctttacctaataattaagtttagcataagccttgtgtaacatgagttgaatcctgaatggtgttgggatttcttctgaccatgttgacaacaacgattaacgctgcaagatgacaagcttgagaagttcctttcgtggacttggcctaacgtagttgaaagagttcagatatctgaagaaacaacatgaaagtttaacttttggaagaaaaaagcacaactttactcacctaaccatgcaaagtatgaattccaatatgagacgagtcatgcttctgattaaagagtatggagcagaatacggattacgtaattctgttgagttcgtgttagttagcgcttcatgaacctcttgttttttctttaacacatcaaactcctttttatggactactttctgctagaatatatgcacataaatgagtttttcgcctcaaagaaaaggattaattccttgaatcctcgtatgccatttgagcattcgttcacatcatgcttctgaa

SEQ ID NO: 11375 - DNA, 8450 bp, Oryza sativa
aaaattcatgtgtttttttaagtagtactactaccaaacaacatttttacaaattactctggatccacttcccgtaggattcagtaagccttgacaactattcatgtattttctaaatcatgtctcaaagcaacctaataagccagcattcttctcctcaaaactttgggtgtgtttagttcacgtcaaaattagaagtttgattaaaatggaacgatgtgacggaaaagttgaaagtttgtgtgtagaaaagttttgatgagataaaaaagttgaaagtttgaataaaaattttggaactaaaactcggcctttgtggattagatgatcacatctcaaatgctagtcacatcaaacaatggaatgtccagaaggttaaaatactggtacatatctaaagaaacatttgcttcactatggaccaacatgcgttcagacttcagagacaccgaacctgaagaataatgctgtcgcgctcgtaaatccagcacttggctgccgtcggccgaagccgctcaacctactccggtccacgtatccgaaactccgaatccaccgataaaaaattcaatattttcttttatatatactacgattttgagaagctgtgatctcatatatgaaatgaaaccttcaggttcagtgctcatatgaaaccttccagggttcatcacacctactacgaggaaccggatgactgacacgcaagaacacaaggtctgaaccggttggtttttctctcataggataacagcaacatgacactatgacagcagcatcaagtagtagtagaggctgcgttgaacggattgagtcacttgcacacgaatatctcggaggattattcagcgattccaatggcaacggcgacatctttgcccctgggctgaatcaagccaaaaacattggccgaaatcgcatcttttttatttaagtagtgctagtccaggttcaccttttcgattgagtgctggatcggcggtacgacatttttctaccaaatttcgacaaatttcaatcaaattttggtcaaattttactgtttcatatctgaataaaccatttaagttttcatccggaatctgcctttgacgtcgtaacctcgaaattcttcgggttttaggggctgtttggtttccagggacttattccaagtccctgtcacatcggatgtttggacactaatttagagtattaaacatactctaattacaaaacccattccataagcttggactaattcgcgagacgaatcttttgagtctaattacgccatgattttgacaatgtgatgctacagtaaacttttgataattatggattaattaggcttaaaaaatccgtctcgcggattagctctcatttatgaaattagtttttttattagtccatatttaatactctaaattagcgtccaaacatctgatgtgacatgggctaaaaagtattagccccatctaaacacccccttagtactagtagactagagtagaggctaacgagaatccaagaggtggccgtttctttcccgccttttcttcttctaacaccggctactactcactccgtcccaaaaataacctaaccctggatttgaacctgacatatctgtgtccaagtttaaacctaacatgtgtctaggtttaaatctaggattgggttttttttggatggagagagtacggagggtccagatttaaatctaggattgggtttttttttttggagggagagagtacggagggagtacgtcgcaggcagatgcagtggcagaatagttttctactactatctttttgaaaaagctaatgggacaaatgtaagcactgctcgaggtttccttcacagccgattattgatttcaaagaaaacgaagtgaagaagaatcacagcaacagagacaccaaaggaatggcaaaatcttttctggactttgcatgtattattgtcgtccttgccatgttgaattctaagagagaaaaaatacaatggacaagagggggatggagatcgaggagattgagacgcccctaccaatcccacacatcccaatctcatcatctcatctcgttgcatccatccactgctcaaagattgaaatctttggagagagagagagaaattattaaaacgaaacaaaaacaaaattctcatctcattgcatccaaaatgaacaatggtaaaaaattgtcatgaaatgaaatgaatgaagcaactaataatcgaacgaaacttatttgttcctcatcttattctctgatgaaatttcaaaaggagagcgaaacagtggacactgacgcttgcgaaataaaaaggtggcgccagaaactccggcgagactacggcgacgagacgcccgacgacaacgaccatgacacgatacaaccacacactgggtggagattaccgtcggcgacggcgacgaacacgacggcgacgacgactgctcagtgcgacaggtacaatggaggaggagaaggaggtgcaagaactcctcgcgtgaacaccaagaagccggcgatggctgcctcggtcacacggtgagcccccgcatgaactcccactcgtcgtcatcctcctccgccgcgccggcggccgacccctccgagtcgctgctcatgccgctgctctccccgctggccatcgccgcggcctccgggtcgaacgacaggtacggcattgcgccgaacgccctggcgagcgcggcggcggtggcgccgtcggtcctctgcttgagcacctcgaacatcacctcgggctcgtgctgcatcgagcggagcacgtcggcgcacgacggccccgccgccgcgcgcgtgacggcgaagcagtgcggcccgtcgctctgcgacacgcgcaccacgctcggcccgccgaacaggttgtggaggccgccgagggcctcctggtaggcgccgccgaggaacatgccgaggtagtagccgcgggtgccgtggacggggagctcgtgcagcggcaggctgtgcctcccgccgatgaagtggtcgaccttgccgtcgctgtcgcaggtgaggtcggagaggacgccgtcgaccgcagggcgctcaccgaggcgctggattgggatgatcgggaacatctgcccgatcgcccacatgtccggcagggaggtgaacacggacaggttgatgtggtacgtgcgcggcggctcggcggcgcccatgccgcgggcgacgatctcgcagaggctgtccaccgcggcgaggtgctccaggccaagaacgccgtccttgaactgatcggcgcagcgccgcttcagctggtcggcgtacagagcgcaggtgtcgaagtcgccgcgcaccgcggcggccatgaggttgcggtagtcggcgtggcagtcgtcggtgagctcgtcgagcaggtagcccgtggccgggtcaatgcggccgggcgccgaagccgagaaggcctcgaacaccaggacagagtggtgcgacaccagcgcgcggccgctctcgctgcagatgatgggatgcgcgacgcccttgcggtcacagacgcggccgacggcggccaccacggccgccgcgtactcctccaagctgtatgccacggacatgtcggtctgcgccgagtgactcccgtcgtagtcaatgccgaggcctccaccaacgtcgatgacgcgcatggccgcgcccaggcgggcgagctcgcagtagatctgcgcggcctccccgacgccatcgccgagcagagcagtggtcgggatctgggagccaatgtggaagtgcaggagctggaggcagtcgagcataccaagggtcttgagcttggcgacgacggagagaatctgcgcggcgttgaggccgaacttgcccttctccccggacgtggagccgaagtggccggcgtgcttggtgcgcagcttggcgcgcatgccgaccaccgggcgcacgccgaggcggcggctagcgtcgaccacaatgtcgagctcctcctcctgctcgagcacgatgaccgtgttgagccccatggtgcgcgcgatgagcgcgagcgagacgtactcgtcgtccttgtagccgttgcagatgagcagggcgtccgggttgccgcgcgcggcgaggcagctcatggcgagcagcagctcgggcttggagccggcctccaggccgaagcggaacggctcgccgaactccacaatgtcctccacgacgtggcggtcctggttgcacttgacggggtacacgccctggtacctcccgccatagccggtggagcgcacggcgtagtcgaacgccgcgttcagggcctccacgcggtggcggagcacgtcggggaaccgcaccagcagggggagcggcaggccgagcccgccgccggagcgcgggccggcggccttggccaccaccttggcgaggtcgatctcctgcccgggcagggttgcggcgccgtgcgggcgcacggcgacgtcgccgtcgtcgttgacgaagaagtacggcgcgccccagccgtccacgttgtacagcgcggacgagaggtcggccgaccacgcggccgcgtccggcttctccgccaccgccgcagccgcggcggcggggcccagcagcggcgcggggaagcgcgccgcgtcgcacgcgaaggcgtgcgcgacaggtgcagcggcgtccacggcgagcgcaggcatctcgtcacaaaccggagaacgctaaaatccacagaaaaaggttagccttccttctttttttttcttttgctgtaaatctgttgtctgtttcggtggcgttagcagcgaagaatcaaatcaaaggaaaaaagaatgaggttgtttggatggatagatggatcgatcgagattagcaacaagaagaaggataagaaatctaaagcaagaagaagaaatcgaaagaaagaaagaaagaaagaaagaaagggaagggaaattgaatcaaggatgccaaaagaggaagttttggaaggggaggtagaagaactctaggacgggattttggatcctgttgtgaggaagggggctttgaaagccgccgaggccggagccccggctacccccgcaaaagaagcaggctgggggagcgctcgcggcggaggaggagtcgtcgccggtggtggagctggggcaccccacgccggcggtcaggagagcgccctcgtcgtcgcagccgctatccacaacccaaccaccctcgtcgtcgccggcgtctaggagggtgttatgaccctaccggcgtcggagtcgtcggaatcgtgaggcgtagcggcgagcgagcgagcgagcgagagatgagatgggaaatgcgagggtttgcgggtgggcgtcgagccgcttttatagcccccccgcccgccctcgcggcggcccgccttggcccatgggccccaccccccgccgcgctcatctctcctcccttcctttctgttgctggcggcgtccgcgaaaacgtaaataactttttttttccttctttccgttttttcctgggagacgggtggtaggtgcggtttgaccctgacaaagcggggcctacgtcgcagcgacacatggcaaaaaaaatggcatatggctctccgggtgtatggatggatggtggtggttggggtcgcggacagcgcccggtaatcgctgcacatctgcttggctctctctctcgcctcacttcacatgcctactcatctcggcaacattggtcatcgtctctccaattctccatcaccccacggtggttgaatgcttcaatcctcctctctctctctctgcttcctccctcacggggggtcacgttctttgatccctctcttgttctgttgcgcggggcggttggctggctggctgctgctgcagctagcggcgatggatgatgatggtggtggtagcagccagccacggtacgatctgggccgttcgttcacgatccggcggcggggagcgtccgagatcggacttgtgggaggttttggatgcagtttatacgcgggtgggagataataatagggatgtgggattcgctgcgctgcagcaggtggtcgaccgatctgctgccgctgccgctgccgctgctgctgcatgcgtgtggggggcgtcgcggtcgactgctcgatcggccgaacacgactggagatttgaacctccggttaattctggattttgccggttgctggattaagggcatgcttagttggcaaaaaaaaaatttacccctacatatcacatcagatatacgaacacatatttaaagtattaaacgtagtctaataacaaaataaattacagattccaccagaaaacaactagacgaatttattaagcctaattaatccatcattagcaaatgtttatttagcaccaaattgtcacatcatggcgtaattaggccaaaaattcgtctcgcaatttcctgacgaattgtgaaattggtttttgtctatatttaatacttcatgcatctgtctaaacatttgacgtggcagcatggaaaattttataagccctaatttttctttattgttagtttgtttttttctcgtaagagttcagcttggcaggggataacgagctttgaattgcggggaaacgcttgcggtttttttcacactagctaggcacgcctgacgaaaattcagcatggttggtggtccgaattttttataggattttgcgcacggggatgggattagaaaaagttttgtgtactaaaggaaaacacttagtaccttgttttgggttgttggaaaaacactttaaaccaagtatgtatgatccttacaaacaagatccaaagcagacgacaaatcaacaatcacaatttggttattctctcttttactctcgtaaatctcaaagacgtgagacctgtgtttggcaacgaggagatggttagacgtactagttcttttccattccttcgctcatagcgaaatgaaggatcttttgttgtggctgcaatacaacgagaggacgtgtaaaccttttgggtgtgtatatccacaagtgaatatggataccgaatttctatctattatcttttagaaaataaagtagataagatacatagctttgtgactagcaaagtttatttagtgtaacatagagctcagatgtttcgtactaacataagaaaagacaaaatggatgagaaaacactcggctaatggtttcaatgggttaggagccgtgagataaaagattatagataatgaaatattttattaattagtggtgacatggtaaaggatatatatatatatatatatatatcataatgtgtgtatatcttcttataaatatagatatcggatttatatctagtatcatcttaaaaaagaaaatagataagatagagggtcttatgactatggacagaattaattgagtgagtgtgaacatacaaccaaccaagatgtttgataccaacataagaaaacgaattgacgaggaaatactccattaatgattttggtggattaggaggtgtcagatttttcgcgaacgcacaaaaggattgcacgttaatatattagaagaaaagagtttttcttacacaacacaatcagccagcccggcttatgctaggggaatggagaaaaagcaaaataaaaaactaaagcttaggatactacaacaaccaaacacaaatccaaacagcgggaagggaccaaaccacgctacactccaagaagtccataaaagcggcaatgccagctaaagaccacatatcaccctccgagtggatgaactctagaatcagagtctgagatcgaagagagcgcaaagtcgaaaacatgaagtttcgttctttccatagatgccaagagaccaagaggtgtcagatgaaatatttgcagttaataaaatattttattgatcagttatgatatgatagagtatacagaatactagtaactcataacgtgagacttgagtctatcaatctacaagtaaatatatcttccttccatcatcgtccatttctgtacaccgtcggttatgggttggtatgggtttattcggtgcgtatagtacagcaccactgataaccactctactgctatagcactatacgtagtacgtaactgctcgcatttgcaaatttgcatgggtcggaagcctaggaggaaagcgcagcatcatccgaacctatccgagctcatatccgtctgacttgggacgagggtagccgctcatgggttcaggagggctataggccgtagcagcgcgcgcggcgacggcgagattcgatcgatgggcgagaaaaaaaaagcgtcgtttctttctggaaaagcatatcggatgggcctgcctccgccggcgttgtcgcctcaccaccacccattcattcatttctgagtcggatggatggatccaaggagaatccgcgggtggaccgcgtcgaggcgccgcgtggctgcacgcgggcccccacctctccagccacagatctctcgcgcagatgcgtcgtccctgacctcacgctcccccc

SEQ ID NO: 11376 - DNA, 13617 bp, Oryza sativa
ccccccccccccccccactcgtcaaaccccgccgctttcggcttcggctcgggtttttttgccgttcgcctcgccccgtcgtccgccagcaaatgttcccccgttgataaaaacggctcgagtccggaaatatccagattttatttcggggatcccgatgggcggcccggatcgccgcatcctgttgactggacggcgatgcgtgcgtgctccaccctggccgttgccgcgcgagccgttttcgccggctcatgcggaattccggattagtattatatactccctccgtattttaatatatgacatcgttgactttttgaccaacgtttgactattcattttatttaaaatttttgtgcaaatatgaaaatatttatctcatgtttaaagaacatttgatgacgaatcaagttataataaaataaataataattacataaattttttaaataagagaaatgattaaacgttggaaaaaaaaatcaacgaagtcatatattaaaatatgaaggtagctatatcggctttcactggtactcgtactccaatagcgactagtgacctgcagctagcacaccggatgcagcttggagttctgttcttttttgcatagagtgcacgtacgtacgtgcaggacagattttatgtgagaggtcaattttgatgtcttgtttcttgtcaagagatattagcgtgcctccgcgccaaaaaggagaaaaatgtgaacaacgccacggacagagttacatttttcactccgttctcatcactttctaagtgacaaatatctaccagggattttgttatgtttactacgactagagtttaattccacttgcaagtgccgcgattttcacatgaaaaaactgaagatttattatagatattatctattactactggagaaagcctttttcctctcggttagtaacccctatactcctggttttgcaaccgggagtagaaatccgggattaaagatgagtatctttagttattcgggattaaagatgagtatctttaattttaggtgaaataactgggactaaacatccatctttagtcccggttgatgatgccaatcgggactaaagatggcagcgccagtcccggttggctactatatttttttcattattttttcccaaatcgatttggaactgcacaaatctcttcccaaattgagttgatccccatatccccaaatcaaaatcaaagtatcatcacaaacatagattcacatcacaaattctaaaaaaaatacatctcaaattataaaagaaatacatcacatatcaaatcaatcacaacttctaaaaattctcagatccaatgtatcacaaattcttaaaaaaaaacaaaatcgagttgccgttgcgccaccggtcgcccaccgcccgccaccctcccatccgtgcggcctaccacgccagccgtcgcctgcccgcccttcacgcagcctaccgcgccagctgccgccgctcgaactcggccgcctggagaggaggaggcggggaggggtaggagagggggagggggaggaagaagctaaggggagaggggaggggagatgactgagatggagaggagaggttgttaatttaatgagaggggagaggaaggggagggggataagatcgatgacgacgactgtcgaccgagaccgaggcacgcagctcggggtttttagtcccgattgtttataacaaccgggactaaagataattggggccctgactcgtcttgacaactttttgaaccagaactaaaaataatctttagtcccggttcctattcgaaccaggactattgtggattttgggtgatcgatcaaagatggtttctccagtagtgtatatatgtaacttgtgtaggaaaactaatgtccaagccttgcaaattctaaaccatttggatcaacaatctaacctagatttcatcaccaccttcctaaataaaacagctcacgtctcgtctaattggcccgtattagggtatagttagccgccgccaccaccatattgctccgctcgatcctgcctcgtgcgccacttagagcaagtttaatagtatagccaactactagctccaaattatctagagccaatataatagctgattcatacaatagttgattactattctattaatatctagtcccacctgtcatacacatgttacgtcttagagtccgtgctgcagctggctacagatatgtaggccgctgctcttctctctcttcctttatctctttaaaatatgtttatagctggcttatagcatgctattgtacctgctcttattgtcgttcctccgcgttattccttccgtcgtcttagagcaggtataatagtagacggtaagactttaaatattatatctgtgatgacatggaaggaagagaaggttagaaaaggcaaaggcgagcgcttcatttagcactagctccagcacagcctccaacgcaaagtggtggggcccacgagtgggagggtatggccagccaattggatggagctaagccgattgatgtgcacagttagttgaataaaatattagaagtaactatgatgagcttaagtagtatttcttctttttatttacttttgctaaggtggattattttgtagctggcagccggctgctctattaacctgctcttatttgtctagatatattaccatcattcgtcacctcgtaatctgcattcttccttgccatcgtcaaggattctacccactgctcagtgctcactaacaaccccgcgaaactggcacaactatcaccttagtgctccccatcatcgcagccctctaaaccaagaaactcccccatccttccactctacccagctttgtcctcccaccctgaccctaattttgaatcatattttggtcaagcccgctactctattgtatcgtggaagggtcgttagagttgctgtgagtcaccgaagctaggagcctaggaggaaactggtgtgcaagtatttaagccaatcggatgatccataatcttattttgttcgtcgattttttttcgtcaaagaacgttagaaaatccgttaattataatgtgatgagatttcatacgatcgagacaatattttcagttaccggtacaatttaatactcctcccgtgaaacatgtacgactcgttaagtcagtgcacccatccctgcatgatacatcccgcctactagatgctgtgtacgtgacggacgcccggccggcctaggggcctaaagaaaaccgagaaaaacgttggaacaggacgacgtactacgtaaaagcaacgaaagtagcctgctcctccccctctcgctgtctctcgctgattgatacgcacggacaggtggacggagcagactggcccggcatggagacacacacctcgcccctactagcgcgagagatcgccgcgccgcgcgttgcggctggatgatgagttcgccatgtgccgccgcggcggcagcgggcgtcgatcgtccagggcggggagggtgcaacccgggggaagcgagatgccgcccgggcgccggccggggcggggccccgaatccgcacgccgcgagaccgacgtttgctgagatttcgtgggggctgcgcaaacgcaagcgcgtgcgagatcactctcaaaccggtcgttggcttgttgcgtgactttccactaccggtctcactctttcgcatatacaaatcaacagatgttagagtataattatttataccatagggcttgcacatgatcgaaggggttgttgtcatgtttggaacaaaggagatatataccttttgtgttgattctagaaatttttttgaaaatatctatttttttgaaaaagatttgtgtttacatacactactataaagaatttacgaaaatatacctaatccgcagatcagttctgcggtagcgcaactaaagtatggcatggcagcgtggagtagacggccaaggcgtttgcgcggaacggggctacgggacggagccagtcccgcatgccggtaacacggaaccgacacactcccgcaatgccggtgtgcagaacggcggcgccagcatttttttactgcgtggcagtatattcaatactgtttgacactgttttacacagttccatgtcaattccgcacaacagaggcgcggcaccgggcatgcacagtgtatgaacagtgctgtacagggtcaaaacagtgtataaactgtgctgcacagtgctgaagtcgctggccactgcggttccgcgttttggagctgcgggatcgcgacggttccgcgtgaccatcccgcgggatcgtcggtcccgcattttaaatctgcggaaccgtcgttggatgagtatatttttgtaaaacctccccatacatgtatataaacataaattattgaaaaaataattatatttataatttttttccgttgattctatcacctttgtgaaaccaattgcaggagatctacccttagcttcgtttcttcaatgagttggattctcaaggggtgatacaagacaacgccggggaccctggatgagggacgttctagcatcatgggaggaaacgtaaacctttgcctcgtatctagaaacatttattgtcaagttattgacatccgagcaagtactaaaaatcttgatgaaatcttgatgcgaagttgattgaagagcgagacaaagtttccaccactctgttgcatcacatctagaaggcaaagaaaacatacactaaagccatttttctttacatacgtggtggattaccctccccttccatctcaacctagtacaatatatgctggggaattgctctacaggcaatcagtgtcatacttatcaagtattattataacatatgctcatattcgttgtagtaggatatgttctattcgatattagatagttatattttaggataaagataatatattggtacatactatcaacagaagggaaaaagatctaaagtcgtgaacgtttttcaaaattttagtgttttcaaaacaacattttcctccataataaaaaacaatatctttacctgtagggttttgtgaaattggtgtaacatgttcctttgaaaaggtagatacacatagtgcatactactccgtctaaaaaaaccgaattcctagctatgaatctggacacaggaatggtctttttttttgggacggaggggtagtcattagtaaacgaaggtgacccactttttttggttttacacagttcataggttacacgattttttcttcttctaaaatctcatttcatcttctaaaaccatggatctcacatgcaatttctccatcatacagtggtgccgataaacatcgagttagatccttggtttgaaaaagggccatttgattgatcaagtaggaggtgagagggccatttgattcggatctaaccattgaggaagtggagatatagatctaataaaaattaaaaatttatgtgaaaaataaaaatgagaaacccactaaacacctgtaaccaaacatacgaagaaaaaagaacaagctgagatttacaatacgtcgtggtcacctcagggcgacactctaacatatctggtgactcgggataaacctagagtcacccggcggattcgaatgggatttaagagtttcctttttatggggaaggggtgatcgaaagttgagactatgacataacaatgccttcaggactaagacgtacatgttaatttcgtcaaaaggtacaaatcttagtaaactactctcgtaggatgaattgatggctgaccgtatctagtggatgatgggattgcttgtatgccaccgtcactttgcaaaaaccgtgttgataaaatgtggcctgctaggctgtgacaaaaataagtttatgatgcatttttgtatgtggtttttatactgacaccagtaaacgattcttgtatgcagggataattatgacccgcctacggtatgtaggaggtttggttcgaaaaaatcgattatgtagtactgtgatggggtagtctgaatttatataaaaaaagtgttacaaatcatagttatagcacgaaccaaaagcttgcttaaactaatcggcagtcgatgtcaaaatgtcgtaaaatttagcacccaatcaaaatgtccctcctgttcgaaggaccgtgggagtgggacagacagcaaagcaaagaaaaataactttctgaaaaataacgtgagcctacggctacagaagtactacagtactgtattttcagtacagtgtagcgtcaggccagttaacctttagctctgattctctgaacagttagcaacggcgtcttgtcgcgatttatctacgcaatctgcagagcactgtacatacgtgcctagattcgtgtcgctcgtcaccggctggcccgtcaacgattgcatctccggcgacaaactctgacgctaatgttttgggggataaataattgaatcttctaatgcagatttggttggtatcagatcgacaagcgaaaaggagataaaagcaccgtcagcatgcaccttcgattttactatgcaaagttaagctcggtggttctgcttgcgattcgcatgtgttactgtagctgtcatttccaggaagctaggttagcacgtgtgtttaccttacctggtcaaaggttttactacgtaatgacgtaaacttttcttgaagaaacttctaaacatgtgcaagttgtcacagagcacgtacgttctctgttggttacagtcctagggaaagatatcgacaaagacactgaaataataactagtatcaaatcttatcgtcagataaagaaaatgatatccccggctgctatcctaagtggagctattagttcaagggcctggattagtttcatctctcttttttttttttggggaaaagtttcatctctctttaacgtcgtcacaagtggtctcttttttcgcattattgaatcagcaaagagttaaagagaatgctgtgacctacttgataattgagacctaattccatcctctcccctttcctgtggatataccgaattaatctgccatgttccaagttgcatacctgaaaataagaaaaggagatggcatcatcggcaaaaggcctaactgaccgaagaaaacatgcgttgtcgccgatgtagcttgcagatacctaaacatggcgttgttcatccaacctatcctatgtttgtgtttcttatcgcctaaagacgcacgcatctgatagaatggtgatgcgtgttctgctccctgctccctttgtgtcctatgaatcaggtcataagctactgtttctgtgattcttgttggttgtgataattaattgcacactgttttctccatgagcttaatcatgggtcattgtattaattgtttgtagctcgtttgagtaaaggccggatattttattccattatctaaaaaaaaattatgagtctttgtatacttatcattactattactagtactatatactccctccatacttgtaaagaaagtcattttggacaatgacacggtctccaaaacataactttgacttgctgtttctataacaatatttattgaaaaattatatatgtatacttttataaaagtatttttcaagacaaatctatttatataatttttacattttcaaactcaacaacttaagagttattcatgatttatattctcaatgtttgacttaaatattattttaaacgactttcttcatgattacggagggagtatacttgtcaatgtgaactagtaccaacagaaggatcgtgtgacgactgcgttgggggcaacccatgtgtgaagagaagcaacgatgggtggaaagctttgtttggtcgcggctcgtgagcacatgtatttttgtgcttcaggatcagcgcatccatccggtcgatcggccgccgtctggcctgtcacacgcacaggacagtgtgtcgcgggtggagagacgtctcggcccggacgcatacgggagcaacccacgtacgccacgccgccgccgtcgccgcgcggctcgcatcgcaggatgcagcgcgtggcgcggcgcggcggcaaatgcacgtcacaaggcggcgcggtgttggcggacgtggtaggtcgtcagccgctcgcagcaccggtggtgggccgcggcgcgcgtggatcgcgtgcgtgtcgtggactggactggtcggggagtccgcgcgcagcgggtgcggggactcgggacggaagaaagtccaaaaacgagaggagaagcggggagcgcgccgggccggtggtttccttccagaggagaggtgaggtgaggtgaagcgtgggattgggccgtgtggcaccgcgagagcatggcggaaaggccgagaacgcgcactgcgcgattggctggaccgggcttccggtacacacgaaatcagttcagtacatgtgtttttttaaacttgtaagagcatcaatatacgtgcttggacaggagaacaaatttatgcacatcaatatattagcaggagataaaaaatttacaattatgacctgctgtagcggtgatgagagttttacacaggaagagaggagggcagttagctaggcaaaactagaccctgaacaagcaaaaagacagaaaaataggagataaggattatataacaataaaaactgctagaggactcgacttcacttccctccagagcctaccctcctgtgggatacgagtgaccaatgtatgcacctggaagaggaccttattaaagacacgagttgtcagtatcctgatctatattctaatatcttacgacactacgatcctatcaaaacgaaatgataccgattttacctagtgtcctaattttcatagtatcttgatcctactatttaagtaccacacgaccctacgaaatcttaggtagtatcccgattctacgatccttacaatcatacaaaatattatttaaaacaaaatggtttgaaaataatgtaaataaatatgctcaagtttttttaaatcagttaaatatatcaaaaactaatgtggtttctctcgataaatgtctctatttgcatgacatatattattactatatttttttatatagaatggatataaatataaatattaattaaacttaaaaaaatctcatagtatcccgatactactatacgatcctatcatacgggacgatactcatttgagcaaaacgatactcgatactacctaatattctaatattctgatacttgtaaccttgaagacacgagcattcctttccaaacatagacgctaggtaacgagaaagatgagggaatcaaatcctttcatgagataatcgagcggttgtcgacgagagcccccagcatacttcaagtgtggactgtcaacgggacgaagaagtggccactggccagtcctatcttggctagcaactcgtgctaaacttgtcacgcactcaccggattaggcccattatcacttttagcttgtgtggtcccaagtgtagagtgtagagctagactttcgagtccaaatactcaaacaaggccgaagcaaagctgaaattaggcctgtgagaagtactaaaacgggccaaatccatcccaattcgagttaaaatctgtcctatgtagattccataatgagctaattcaatcccgacttgagttggaatcagactccataaagagctaattcaatcccgacttgagttggaatcaagccctgatatctcagcctgtccaagctctcatcgacaagtacttcgagacccataacatccggtctgatatgtttttttgagcccatacagcacacacaatgcttcactgagtatgctgcttattcatctgtcacatggctatagcttaccttcttttgcgtcgaaagattctttgcttttgcattgtgctaacttttattttcaacgagggggagtgttcagtttcattttgctattactatggttagtctgaattaatttcgtgccctgaaagatctgaatctgttgaaacttcctctgcgttttgatctcaacacagcagctttcgaccgttttataccgtgtagacggaatcgagacgcagggaaaaggaaattatggtctgtgcgatgagtgtccacgcaaataagtaaagtttgcaatgcaaaccaccactttaaagttggccactatgcgagatactttaccttcttttggagccatccatccatcccttcccttgtcttctttgcttttctagtgtaatctgattatctccaatgtcatgcatatgggcagctagcttagcttagcttagcaagctgcgagttgggggatactgtattttaaagagaagctgcactcaagcaagagaaaagtagttgaggaaagctaaagtgctggctcaaattgggatcgatcgaccaattctttcccacaagttcgtcgacatcttgcagagatgttgtgtaccgacctggctctttcagtcggcagggcagagaggagtgaaccttggctctgaaactgaaggcgacgcacttgattcagacatgtaactgaactgaagagtctcaagttcgtacagcaaatcgtttcacttcaaatagttgtggctttgggtggttgttctatttttgggacaaaatgcttgggacctttatttattcactactacactttaaacacatgaattttctttccaccctttgttctgattaattacaagttactagtatatcctaggttggtttctctaatgggctaattcagtatactgaaaagaatccaatgaaagctcagacttctcaagcatagtacgtaagaaaagaacagatgccaaagacaaacgtagttcttactactagttgctactagcaactaaaatcaattgttactttagatggcttaactgttatattctttatgttggaatctgtccacgtagtttcaatttttaagttccagacttacggatactcatatttgtaactgattatttcttcaacggtagacgatgtattcgacaatagtgaagcgttcatacgtgcatggtgatttcgttaatatccatatatacagatttcgttaatctagaggaaatccaacattgcatgaaaagaaaagttttgtcccattttgaattgtccatgtcaacagtgtaaaaatcagcatcgtcgttcgagcaacaagggaagaaacacgcacatacttctatgcaaccaaaggaaaaaaatgtacggtcgtgatctagggaacctcccttaaccaacggccgatgacacgattcaccatcgcaaagccgaaagtaatacagcgaaatctccttataaagcagccgtgtttcgtttcggacaccacatgcatgcacgcgctttttgtttatggctaccatttccaacgttgtcacgaacacttattgtgcttctcccactccactgctccgccggcgagccaccgccatggcgcttcgtgtacagctcgtcctcgccgtcgccgtggttgtgccggcgttgggggtggcggcgggtggtgctaccttgggggtgaactatggccaggtcgccgataacttgccgccgccgcaggcggcggccatgctcctccgctcgctgaacgccaccaaggtgaagctctacgacgccgacgcgcgcgttctcagcgcgttcgctggctccggcgccgacttcaccgtcggcctcccggaccgcctcgtcccgcgcctcgccgccgacccgtccgccgccgcggcgtgggtgcgcgccaacatcctgccccacatcccggcgacgtccatcaccgccgtcaccgtcggcaacgaggtgctcaccggcaacgacagcgccatgctccggtcgctcctcccggcgatgcagtcgctccacgccgcgctcgccgcttgcaacctcacctcgcgggtggtcgtcaccacggcgcactccctcgccgtgctctcctcctcgttcccgccgtcctccgccgcgttccggcgcgagctcctcccgtacatggcgcccctcctcgcgttcctcgccaagaccggctcgccgttcctcatcaacgcctacccgtacttcgcctacaagggcgacccggagcacgtggacctcaactacgtgctgttcgaggccaatgccggcgtcggcgacccggcgacggggctgcgctacgacaacatgctgcacgcgcaggtggacgcggtgcgcgccgcgatctgcagggcaaactacggcaaggcggtggagatccgggtgtcggagaccgggtggccgtcgcggggcgacgacgacgaggccggggcgacgccggagaacgcggcgaggtacaacggcaacctgatgcggctggtggcgcaggggaaggggacgccggcggcgcccggcgaggcgctgcaggtgtacgtgttcgcgctgttcaacgaggacatgaagcccggcccagcgtcggagcggcattacggcctgttcaagcccgacggcacgccggcgtacgacgtcggcgtgaaggctccgacgattggcggcagctggaaggggagagccaatggcactagcggcggcggcgccggcgggctggtcgtggcggaagggcccggaggggcagacggtgcagggcagggcactggattctacaccgtgtcagcagcagcacacaaggtaattgattgattgattaattaattaattataattacattttgcaaccgcataattacttcattgtttggttacttttttttttgttattagtgtggttcttgattgaatgaattgtgattgagtttggtacaaggaaagtatagtttaagtatgcagtgttgtgtcggttcagacgttcagttgatgctgcgctagctagttgctttgcagtgcttctgttgctaatcaattaaatcatcaatatagtctaattagtatgtgtaacaagtttggtatgcacgtacaaaaccaagttttaaaattgcaaagaggggaaaatgctgctgtgctagctcccagatcatactcctactttgctattccatacccaaaaaaaaaaaagatttgctcatcaagtgagtaatcatgcttggcactagctagtaatcaatcaaaaggttagctacctgctgtgacagtattggagattatactagccctcctttacaagtaatgctttgtgtcacacactttatcttcatgttccttttttcataggtgaagaggtggcggtgctgggaaagcttgttcgcaaccgttgttctagtcatgtcgtccggcctgtgttggtcatgacctgaagagttgaagatgttcatgaagaattgaagatgcagtagaggaggagatcgatctgcagcatttgcagacaaaggagaaatgagcttgaacaaaaacgccattgattcaattgattcttgtgttttcgctgtcctccgattggtgttggttgatgtgtagtttgtgtactgtaaggaagagagatgtaagggacattacatgatacactggattattaattagttcagattcagatttctgaaaggattagaacatttacgcccagtagatggccagacttttaaatcatggatttggatttttttccccaagcaatttttgttagaaattttgaaccaagtgaaatgtgagtgccagtttattggtgggcttgacagcccatctgagagtg

SEQ ID NO: 11377 - DNA, 647 bp, Oryza sativa
  unsure (1)..(647): unsure at all n locations
gaggtcgagcacctaggaatgccatggatgcccttggcgaacacggtgtagtgcccgttgaggtagagagctgcatggggtaggtgatgaagaactggctcccgttggatgttgggcccgctgttcgccatcgacatcaccccgcgggcgttgtgcttgagcgactccctgaactcgtcggcgaacttcttcccccagatcgaggtgccccccttccccgtgcccgtcgggtnnnnnnnnnnnnnnnnnnnnnnnnnnnnnnnnnnnnnnnnnnnnnnnccgtcgtagtagccgctcgcgcacagcgccaggaagttctccgccgtccgcggcgcctggtcgcagaacacctcgcacttgatgtccccgagattcgtgtgcagcgtcaccgactgcggcggagatcaatcggtcctccggtcagccacagggaagagattttccggtgagggagagtgagattcgagcggcgagggcttaccatggcggcggcggcgaggcgacgggttgcttcgtttcggcggcgaggagaagcgtagagaagtctcgagtctttggggaagacggtttggtgggttgggctgggccgccatttttatggatcgagaattcgcactgacaaatactacctccgttttttaatagat

SEQ ID NO: 11378 - DNA, 8937 bp, Oryza sativa
cccttatactagagacaaaattggagaaatattgagtttaagaactatttttttagaaaatatattacatgttttacaatacccaattgtagtgttagtacaagtgttgaattctaagttttctaacacaaaaaagaaatgagatcagatctataatcattatactatgtgtgatttgtgaaacccagtccaaagtgtaaatgatggtaactatatatggtgttaagtgaaaatacaagtctaactctagtccaatgtgaaattttggtaaataaaggttgaccaaagtgaaatttactctttaaaaaaattaagtaattatttttttcttagttatttaatttattgttaatatatacatatagttttacatattttataaaatttttaaataacacttaaacatattttttaaaaaaatcaacagcgtcaaatatttagagacggaggtagctaacaaatttgatttgtatctttcaagtttttagcctctttacctctgaaaaagtttttagcctctcattatctctaaaaaaagtagtacttattagtagcttatcagttatagttaaattataaaacttcaattgtaaattgattttaaggtcttctcatattctatttttcagcatttgtttttaaaccattaataacaggatataaaagtttacctataataaattattgataagttatcttttcatataaacataaatataattttatctataaactacttctaactcctttatttatttcttcacggtttgtcagctcctgagttttgcgtttgaatatttgtttctggagataggagacaacggccacacaagaaaaaaactgatcaaatagggcttttgcaatacatttcatctgaattctgtaaccaacatgttctttttttcctatgcatgattgttccattgtttgtgaaactgttctagtgacaaaaatgaaccccaataaataaataattttgatgacaacatatgagtcgcgtccaaaaccctggcacaagcaggaactgatttacaaactcacaaaacaaaaacccaacactagcttatgtcacaatggacctacagagagaatgaacttatgcttgatttaacctatcaacagatgggcaattttctatctgaaacccctacaatggaagcagctgagacctacagatcaataaaagcaactcagcaacaactttcaaaagaactgttgttcttcaacagatcaatacaaacatggtcctgatttgtctttgttccagcaaaggcgtacgattgctcctactggttgttaggagtagttcccatggtaaagaaggattataccatctttttcctctatgccccctggattctctgtggagtacctggcaaagcagttattccattccatgacaagctcgagaggataatcctggtgtttcaatgattcggtttatggctatctgtaatcgtcctgagcctttgcactaagacagggatatcatgttcgctcaatgtcgtgaagcaacacctgaaccatccaggctcgatgcaatggcaagatgaacctggagtgacattgacctttgcctccttcaataacctatcctaaagcttgcgctcccctttttcgctgtaagacctgatgacttgctcatgtctgcccagcagtagaaccctccactgctctagtagcactcaataccccacttgatccaaagcatcaacaaacaatggtacatcttgcgcaatctctctctattaacttttaggtaatctgaaatgaacttttggtccgagagcatggcaacaagcaagcgttgtgttggagttgacacagacgagaacctagcaatcttagcagctgctgtcacgatgctttcattataggaatatattaccccaacccgaaacccggcaagagataggtctttcgagagtccatatattatgtgcaccctgcctttgtcaaagtcttctagatcatcaacaacctctgccacacttacaaattttccagatccatatgttgagccagcaaacacttcatcagatatcaagtggatgttcttctctgcagcaaactctagaagatcatgcagtgtttgcttgggcacaaagcttcctgtagggttatttgggttggatatgagaaccccacgaacctttattcctcgcttctttgcctgattgtaggctatttctagagcagtgatactaatgttgaagttgtcagtgctacggcaaggaacaggtatcaactcaattccagtgcgccattttatgtccctgtcccacctgcagaaatgaagtgacagttagtaccttcacttccaatacgttcatacagatgaacctagagattggagaagagacatacccagggtagtatggtgatggaacaagaaatgcatttcctggatcagcaaggcagaaactcagtatttccattgcaggagttgcaccagatgttataaccacctgagatggttcaaaggacactgatccttgcatgatttgcctcataaatccagcaagagcctgaaagagaaatttaacacttcatatcggaaaatttgcacacagaagaacacaaattaatcatggagaaaatagttcaatgtcaggtaacagatcaaaaccactgtgtggaaaaagggtaaaactgagggatgctagcaaagatatgcagattttggacaatgttgaagcatgaagcacaagacaggggaaaggaaaactataagcaatacaaagtactgatcttgcaatgctcacattgtcatgtgtttacatgttcaataataaattcagtgactgcacaacaatgagttcctgagaatcatatgctgtactagattggtggaacagtccagttctaatgaaacatcacaattgaaaaaaaaaagctttatagattcctctaatcatttgaatggaaaataggtcaaccaaaatttacaagctaatacagaaaataagcaaaaagataaagtaaacccgcatgatgttaaggtccaacagcagacatgacaaatttgccagcttcagtatgataactggtgattatcagcatgccattcaacaatgaactgtgaagcgagaccattctagcaggtatgatataatatgaaattttattcaaattcacgcggatttacagcagcgtaatacagagtaagtcaataatatggaactcttgattattttttttaattctacgaaagagctgatcaagatagtggatcttttcagttgaagtcaaggtttgacagatggcacaattgcagccaccatagcaaaaaatgacatccaagaataaacgcaagcgacacctcttctgcagataacatacatgtggctaccaaaaaaacaagagcagaaggaaacaaaaatgcacagtaccgcgtcaacaataatattccaattcaggcttaatcgctaataaggtcagttgtaattgccataattcttcatccatccaataatgaatcacacactgttaacactgttattgatcgagctatgtcatccaaaaatttgtctatgtgaccacatccatctaaacagaacaaccgcttaaaacaatcaattttaagcaaagctttcttgaaacatgagaaaacaaaagtattctttttgtgtaagaaacaaaaagattgaggtagcatcactggggtaatgggctaagtgcaaaaaaagctttggaagaatcaaaacagggcgagttgttggattcgatgttctcatggatgggatcaggggggattctgcaacatttttgttgccagagacagaacctatctttctgacagaaatggatgtttattttttttcgtcgtatggaatcagggggggggggggggggggaatcgtttggcttaccatcttcaaggcaagtatcccgtcgtacggctggtaggcggcgaggcctctgatggagagctccctctcgtcctcgtcttctccgcccgccatggacgccgcctccgccgcgtgctcctccatccatctcccaaccaaatccagcgacagctgcacgcaccaatcaccagaaaccaaaccgcgtcatcaccatcgtcggcttcgaaattaacgatagagagatagagagagagagagtattgcgaacgtacgtagttctcggcgaggccgagctggatgatgccggaggggttggtgaccgggtggtaggggtcggcggcgcagcggcggaggccggcgtagtagagcgagtcgtcgtcgcggacggaggcgccgcgcgcggagatggccgggagcgcggcgcgcggggcgaggaggccgcgcgagagcgagcggtggatcggcgacaccgccgcggcggaggcggccgtgggggatccgggcggcggcggcggcgaggcgcggttgcgcttgatgtagagctggaagaagtagaagagggcgcaggggatgagggagccgagcacgagccccccgcgtccctgcaccaccccctgcagcggcaccacgatgcgcatcccgccgtccgcccgcggcctcctctcggacgccgcgctcgcgctcctcttcttcttcttcttcgccgcgccgccgttgccgctccgcctcatgggacgccgaccgacgaggagatgacgtcacgtcaccccgccgcccggcgccacgcgcggcgggcgtgcataggcggggggtgtggagggattgggttgggttgggttggcggggaggagagggatttgggagggggttttggggggaggaggaggaggagaggggcacgccggatttggcgtcttgcctcttctttctttcgtacgagtacgacgcgacgccgggggtaaaaaaaattgagattttcgccgtgattccgctggtttcggcggtcgaacgaacgaccggggaatggacgaatggttagtgatggatggtaaccagctgtttgatgttaaaataaaccttgtcaaaatttaataataccaatagtattataaaatttttggtaaaattgacttaataatgttgccaaattctattcacattactaatggtaacaaataaacgtagacacgtaattatcaaccaaataatggtatggccatcaatctgaacatgcctccaattttcacagcttttacaaatgaacctttaaaattgagtcattagtacataattaattaagttattattttgagattagaaatagattaatgtgattttctaaaacaacaattttatataaaaaaacaccgtttaacaatttaaaaagtatgcgcacagagaatgataattttttttgcactcattccgcaaacaaattgcacgttggcttatcgtagctaatattataattttaaagcttttccaagttaattttagggattttcctttgtattgctaatatcatgaaataaaattttaatctaaaaatcattatttatgcctttttcaaccttttgagtttggaagttttttctcgcggcttatttattagtcgtacctgaaaatggcaagaaaattcagcttctctaaattagcttctgcacgagcaaaatttgttttcagcccaaagttcgaagctttgcctatctagtgatctcttcaacgtaacgacgttgttgccacggcatgctataagcgtagcaaaagaatatacacttcactcggagttggtgatcgtcgtggttaggataggattttcgagtggttctcgaggcttgtttgtaatttgcaaattgcaaccctggggttcacgatgtgattgtgtcaagtggagtgacagaaatggattgatttgggcgtgttcttcccaactctcatcttctcttcctcttgctgtttggaagtacttgcaaactcaggctttgttcatttcaccaatcattttttttcttcttcagagaactcatttcgtattttcgttcaggcctgaagataaaaacggacgagagatgcatatggaattcagtgacaacaacaatgtattggacaggtgaaaccgggaagaaaacgcagctggggttgtgaacaaaacactcttgttcgcatctgctgcaagaagcctaggacgaaatctcaacctgctgccaactgttgcagagagggactggttggctgcttctgaattcccaagagccgtattggttttttttgtataacaaaaggagcttccgaagctgctggcctttgcctgttgccttctagtgcaaattttcatcgcctcagttgtgccgcaagagacgagcacttgggcagaaagtatataattatatcccaagattcttttttttaaaaaaaaaggagctttgattgcattggaagcgttaaataatcgtttgctgcatccagcttagaatagtactaagaaagattccatggcagcagtggaagtcagttaaacatgaagcattgctcgcttttctgcagcctcggtgatttctcttttctgtttaataacagtgaaatgcatcctcagttaagcatgtaccaaaccagggataaaggagctgctaaatgctactactagcatcttggacatgttcagttaacctgcaatacactcttgaagatcgagacgacgatcttttcatgttgctggcggcaaacgagtccagttttagctataaacagatacgcatacactgtctttgcagcactgtcggttggctaggctgattataaatcataacaccttattagcgacaaaaaatagtttataaatatattttttatataaacgtcttaaaagttaacgctgaaaaagaaagtaggtttaaaataccctttaaaacaattctaaaagtaagtttcgaaattttggtgtagtgaggataacaaactaatccataccacatattgaaacctagaataaatggttatgcgaatatttgccaactacggatgtatgtatataaataaacttgaataaatgtttatctattaagtgttggtgttattagtttctgcatcattatttcctggggttttatgtgtttttcattaaacgaattgtgtaataagtagttgtagctttttaagcaaatttcgaaattcattatattatcttttaaaaaattctgctccagtgtagcagtgtgtttgtctagaaaggaatgcctttctctgatgaaacgaagttcagacccctgttcgcagagatatctgaattttgaagaggaaagcaagagaaatactctctgttggcaaatagcccagtgcccacacttcgaaacaacccgagcatcgggcaaactctcttgatcttgtgagattcccctgagagaatctgggtcacacaatgggattgcactgttggctgtttcctgtgtccaaccacaaaaattgtcgtagactggtacaagtagaatacatgcagaagcactgtccccgcagcggtgggcgactctggtggcacgcagttgtcggattggccacagtcacagtagaagcacaggcctatcatttccgttgaggcaatcaacggtgagcgttaacgcgatgactaagcccttgtttagttttaaagtttttcttcaaactttcaacttttccatcacatcaaaactttcctatatacataaactttcaatttttccgttacatcgttctaatttgaaccaaacttccaattttgacgtcaactaaacacactaaatcgtgtttctatgattctacctaataaaatgtaaattatttgtactttgttatttggttcgttgaaaaatcgaaagttgtactatactttattacaaagaaatcataatgctaaacataaaagtactcatgtaatagtaacttcaaagttttactatccaagtttcagcaaaatgtgcctattcagataaatgatatcacaattcgtctggttgtagtcatgccactcaaattttaaaaaattggaatcatgtcatccctgtcacgttttccatattcttccccatctgcacgtggaacccacccgtcatattcatcttattcttttcaccctcccttatcttctttctccctatctctccgtcgtggcgaggagcgcggacaggatgggaggagcagcggggtacgtgcagccaacaccactaccgaatagcctctgggccatcccgccagacaccatcgtcgtgtgggatgcgtatcgatgcaagaactactcatgcttggtgcacggtgactaggtgagttcaacctgtgcggcctggagaattgtcggtggatacacgattacaacgaggtcgaacgacacagtgcgcatcaagctggacattggcgacatgtccatcacgttcgcgcaccgcacgcgtgagccctgtggcgaccatggccatgaactccagtcaagggccttagtgcgaacgcaccaagggcatcgctgctctttccgtcctacccgcgctcctcgctcctcgttgcgacatagagatgaggaaggaagaagttgaatcaaatgactatgtcccatgtgtagacaaggaagaagataaaaaaaatgtgacgaccatggtatggatctaattttgtaaattttaagtagcacggatacgaaatgtaatggcatttatctgaatagatatatttgcaatatcacggatcaaattaaccctttatattattccttccggaaaaaaaatactacttgttaccaaggaattagtgaaagcaaccccattttgaaacagtgaacgcgatcggtcggcacgcatgaggactggaccaaaaccagaccgtgcagatcccactgtagcacagtgcatcacacatcccatccgtgctacagaaacctgccgggtccgtccggtccccagcaacaggtgcaaccatgtagtactaccaaatcaccgatgcaggtgcagcacctgtctcctccccgtaggctctcccaacctggatttttcacattttggtcattttaaaaaacttatttcgcaaatagacccctaaaaaaacttatcccaaaaatggtcctttttggggc

SEQ ID NO: 11379 - DNA, 1453 bp, Oryza sativa
gcaaacccaagcacatttattaacagccattacctaggctcctgtttagaccacggcagaaagccttttatcccagttgttgttgtttaacagtgtgtttttcccttgcataaagaaaacaaatgttcctttgcttaacatcttttggactgttctcattttagtaaacctttgcttttatggtgatcagttacgaagatggaagcacacttttgtgggatgtacgaaatcctggtctacctgtatcctcagtgaaatatcactcagaatcaggttgctctccattctgaaaattactattttagttatttaacctatccttttttcagtagtagctatgtttatatctttggtgtttggaaataatgtatgatctaataagagtctggtgtgcagctttatccattgctattgatgggctatgcaatggggggatctcaggaggtgctgatgataaaattgtcatgtttggccttgatcatcaaaaggtgtgcaccaaattttctgatttcctgtttcctgctacacaaatctttactcttgtcgtgaaaggtgcaccttgtgagtacaaaaaaccatgttatgtacatgcagtacaaagctagcccaagttgacattgattttatgctttctctgatgtcgtgctattaattatctccaattatctgctagtcattcaattatataaagaaataagctgctaaggagatctttgcattcattatttttctgtaatattgacttcaacgtcatctgctattgtcttcttgacaaggttcataagcatttcaatttcctaaatgatgcagtatactgaaggttaagtttagcagtgtttaacactcagaagtaggcctagagttggagactgcactattatccttctgatatccacttctgacatctgtgatatttgaatcccttcatatctgaagcaagaaacacgcgcacaaccatggtttttttattagctagatgggtagtaattcttttcctcagggaggatagtagttatttccagttacaggcatataaacattctacatttcataacaaaattatcaccgctggaaaatgcatttgcttctgttgtagcttttgcaattacattagtgaatgctggtttaacttggtaagccatcttttgatttactggcatgcagttttgttccaattacagggtgcatttattctcaggaaagaaataaaacttgagcgaccgggtatagcaggcactgcaattcggccagacaacaagattgcagcgaccgctggttgggatcacaggtttgtttttcccattctgttccttgatgaccaggatgttaacataagctatttttagtggcttcctaaatcctgaattaacatgctcaagttagtaggtacattatacatatgatttaatatatataatctattaagtagtaatacctgagtgacgagtacaaa

SEQ ID NO: 11380 - DNA, 11861 bp, Oryza sativa
tttatgaaagaaacttagcttgtgaatttgatgtgaaggaacacagaacggaggatccagttttgccagagctagcgaccaagtgtactcgtggatgcccaaatatagacctcagaaacatatctcttactgctcgctataagagatgtttttcgagaaacacaataaacacataatagatacaatattttcactattaagagatatcttattcttttgagaaacctgatttttttcctaggcgggtatggtccttagagccaaatggacgcctacgataatgtaacatgcttgcacaatcctgttgcgagatataggatttcagtttagagcaatgctccagtactctctactggtagtattatattactagtagaaaatttgaaccatttattattaaggataaattagtaatttgttaacagagtaacttagccatttacatatttctttttagggtaaatgggtccctagcgtcaggcccatttgcatcgtggcaccggtgggccgttttgatcgtgacactagctgtggctggcatggcagcgcatcgtcaatatttcatcagaaaattggatcgcaactcgttcgcccgacggcgcttttgggtggcgagtggctagtcctccggcaggaggcgcgtgtggatcccgccggcggcgacacatccccggtaatccgtttctctgcatcccgctagcgatacgtgtagatctcgccggcggcgacatatatccggctaaccgtttctctagcctttaaagcagaactataaattaaaactagcacgggccagcacggtggcccatacagattgcgcggctagtatcattatattttctctcatataatagcatatatgttttctcattattttattcaaatatattaaaatgacaacataattttaaattttgcaataactttacaaaactactaatgtgtaatattcatattgtattttatatacgtgttagtaattaattatttttaatatcaaattttagttatttgtaaattaaaatatattcatatatggagtctagattcgtcttttaatatttctttttttaattctgaattttctgtaaattgtatttctatatatactctatgctcttcttccaatattatttatttttatttctgaatttttgttatttctaattgtatttctatgtggactctaaactcatctttcaatattctttaatttttaatttcgaatttcagttacttctaaattatattcctatattgactttaaactcttcttcccatgtttttcttaatttcgaattttagttatttgtacattgtatttttatacagactctaaactctacttttaattttattatgtttattttaaattttagttagttttaaattcctatatagactctatactctacctctaatattccttattttttaattccgaatttctattttttttcttaacgtatttctatatggactctatactctacttctaatattctttatttttaattccgaatttcagttatttcctaattgtatttctatatggactctatactctacttttaatatttcttatttttattccgaatttcaattatttcctaattgtatttctatatggactctagtctcctcttctaatattccttattttttaatttcgaatttcagctatttctaaattgtatttctatatggactctagtctcctcttctaatattccttattttttaatttcgaatttcagctatttctaaattgtatttctatatggactctattttttctttttcttcgattaatgtgagaatttctaggccatgagagcgaatgtggaggctcctttttctattcctttaataatataatagatatgttacgtttggattttatccagtctgttcaaaccgggtttaaaaaaacacgtggttttttttatcatgcacacataaattaaagcagaactactatttttgaataaaatatgttacgtctggatctcatcgggatggtctagaccaggttaacaaccaaaaacacggagttttcagtggtgcacacgtaaattaaagaactattattttaggataaaatatgttacttcgcggtttcatccgaatggtttggactgggtcaacaaaaaaacaaatggtttttcggtcgtacacacataaattacggctggatttcatccgatctgttccgagttaacaacgaaaaagcatgtggttcttcggtcgtacacacataaattaaactagaactattattttatgacaaaatatgttacgtccggatttcatccggtatgcccggactaggtggacaaaaattgcatggtttttcaatcgtgcacacttaaattaaagcaaaactactattttaggacaaaataggttatgtctggattcatcaggatggtccagaccaggccaacaacgaaaacacgtggttttcggttgtgcacagataaattaaagcaaaacaactatgttatgataaaatatgttatgtctgaatcttatcgggaaaacacatggtttttggtggtgcacacataaattaaaggactattattttaggaaaaaatatgttacgtcctaaattcatctgaacagtccacaccaggtcgacaacgaaaacacatgggttttttttgtcatacacacataaattaaatcagaactattattattttagaacataatatgttatgtttggtccgttcggactgggtcggaaaaaacatgttgttttttgggtagtgataaattcccctttttataaatataagttcgtgcacgatccaatatttttgttctttcttttttttttctaagcagttctatacatggtatgtccgtacgtgatcatattttcctgttcccactgcggtttcttttcctgtttttatgcattccaatcgatacagtttttattttttaatcacacccatgacattaaatatttatttgttttctcgatattcacttattttcactgtaaacttttgctgaaataatgcccttactaatttatccttctattctcgttagatgagatgatagtaaaagagataacctatataattatatattaacggttgagattgctttctaccaaatggaggagagagctgatgtacttcagtttatgtttttgtctctcccccccctccttttttattgatagttctgcacacgcttgggatatactcaaacatcttatgtcttaatagagtaaattgcagattaggccatgtattttgaccatagtttcacattgaaccatctatggttcaacttttttatttaacaccagatctttttacccaaagttacaattaggactagtggcccacctgtcaatgacgattgaggatgaaaagggaaaattggagctactgatcgagtctaaattggagctactgatcgagcagactcgccatctccatagtttgcgtttgtggttgagtatggagttggatgctagctagggccatgctgccggcggcgacggcggcggtgaccgtctctgctatcgatgtcggcgacggcgaggagaggccgttgtgcaggaacggcagcagttgtgacggaccgacggcaactcatcgcccatggtggccgtggtgtcagtggccatcagagagtaggatgaagcgggagctaatcgtctaggcaaaggccgtggcatccatggccatcaggggtcgatgcaattcaaatgtattgcacctatctaattcctgaaccctttctctttgtagagtgagatccatgttttttgaagcagctcgtatagtctgtttgaatcttaatcgatccattgattgatgaatcggcctatacatgccccctttcttttttcttttctcctgcgaaggactctaatcgaaggactctaatctcatagtaatgcaggtggagagatgtagagagatgtaggcactaataagtgggcaactttggtaaaaagatctggtgttaagtgaaaatgttgagtggttcaatgtggaacaatggtaaagatatatgtcccaatatgcaatttactcgtcttaatataaagataagcaaatcatgtatttcctaagtagtgttcctccacaatgttaactcaacagaaaaaagaataacggagatatataatacattacgcataaaaatatagacatggtggcgagaaattggtctaattatgttaattaatagtgattttttaaaggtttgtttcagtttactccaaaatcttacccaagataagatttcagtgtcatagtagctttggaaaacgtaatttaacaaatcaaacacaaagaacacaagcaaatatatggaatgatctgatgaaatatatatagtgttgccgaacgggaaaggagagcaaaaactgtgaatataacatgtcttaaagtatgaaccttatcatgctggtggaataaaacatgagcagtactagtgccaagtaccaactagctccactaacagtaagagaaatgcatccacgaagaaaactcacatgatattcctattgcttaagctcatggatataaggaaatactcatgcaagcagtatgccagtaacaacttcataatttcacaatgagctgcagagagatacttctgttgataactgaaagttgcaaaactaaggtatcacactcaaaatgatgttggttgctggatggctgattgccaaatgagttgtttgcaggttctgaattgtggccagtatttcttaaaggtctaagttttttttttaaaaagataatggaatataatccccaacctttcaccaaagagctacaaacaattattacaccaatttaacaaaaactcacacttaaataaacaaaatcacacataaactaataaaaactcccacagcataacaagatcataaaaattgttgaaattttatttgtgaatctccatccaaaggtctaagtattggcagtggtttagcatttgatgtttcaaccggcacagtttgttcaaatgcctatagcaacaaaggacaatttttagaccaagccttgtttcatttgtttggatgggctgaaatcccagccctgtgctgggagaagaagcatcaaggtctcgacggttttttgggctttgccgatgagcagtagttgtctcatgacgccggccgtgcacttccacaagttcagagtttcaggtaaaacttgcattcgttcttctatcaacacaccttggcttcaaacgcatcacatcactgaacttgtttaggaattcatactgaaaccgcgagaaaaacaatttcataatctcgatccaaaccccttggatcgatatttctctctctttcagttccaggtaacgatcgaaaagaatacgtactattccgaggcgcgagacaatggtggtatcgtggagaagtgaagaaaggtggcgttttagtggcagcagccagcaggtcgcgttttagcgtgtactattattttagcgtacaggtacagcacagaaaatagaaggggtgaggcacggaggcttcgaacccagaccggcaaacctaccaccttatggagctagtcggaaaatctctgggcgtttctctacatgtacaacacagcggcgggacgagtttagcgtggagaagggccaatcgatgtaaactctgaaccctcacgtcattgtctcctttatttgacagtacattggtgttaaaaaatgagcctatatatcaaaagataccgtcgtagatgttgtgattttatagggatcaatacagagagaattgcaaacgtaacgagaacatgaaaggtgtcaaggagtaatccctggctcgccttgatctgcacttctcctcactcactcaatgcggccatcccgttgcagaggagctccatctataggggaagatcacgtggtttgtgatgctgaattacggatctctagggggttcggagtctaattctccaacttacgtaaaaaaaaagtataattctccaacccctttagaccttgttcagtttggagtggaatgaagagaattgaaggggattgagggggaataattccacaccataataggtgtggaataaatccccttcaatccggggattaaacgaacaaggccttagttagtttcttcaatcatcgatattcgaaatatgcacaaaataaaaaagaaaaacgtaaaggggttcaacactattaaattttctgacaccttggatctatgtatttttttccttagagaactacaggggggaagcggtggagggcgatgagtggaattacgtagctcccctgccaagatactttagattatgcacatgacaatagtttcatgtttatgttattcttcttcgtcccattattttattgcgtagtgaacatgtttaataactcatatttgcatataaaagtgaagtgtgaaaatattagctcaaaatgcatggagggtgctatcatgatacagagtagagaactacttattaccaataagctcaaaatgcatggagagtgctatcatgatatagagtagagaactagttattaccaataagttaataagttatttgaggatcaagatctgcaactttagcagttgcagtgcagccgatggataaaaaatcaacggctcaggtggcaggaaaatgctgttcagaaaatactgtagcaaatttgtactatatcgattactgtagcatagatggtgaaacaggatgacagcgaatccggcgttggctccatcgatccgatggctataatgtggtccgactgctaaagttgcagtcgttactactacagcaccatatctgaattcgttatttgagtacaattcaattcatatacatggaacaagaacccatgcataaatacataccatcattttagtgagatgtacataattttattgataagtaacaatgtcatattataagcaaattccgtgacgatattttttatacacctcaaactttcatttgagatactaacaaacatttcattcgatatattaacaaacataaatagtattgaataaatggataacacaatatagtattaagggggagcacaataaaattctcatacaatatacttttgataagaatacaaccaatgcaaccacttagtacaaccacaccaggcatacttagtacaacctccaacacgagacgtggtaccaaaataaaaatgttattttttaaatgaattaaggtaaaatgaaacataataaactatggtacttcacaccatcttcttgttttggtttcctccaaaatctcaaatcacatattcactgcaaatatgagtaaaggatgtactggtatatatacacagtgtgtcaagtagggagagagagagaggtacaatcaacacttcagtcaaataaggtgtgataaatatctcaattacaactagtggtaaggaagtcatgaaggaaatcatgcaagcagtaggccaataacaaagacataatttcataatgagcttaagataaatacttttgttgataactgcgagcagcaaatccaaggtggcacactcaaaatgacactgggtactccagtactggatgaccatgtttgcaggttcgaaggttcataattaattagtttaggtatttcgaaaaggtctaagtattgacagtgatttagtatttgaagtttcagttggcacccttagttcttgaaatcctatgaatttcctttgaattaacgggggccttaatctgttgtcccgttgacttacttcgccgtccttgctgttaccgataagcactgccggcagaagataacgtgcctccatgggtgtcgagttttagtcaccgagaccccctctcctgcaattttcatcataactagtgaattaaatcgcacgtttttccatttcggaatgcaaaactttttaaagaaatcatgatcaaattcacaaatatttgaaaaaaagtccagaaaaatgctcaaaataattgcttgctagaggggcgaaattcctgaaatttccatccctgacctttgtgcgactaggatagagatggcaatggatatggacccgacgggtttccactgcacgtacccacacccattaaaactaaatatgcccactaaaaaacccacacccgcccacgggtgagaaattcccccatacccgcacccgcatgggtgatgggtacccacatccgttgcaacaatttcaattgtgcacaataataactcaataaggttataggctgcagtgatatgtacacagcaagattgaaaaactaaggctcaaacaaaccatacaggatacatacagcctgtcacattgcaaaatcaacaacaagccatctctactcatggtcatggccccagccggatccagcgacctacctcactgcacctgcggcggcgctcctgccgacagctgaccggcgcgcggcgtccctgcccctaagcggcgaccgacgcggtggctatcccgcccccaggaggcggcgtccctggctccctggaccctgccccaggcggcgaccgacgcggtggatgtccgcctccacgctggcggctgcccgcacggcggcgcccctactccatcggcgcgaccgagaccggctggcggctggtgctgcggctgtgcgcgcctacgcggtggtgtgccggcgtgtggcatgtgccgtgcggtgcgaccgtggcttggccgcttgggggatggggggcggcggagaaacggagacaggagggagaggagaggaggagaagaggaatagggtttagaggagtgaggaaaagaggatttatacctagggttttgatggttgtgggccttgcgccatctgcatattgggctaggcctacgggtattttcaacccacgggttaatgggttcgggtgacagcagaacgtacccacacccgtgtacccgatgggtgaaggttttgcccgttaacgtacccatgggtatgatgtttggaacgtttatacaccctaatagagtaaaaacccaacgggtttcggtcgcggggcccgttgccatctctagactaggaccatccttataagctgtgtttgagaagttattttttctatatattattttgattgttgctaactatttaaagtttatatgtaaaataacttgttcccctcaattaaatatatccgattagtgcgaagtaagcgtagctcatctggttaggttccttgtggaggaactagtccacctacattcaaatcctaaatttgttcgcatttatggctaattattcttttaatggtagacgacgtacccgtcgacagcgagacgttggtgacttcgtcaatctcaagatttgttggtccaatcttccgaagagactcatatggataggggatatgcgtgtgaacgttcatagagatgagtgtatacgcactatgaacgtctcaagaaatttatttgattggtcatatggtccaaaagactgtttggcctgttcgaccaagccagcccattagacctattgacagatcaatgaggcaaccactccatcaaagtgtgttgttagtgcatgttcagattgctgttaaaaataaacttttctaaaatttgccaagttagcaacattgccaaatttgatcggatagattaaatatggtgttgccagaattctttagacaaccaatatttagtaacaaactaaatgcatccacatgtttattgattttacaaaataaaatggtatagttcaagatagcaccaaatctgaacgggctcatagcctttttcttctctctctatattttacccgttcctcatcttgatggctaggatttttgctttggtattttttttttccttttgtgaatcccattgccattatttgatacatgacgtggcttatcctggttgcttcttgagtttcacttcagatagattttcgttgtgataccaattatctctgctatctattgggttgtgctgcgctgcatgcgctgcatgaatgccaccggcagccgcgaccacttccataatccccaaggcgtcgtccgtaacctcctccggtggccaacgccactgtgtgccggtaggacggtgccagtgatcgatggcagctcgccggcgtctgtgtcgcgatggaggcggcttctttaatttggctcaccgcccgctggagcccgctaccatcgccatgccggccgcctctcccaccctctccggccaaccccgtccagacttaggaagaaaagagaagaaagaagaggacggctgatatgtgagtcccatatactttttttggctgactaattaggatgtcatattaacgaaatcagagatccataccgctattggacctaaatttatggttttgtgtagttttgcggtgagaggaatctatcatgctggatgtaagcatgaaaaactaatactaattaatttgactaacagtatggaagcatgaagaagctcacatgatatacatgctgttaagctgctggatataagcaaatacgtagaatgagatgaaatatcctattaactgtccgggccttccatttcatttcagcagcattgcccccctacttttaactcggggagcatactcttaaaactgtctatgtgtaaagctgctactaccaataatttagagctagtttatgacttgtttcggtattttcgaaagaaattgagcttgtgtaacttgagaagggaaaagagctgaatgatccaaaaggtggtttgttctttgatgttttttttaagataaaaaaaaggtgtgccgattcagctgtcaattttactcaaaagcaaccatgcatctgaaaattcagctgtcgattttatttcaaagcggcgttcgcaaaaaaaaaaaatatttcaaagcgaccatgcatctgaagatcttcaggccctcgagcgttgaatcggaagtcaccagctgccgccgctgctcggacggctcgccggagaagaattgcctcagcttgtgctaatgggccttctgtaacctcctccggtggcggaggcggcttgtcccggctcactgccggcgtacggatcataaggagaaatgccaatagtttgatgtttatatatatgttcttgtttttggtcccattattttagtaatgaacatgcttaattactcatagttctacttcttaggtgagatggaatcagagtggcacggaaacgattgacttccagtattatttcctgatcaaccacagcgaaatgtgtttgtggattgcccaaagttagcaagactaacatagcacaaacatggcattgtgtatttcaaaggagtaagtattaacacatggcattgtgtatttcaaaggagtaagtattaacaataacagtggttcagtagctgtagttccaatcgacttgaattagaatttaacattcctataaaaaaaattagaatttaacatgaacacacggaacaaataaacttgctttaagtgtgaaatattttgccaatctcaaaatgcgtgtaaaggagttatgatgatatagggtagagaaatggctatgggagtagaattcaattcatatactggaataagaacccatacataaataaataataccaccattttagtgacaagtaatagtcttactattattggtcgaatccaatgctatctttatatttatatatatatatatatatatcatacgactagactccaccatcttttgtttcaggaagctaatttctttctttatctattgtattttcttaataaaaaatatcccaatgtaagctatctttatccattgtatttccttaataaaaaaatatcctaacgtagactattaggtatatggtattgccgtattctaacaactcatatataggatgtatgtttattcctaacactagtaaaataaaatagaataatctatgg

SEQ ID NO: 11381 - DNA, 4300 bp, Oryza sativa
cttcaaggcaatgacaaaggtatccttgtcctagtacaatgccaacagccagtctataatcaccaatgcagctcctaatttatcatcaagttcctgcttcttccgactatttcttgaaaactaacattatgctttaaaaaatatggcaccaaagacatggtgagggctaaccagaacctaggagtataaatgcttgaaggttctaccaagcaagagatcagatcggcaccagacgtaccaccttatgctagctcaacctacatttggtatggttcataagacaaaacaattacagcagaagttgtggagatgaacctctttgcttggtcgggtgatcagccagattagcgctgcctgtttcaggcaagcacattacctttattgcgttatcaatatcccaaagttcaacctgtattcactttgttatttagtgacaacatgaaaaaattgaaaacagggcaagaaaatatgtaggcacaaaaaaaacgatgaattagttatgttctattgcatcacgctatgttttgctcaaagtcaagattaaaaactaacctgcgatgattcttgaccagcgattgccattatatttggtcctttacagcaagtgcctaggaaatacaccattaagtcaatcatgaagagagtcactaaggagttctctgacaccaatttcttgtcaagagtgatcaagtttctagttgctctcttttatttgagatgctgaaatcatgcactacctagttcacgttcttcagtaactgtgctttgtgactcaatatcaccagttgcggagatcaagccagattgtgtgcagcatgtagaacatgttgacttaacgagtgacattttgcagaaatggtatgtacttgttctgattgtatatagggccctcctgaaagaacccaagaaattggatttgcatgccacggaaactcaaataagaaacacaaatgaaacacagctcaaacaaagaaggttgacaagtatgtgttttaccatattccttctggaccttacacttatcatcttaattaggacaaggtgctagtcaacaaataccgaggaggctctgactagtttgtttaagtttcttcatcaatttaccactacagatcatgtaaagtccattgacacaagaatatgatagcactaagttggtatatatattcttttattatttaagagctataagatcttcaagaggcatatggggacctgccctacagactataatcaggttaaatatactgacaaaacattaatagcattacacttatgctctggtggatgcacttgcagcagaatgaggacaacaggatggagtatccaattacctgagcagatggactttgtggagcagatgcaataaatggtggagtatatagcaggtagtttcaggatagatacacttggtttggtggcatcaaacctaatgaggcctacatgtgtaggagtaaaagttgtcttgcaaagacttctcttgatgggttgtatatctcttctagtattcaaaatatcttttgtctatatgtatgcccatgtcttcttctccttgcatttacattggtaaagcctactattaaccaagtcctaatttatgttaaaggtagcatgttctattttttctttttaaaaattgtatgtcaatccttagcatgttccatccaaagaaagatccaattctaactcctattacacttcatgtgcaatgagtcataccgtgaaagcccagcttcctcgatttcccagcatttgcatgatccatccctaccttgactgcctcagcatcagaaacagatatatcgatcaaaattcaatccaaatcgtaacaatgtgagaggcactcaactcaaaatatgctactaaagttatttttatgttccatctgtatagtacaatgcgctgatgctgtctagactgaataatcagaaagataatacggtcatatatgatatgaagaggttcaatcctacttgcaatgcaattccgatccgaaaaggctgtgtactcaaatcgaaaatattacactgattcaacccgatgttttaacgcataacagctacggatgcttcttatctagcctgttgcaatagcatcctataatgatgcaaacctacagccagcaactcctgaaaaaatcacctctgttcactcacctaatgattttgtttccaagtctggtgctagcagccactgaatatacaccagccgatccaccatgagccctgcaaaatcgtatgccctcgcatcaagtatccctcaaaacgaaccaaccataatcgttgacgcggaaataaattaccaaaccgaggagacagtgcggtggctcgctgtgtcccaaaccctgagttccccgtcagccgcgctggatgaagagcaaaccccaaaatgcaaaaaagcagaggagatgttaccgagagcgtgatcacaagcgcgagggctcatacacacgcgctgctgcggcggagaatcaggcaaggggggttttggggggtcgaggggagagcgtacccggagaagatgagcgggagggaggggtggaagcagacgtcgttgacggcggcgcggtggcctcggagcaccgcgacggggtccggcgcaggtcggcggcggcgcggcgggttctcggcttcggccagggccatggctcgggctgcgagattagaactttctggaagcttcggcgtgaggtcgaagtagacagtgaccagatgagaatggtttgaggcctactagagagccgagtgggccggagggctgggcctgggaactttattacatggaaaaggaataagttcactttaggttcctctatttgtcgcccagtccaaaattcatcatagaccgcaaaaccggatacaacacatctcctaacttacaaaaccgtgcaaacgaggtccctcgatgctcggtagtattgtgtctgcttttagctgacatggcgcctacctgactcctttcactatgtcttcgtcttgtgtggcattaacatggcacttgcatgccaattcaatctcgggaaaaaaattaaaaccgtgggacctacaaatcagtttgacatacaaaataataaaaaatagtgaggcctatgtgacccaacatatcatcctcactactcctgcttttaacaatttaattaattttatcaatagaccatgccattaaaaacaagagaagcaaaataaaaataatagtggtactctgattatcatctatcccctacctctttctctatctttccagctggtggagcggcccatcggtgtatcgggtgggcgacgcctggagtggacgacaggcagcggctggagcaggctagcggcaagaagggcgccaagggccgggagccactctcctcctcctcctcgtcggtcgcgggaggggagatgtcggtggcggactcgacagttgcggcctcccctcgacggattctttcgggacggcggcggcggcaccagatgactcagcggaagggctcgtcgcctcctccacctcggcgccagaggtacccaccagggcctcctcctcctctggctctttcccctcttctctctcaccgaaccttagctactccgaccttcggcgacaatgtcgacgacaatggtggggttgtatcaatcgccagagggggagtgaagagggacgacttcacggtgttgggttcgccaccacgcgcggtcgttgaggaggcaacgatggagatgaggagcacaacggtctcagaaggaggtgctaggattgagatgaggagcacgatagtcacggagggcaatgctaggatagagatgtgtcgtgcgccgctcctcttctgtcgtccgccggctgcatgccactccaatcccgcggtcccgccgctcgccactccactcccacggcgtggctaaaggagacagaggtagagaggggtgatgttgaataagtgggacccactgacatgtgggtcccacatattttgtttcgattttttattttcaatttgctgcttttagttttttttatcgaattggcaagtaagcgccacgtcagtgacatgtgggataaagaccaagccaaatgagccacataggcgccacgttagccaaaaccagggacaatactatcaagggatcttgtttgtactggtttcgtaagttgggagacccgtcatacctggtttttgcgaccaagggacgaaaatcgggttgagaacaagtagagggacccaaagtgaacttattcccaaggaaaatgaatttatggcaataatgtattttacgatttgctccagaatttgtatgttttctcacaacaagggggatcc

SEQ ID NO: 11382 - DNA, 9468 bp, Oryza sativa
  unsure (1)..(9468): unsure at all n locations
caaatcgtaaaatacattatgcgtaatatagagagaaacatgcctaatattccatccatacggtatcctatgttaagacaagaacatgcctaatatgcctaatatagagagaaacaaatactatgaaaaaaaacaatagtataggctttgtttagttcacacaaaaattaaaagtttgattaaaattgaaacaatgtgacggaaaagttgaaagtttgtgtgtaggaaagttttgatataatgaaaaagttggaagtttgaagaattattttggaactaaacacggcgtcaaacttatttggatcctgacacttaaacgcggaattcggcccaaatagtacaagtgcccacgccgctgaacaggcccaccagcccatataacatatgccacgtcaccgatccgtggtgctgagctctccaaccaaccagcgacgagcacacggatcgtgtgctttctacggcctatcactagccgtcggatccgatcgcgatcccgaaacctttcctcaaacggtcacaagaaaccgcctcggtccacgcgtccactgcccccccgcaacccacgctctccagccccgcgcctataaaaatccccccacctcccctcctccctctcactgttcgcctttccacgccagtttggtcgctctcgatttcgatttcccccaaatccaccgcaagagaaagccaagtcgccgccgagaagcgaagaggagatggcccgtacgaagcagaccgcccgcaagtccaccggcggcaaggccccgaggaagcagctcgccaccaaggtgcgtatcggcgtcgtcgtttcatctccttctcccgttccgatctggtgctttgtgatttgggtggttctagggtttgcggttttgctgatttgtgttgttgtgtaggcggcgaggaagtctgctccgaccaccggcggcgtgaagaagccccaccgctacaggccggggacggtggcgctccgcgagatccgcaagtaccagaagagcacggagctcctgatccgcaagctccccttccagcgcctcgtccgcgagatcgcgcaggacttcaagaccgacctccgcttccagagccacgcggtgctcgccctccaggaggccgccgaggcctacctcgtcggtctcttcgaggacaccaacctctgcgccatccacgccaagcgcgtcaccatcatgcccaaggacatccagctcgcccgccgcatccgcggcgagcgcgcgtaagccgccgccttcgacgcggttgcgttgcgtagcgccgaagcgatctggggggatcaacgacgacgacgtgacgtggtcaacttgttgattcccctctcgcttccgcgttttagatctcgttttcattagcagctttgtaatagggtttggtcggttaattagtgtaaaaacagggttcggttaaagactcaaaatcaaatgttattgccgttctttggattttgcggttaagcaaaacagtgttgaagactattaatattcgtttactatatggagatttgttcgtaatctgtttgcctgtgattgccagctgtttggctcgtgattcgcctgcgtactagtactgcattttttttccattattacgtctgcgccgtggaatggaagtaatgcgtgcgggtggcacgtgaaacacggctgtggcggtgacgcccttggaatttgaatggcaaccgctcgtattctagacttgtataaattggtaaaagtaaaaatggagtgaacgcgtataggcagtgtaagacaaaaaaatattgttgccgaaccgcttgggctgttgggtttctgggcatcctctggcttgtaggcccaatactgaataataagcccatgaactgacaatacttgaataataagcccatgaactaatatttttgctcatataccccatcagaccatatccaatcctttgcgctgtgtggggcccacctgtcactatggctctattttctttagcaaatctgcactgatcagtgatcagcttcaaaacagagtctgccttttgtggcattccacaaatgttgtggattgatgtttgacaagtcaaacggcatcgttgggatgggctagtgtagtttgaggcataaattaggtttatcaatatttttcaacttcaatagtgtttagtgtctatttggtttgaaccaaaatttttaacatgcctaagaaaatatgtcatttcaatagtgaacttaggctattttaacttcaatccaaacacaactttaaccaaaatttttgatatgcttaagaaaataggtcatttcaatagtaaacttaggctattttggcttcaatccaaacacaactttgcctgatcaaattttgttatttctaaattttactaaaatttagtaaggtttatttaggccacaaatcaaaccaacccgaaatggttttttagtatgagtatgtaggcttcattaataaataatgatgattaatgattcctagagtaaaaaaaaaactgtaggcacattggtgatcggtattttggcagaaatattcaccacaaaccacagtgcatttatagtttattgctttctccccgtgcaagtaattaacctgttattacagtttgcataatatttttctttgttcataaattttattactgagagaaatcacttgtaacatctcgttttctgcgtataaaactgtgagaacaagcaacctccaaccaaccccaaaacacgtagccaaaaaccttcaaccgaaagaagcacacaagcacaccccacctcacaaaaccctcaaattctccccaaaaacaaaaccatctctcaaaattcaaaccacccaacacccgcctctctcccaatttgaatccaaactaaaaaccccaaacgaaaacgcaaacccgcaactccaaatcgggttcagaaacacctcccgaaaaaacacccgaaaaaacacactccccatttccccaatccctcccaatcccccacctccccgcggcgaaaaggtccagaagctcccagaatcggcatgcgcggatcggcgcgccacgtgtacggccatgattcatctcccccggatcccgatccgtgtgaggcttcctccagccaatcgcggcgctccgccctccggtataaaccgcgcgcctctcgaatccgcacctcgtcacgcacacagcagttgagctctttttccactacgcactagtagtagcactctggtattctcccatggcgactgcgaccgaggaggttgccgctgcggctgctgccgccggcgaggcgccgccgccgccgccgccagcggtggtagaggaggcgaaggaggctttggaggcaccgaagccggaggaggcgccgaaggctgaggagggggaggagaagaaggcggagggtgagaaggagaaggagaaggcgaagaaggagaggaaaccgagggcgaggaagccccgatcggcggggccacaccacccgccctacttcgaggtgaggggaaaatcaattgatcgatcgatgcagtgatcatgtattgggttgattcgagtttgtgagaattttgtgtggttttgagccagatgatcaaggaggcgatcatggcgctggacgggaacggcaaggcgggatcgagcccgtacgcgatcgccaagtacatgggggagcagcacatgggggttctcccggcgaactaccggaaggtgctcgccgtgcagctgcggaacttcgccgccaagggccggctcgtgaaggtgaaggcctcgttcaagctgtcggctgccgaggagaagaaggcgacggcggcgaaggcggccaggtccaaggcggccaagggcgtcgtcggcggcgccaagaggaagaggaccccgcgcccctccgccgccgccgccaagaagcccgcgtcgtcggcggaggcgaagaaggcggttccccccgcccgcccagcccgcgccaagagggcgaggaaggccgcccccgcgaagccgatgcagccgcccaaatccatccgctccgccatctccaagaaggccaacaaggccagcgcctgatcatcgccgccgtctcgccgcccgtcgccgccgcgcgctgtatccctgtatagcctaggtgttgtcgcttacctagtagtagttcgccatcgtcgtctcgtctgcttcgatcgatcgagcgctctgtgtccggtgtgtgtgttgcgttgtagataaggtttgggtttctttttgcaagggaggaagaagctactgtagcatatcgccaagaagctgtagtaataagatgatctggcgctcgcagctttgccttatgatcaacaaactgttcatattcttcttcttcttctttttttcagttagtttctgttttgaattctgatcaagttaaattcttgttaaaaaaaaaaagaatcatcaagttcattcagcctctggatcattcgcgggaggatgagaatgattttgttccatgtcaaggtgtagggtgccgcgtggcagtgtggcactcgcattggggcattgggcaagctgatgaactgcaaaagacgcactgtaggttggatgaggacggccggtgtgtgctgactgctgaagtgctgagtgactcgcggtggctgtcacgattggtgtgatgatattttgcatctgatccttcttcattatctgtgccccactaaagcgtcattttgatttttgatttctgctaaggttgtgtggaatcaataggctggtttggtttgagacataaattagacttaccatggcaattttaataatgtttagtgtctatttggtttgaagccaaattttggtatgtctaagaaaatataccatttcaatagtgaacttagactattttagctttaatttaaacataattttatcttactaaaattagttacgctaaaacttgtcaaaatttagtaaggtcaaaccaccccaacattcgttcggctctgcatctgtccaccgttgtctctttatgctgtgcctgtgtgtttactagggagaaattggaatttaatcagatttaacactaaattcaacatgatactatatgtccaacatttaatttattgtatactactataaataaatttaatatgaaatattgcaacaaatttaatatcgagtattgcaatagatttaatgcgaagtattgaaaaaaatacaaatttagtagcgtacttatcacaaaactgaaggtctaatgacaatttaacaaaatcttcgtttataacttagaaataacattagtgacacgatttaagccacaaacttatagttttggaataattttattattaaatatttagttttatgatatttagtcttaaacctataatattgtgataattttttaaaatatgtagctttgtgatgcatcaccttaaatttgcggttttataataatttgatcaaaatatctaaatatctataactttgtgtgaaatgtactctatgtttttgtaaaaaatagcaagctaaatgattccacgcttctgataattcataatacagtttttcgttaaaggaatctgaaatacagtattcaaaatcgatattgtaatttaaatttaaaactcggttgtattggaagttccggagcaggagaagatgacctcaacaactttcagcgtagtatatgcaaatctcaaattcacaatttacaataataatcattaaattgttctaaatactcttgatctgtgccacgttaaatttcagcagtttcacggaagtaacacaagaatacacaaataataatctttgcttcactagagactagaatttactaaaccatttgagatggggttaccgtcaccttacgatttaacagttaacatatgtaccgtatttttaaaataaaaggattatcatacgtgataaacaaaacaatatcacggttttataaaccttgccggagagacaaccagcaaataatccatccctcccctctccccatcaagccgcccccatctgctatctacccgcaagcactcatgtgtcactgaaccgtgggccaccacctcctcccctccccaacgcaatcccggtcgctgctaccctcctcttgctccccccaaccctcgccaaaaaaaaaaaaaaaaaaaaacagaaaaaacagtagcggtggcggcatcatcagcagcagcagcagcagcggtggtggtggtcgccgtagcggctgccagctttgacccccacctcacccgcctccggcggcgccgccgctcccgttcctgcgctcgccggcggcgcggcgggtcctcctcctttccctctggcgcgcggggccccgccccctctcccacccccaacatggaagcctctagaaggaggggaagctgctgatactgtagggtaaactctctccctctctctctatttccgcaaattgaggagtggtttccccccagatttttcgggtggtttcgcgcattggataagggagctcccgccgcgagcgagggcgcgcgcgtttttttggcggcggtgttgctcggtgagtgggtgggtgatctagggtttagcggaatccgatttgggcttagacgtgggtttttccagcgtcgggtttnnnnnnnnnnnnnnnnnnnngccagcggaggaaaaggtttgatttggagctccaaattacttcgtcttgcttcaaagcgctgaatgcacatgcatgtgatgtgaggtagtacttggatgatggagtggtagtagcagtgttcatgtttgataagatcgttttggtggtgtgattcgagcatgcgcgttgggatgacgagcgtgtgagtgcttctgcttgactgcttccatggtagtagtggagccagaatcaggtgctatagtcactcatagccagttttggtgtggattatggatatgcgagttgaaattttgtgttcctctttaatgattgttgaacttgttgcgtatttatctttccaaaatggcgtggaactattgcactaattgtttgtgacttcgtgcatcttagatgtaacggctggtttgtcgattatctaaaaagtcagtttagtgtggatgctcttctctatgccgtgctggctcaagctccatacattttctgctgagcatgagctttgtctgtttagatatctacctttggtcgaatcaacctctgtaaagtaggaagcagctggagatagggcaaagctagcttcaatgctgtcgtcatgtgcggcttgagtgtataaaactttgcagatttgtttctgaggattcggttaaggtgtttgaacactgggctatgatcaggaaatcatgtactagtgtattcagtttcagtatcatgtagtaatttgaatagccaaggctttggtgatcctcacattgcttctttgctcagtacttgtgcactggttgtggagccaatgcataaatctatttcttctagagctttaaagggataatccgcacaattgacttattgcttgtttataaccatgaaccaaatcatgccttattattactggactcgtttttaccttaatacttctctagaattttactgtacccttttttccttgtatacctgtcaactttaaagtctctgcatggctatcctataccgaacagttataggcagatacatcttgcctgaagaagtcattcctcttcctcttgggttcaaaagtcaaccctctctagactctatcctatactgaattgtctctgtcgtctatcctctatcgcattttctttagttcccccttgagccccaagcttggtcctgacctagctagtttaccattggcatttggcacataccttccctggagtaacatttgcggtaccatttatctttgtttcttttcttatttttcaggtgatcgaataattgcccctttttctgttacaagcaaatgtgataatggacaaccttggccatagagaaaatgggaggcaaaggccagaccaatataaaggacttcatacccaggtttgtgcatcataagaatgcaggcatgattttagatttatttatattagtatggcacatgcaatatctaccattgtttaatatatttgctacgatgttcaattggattatttccctagatgaatactcaaaatgtgcatatatgttttggttagataaaagactgcttaaattctgactgcaaaagtgcaaatcaaaacattatctaaaaaaaggtgcaaatcaaacaaattgaaagatggggatatcagctgtcctgctttgctgtactgcgtgacaaaggcatatacatgtcaaagtacagaacaccttctgctacggcacttagataaaacttatgtgtgctgtccagtcaaaagttccacatatgcaagtttttaatgagtgtattacgctcacattgttggtattttggaaaataaccgaatactcaaattatggagatgacaaattttgatgggtgggaactgttttggtacaacatatccaatcagccgcaatcatttataactgttcatgtatgttctacttttctgtacttattcctgtattatggtgcgtgtggtatttaactgctttccatgttggaaattaattactgcgggtccaatgtaattatgtcaatcatgattttaagaaaatagaccttttggtgtagcttgcgtttagcatgcattcgtagcactattgtttacataggctttacctatcttattctttgtcaataagatatctcacataagtgctctagatggtcctagttctcttgcaatttacaggataactcagttctgttagattgtaatttatgctttacaagtgtgaatgctggcttgcagggaacatgcatttcttgtggaacatttgtgttatgtctgtgtctgtgtccaatctgagttttatgaactagcttcaggctgatgtatcttttcatgttgcgagctttttttgtccttttcttctacgttttctgtgctatgtatgtccttgttatagcaggaggtggatattgcaacctccaaaagatctttcagaaatgtgcactgttcagctttaaatgtataacttttcagctagatcacaaacaaaacaaataacattatgaactgatttaccagcatgtattgatttcatttatgaaagttctctgaagatagttgttataaagaatcattctctaaaagaatgtgccaaccatgtcaactaatatatccactcaatgtttttttcagtggatgatgccccagacccaaaggcatctgaaggaccatcaaagtatgaatctcttggcactgatgaatgatagagataatgccatccgagaaagggaccatgctctggctgagaagaaggcagccatagctgagcgcgatatggcgtttactcaacgggatgctgcaatggctgagcgtaatgctgcagtcgtggaaagggacaatgcccttgctgctcttgagttagcacgtacaaacggattgaacatgaataacgggaatggattcccccaaggatctctcagcggatcaaagaacatccaccaccacgaccag

SEQ ID NO: 11383 - DNA, 1225 bp, Oryza sativa
tttgctagggccagtctttgtaaggttgtcattggtttgtagcggatgtaggtagaattttgtgtttaaagttctgtaggttcttctctcccgttctgaactctgaattttctcgtggctctagaacgctgcagcccacgagaattaaaaaatgtaaccgtagtctgcaggtattcatcgtcagatcattgtatagtttgacaaccagatttatgtggtagtagaccagtagtgaatggcatatttgtcgaagaggccatttgcctgaatcgtttggtagctagcaactgactgaatgtgaagctaaacattcagttgccaccaaacgattcataccaacatttttttgctcgttcggaaggctgcttgcacaacatctgtttttcaagggaatctgtacatgatgctactctgacaagaggcctgcaagaaacaacagaaatccccaaactctacaggattcagttagctaaatcatgccactttgtatcaatcaatatctgttactcactccgatttcgatttaattttaattgacgttttagataataacacaatatacaaaatatacatttaaccttatttttcgattataatatacacaagaaataaatacatgtttacttttattatagtgttttgaaagaaaaatctatatatgttattctagtttctttaaactaaatatttttaaagttattattgatgacgaccaaagttataaaagtttgatctcaaccttataaaaaaaaaagtcaattattatagaaccagagggagtagtagcttaattgatgtacttagccatagatcacacagccagttgaaacatgaaaacacaatcacaaaacccaagtctgcagatgcatcaatcgtgaagccaaacactttttgggatatcagttacagactcagtttgtacggtgttcttgcaacaaagattcagatagcagcagaacacaacacatccacacagaaaaaagcaatcagaattccaaagattttaaactagatggagtagataggattagttggcgagagggttggcgtggatggtgacgcggttgagcctgatctcggcgagggggcggtcgccgggccccgtctgcgccttctccatgaggtcgagcacctcgaatccatggatgaccttggcgaacacggtgtagtggccgttgaggtgaggctgcttggcgtatgtgatgaagaactggctcccgttggt

SEQ ID NO: 11384 - DNA, 6184 bp, Oryza sativa
ataatagtaatatgctcactctatatctccaaaaatctttccttgatgcatgcaggttggtggttggaaccattgtatcatgtactcacttgaacacgcgcgccacatacttgtacctttcttggcacaacaatacaatactttgatacctttggcttgtctttttggttaggatgatcaagagcatagtgtaatgtaatgtaatgaaatgaaaagagggtttggcgcgtgcactgaccgaaagcacattctctgccacgaagaactaccaatggatcagctcgaatcctcaccgatagcaactggataggtggccaagtcaaacgcactgatgaacttatgggttccaactttccaacaccctgcaaaaccatagattaagccttaatgatgagtgactatacaaaggtgatgcttaattgttttcaagtgaaaggcatgggaagatgatgaaggctatcttaattagactctcagcaaacacttcacacactaaagttggtgaaggcatagtcaatatagcaaaggtgtatgaatgagagactgaagacatgtgaagtatcaattgttcaagtacctgattgcctatcttactaacttgcaaatttgcaattagtaacaaatacatatgcttttaattgtttttaatgtattatatcaatctgaaagaaacccaacaaagatgataatatggtgatatttgcaacctcatccctgattggtgatccactttgcaaaatatgatgccaacatgtatcttggatgacaaaagaaaataaagttataaaatcattcagtatgaacttgtgagcatgtgctctctcaatctctgtacttgcaaatgattgaagatgacaaaaaagtttccttgaattgcttgtttacaccacatgaattcagatccttatcgaaatgcatccagaaatccagtgatctacatgttgatgcataagactgttgatactgctataaattgtttcatggatataacctgagaagaagaaaatcacttcttttacaacagcaataatgttggcttaccatcgcaaattaaattgtgccaactgataaacagctcgttgatggattgaaaaatgaatcgactgttcactcagataagagcaggcaccaattgtttagacgcaaacatagatttttttttttatataaaggatgggcagacccatgaagatcatcatgcaagcaggttgaacactgcaaattggattagctggttacaaagtaaggatagaagtgaccatcaattggcgcaaagagaaaacccaggttgaaaaggttgacaattgtgcaactggaaagtgagcagggtgaagggcaagcatatttgtcaggtaaataagttatccaggtcacatccagatatgataagacactaataagataaaattcagaatagattaagcaacagtttcatgcaatttttataaggcaaataaaataagatatggtagttcaaactgcatcccatttacaagccataagtactatatagattctccgaaaacggatgctgtaacaaatatgcagtgtggtatggcccaaaattgtgacacttaagcgagaaaagtaaagtacttggcaaaagaaaggaacctatattacgcaaacaatacaatcaggtcagtgggctgccaacaacattatgcaagttgcacatactgccattgctgttgtagtgagaaaatttgaatatattattgtgcacaagcatttgatatgtgcaatagagaagtcataataaggcataagcatctcacagaatgatgatgcagctcatgtagcatctgcaaatctagacttcctctaagcttgtattgcagagttaactatttttttcagtgcgcctggctttgcagtttgccacattgacattcagtaagatcaaagaataacactgaaaaaagaatacatgcaaaggcattttactttgttgaactggaagcagtaagtaagatactcctcaaacgacttacaaatgatattatatcaaagatatgcttttcaagcttcataccaggtgaaaaataattgattcattgatatgcactaaagtggatacagtgatagtacaacagggtgactgaccagtcagttttctgctcaacgtgtagagaaaagaacaacctgaagttgctcctctggtaaagaacagacaaggaaaaaagaaaaatcaaagttttgatccagcaacgtcctccaacaaaagaaatgcaagccaaaatcttgtgccgtgctatcaaaactccggcaatccagtgtagaacctctctatcaaatacaacctccatctgaatcaatcacgcagaatcaagctaaaaaagggattgatcacaagacgaataaccatccacgcttgtaaaacacgagcgtgcccacggtcaccgtcgaccaaaccgcaacgatccaccgcgccgcgagcaatgcagcctccttcatggcaaccgaccacccaacaagccagttcagctcctccacgccctcaaagtaatcttttccttgcactcgccacaatgccagcagcgagagcacgagcagtggcggcgcgacgagctgcgtggccacggcgcagagatggtggttgtgcaggaacaccttggcgcggccgtactccgtgtccggcgagcggctgacgtgcagccgctggtaccagcagaagacggcctcgttgagatacatctgcacggccgcccgcgaggccagcagctgcagccccgccgcggcggcgagcagcttcacctcaagctccgggctgtccaggaacccgcagcattggaggatcgacgccgcggaggagacgaggacggcgaggtagaggagcaggcgcgcgggcgcggacgacgcgagcacggcgagcccagagcggggctggtcggtgccgagccagaacgagcgcgcgaaccgcgtggcggggagcgcggcgagcgacgcgagcgcgccggcgaacgggctggacgagagcagcgtagcgacgagcagcgcgccgagcgcggcggcgaggtaggcggggcgcggggacgggagcatcacgaggcgcagcagcgcgacgaagaggaacacgacgggcgggagcggcgcgagcggggcggccgcgccggcggcggaggccgggagcagcagcgccggtggcagcagcgcgagcgggaggaggagtgcgaggtggaagtcggcgaagcgcgggcgcgtggcgagcgtggcgtgggagaggcggaggcggtagagctgcgcggagttggacccctcgtcgaacggagacgccgccgccttgccaccaccaccaccaccaccgcgttgctgcttggggttcccggatccagcggcggcgccgggcgggcggaggacggcgcgaggggtggaggaggggacagcgtccgggtggatgtaggtgtggagggcgtagaggaggagggaggggaggtggaggaggtgggtgacggcggcgagcgcgagtgcggcgacggcgtagaggagagacggcgggacggggacggggaggaggaggagcacggccatcgccggcggcgagtgggtagatcgccggagttgagggtggagtggatctgaaggaggcgagtggaggtggttgggagatgggcttttctgcttcgaatctgggggcttttaactatttgccactcttacgaatggtccttaacgatttgccactaggcccacatgtcatagacacatgagggcccacgtgtcattgacagagcgtggcaaatcgttaattgccatgtcacaagagtggcaaatagttaaatttccctcgaatgtgggctggtttggacggcttggattcttccctgcttgccttgtttgtattttgcatgggatctagtacactatatttgttgggatttgctagatttcctgaaaaaactgtacacttttgggtcacctaaaattgcacattactaaatctaaattgcagataaaataatatacaaatgtcattagagaataaatacaagcgcgataaatgcgaaaatgagacatctacaatagtaattttgttgttgccaaggcaagaagaagatagacaaacagtacggtatgtctagtatacatgggctccatcggttgcctaacgagttaaagttaaaagttaaaatttaaattttcaaacttaattttgaagttaattttaatttattttcaatatagtttcatttttagcattagtttttaagtcgctaaaaacgcatatataaaagttttatctctaaattaatttttattttctaataaaatattttgacttattagggaatatgtgtaaccgatgaggccgtatatttgttgggatttgctatatttccttaaagtttttagatttttttagtctcctaaaattgtacgtacgtagattgataaatctaaattgctgacgaatgagatacaaatgtaattatagaagacaaacttggcatgtcattatagaagatactacccacttatatattttatataaatatatacaaacgtgataaatgaagcgtctatatataggagaagttttgttgatgcaaaggctagaagataagagacaaacagtacgggaagctattgaatgtggatcgaggacatctctaatgtgagtggcatgcttatactttaattaacttggtacggctaattatttaattattagtggtagacaaatatacttgtggtggcatcattaatctcggaataaaacagcctaatcttttttaggtgtagatgtgcatgtttttaaaaaaaaattaagaaaaatgtgtgtatttatatgagtgtatatatttgtagcgcgttttgtaaataaaaaaatcaaacatatatataagaactatattttatctctcatattattgtgtgagtaataacaagtagtactaacaactaacaacccaatccggtctcttggttcgtgacatgggcctgatcttttctttgagaaagaggacgctgtgggcctgatctgagtcctcgttatatagttttcttgggcctcgttttgatggcccatcatgctagcccaatcaaagtaagaaaatggtctaaaaactcccacgtcccccagtactttttgcttcaacttgctcgtttcccttgcattccatgaagattcctccgtagcaactcgttaataggatattaatcctgcaactgtatattaacctttcagatacgagaggacaacggactgttcacatataataatttgatagaagctaaccatccataattaatactacctccgttttttaaaataaatgacaccgttaatgttttaacatttgatcgttcattttatttaaaaaattagtataaatatgctaaaatataagtcaatgagtcatacttatagtttcttcaatgataaaaaatcacagcaaaataaataaacattcaatgaagggagtacttaggaaaaaaaatgatgtctcctacgtcacttgtaatacgtagaggttgcaaaaattctactcctagtctcttatacgcttaattttgacccgtcacatttacacaagtgactagaatatccatatgatattgaatagtccctgtcaaaagaaagaaagaaaaaaataagaagaagaggagaactacaagtaccagcatataacaactacagtatcgatcaagtgccaggtgtcaacaacaatcggatcggaatagtcatccttcaaactttcaaagtataagttccacgaggaatcaggcgttgtttagtttggaaaaaaaattctcaaagtttgattttgatcgtcccacgtaaacttttgaatcgatcaatcaatttgaaaatatacatatcgaatcgaattgaatttccacgtaggccgcgcgaagacgccaagaatgcgcggcaaaagggcgagcagcgagccgaactaacagctgaaagcgaaacgaagcttagatatagtaatagttaagattactttctctgcggtttcgcgcgcaacgaagctactcctcttcctcctcccacctcccttctactttccacctctcgcccgccatggcgaatccttcaaacctcccatgggtataaagcgtacgaaccatttttcgatgatccctcgctcatgtcggaggcgatgttccggttcatgtccaagaacggcaccggccatgggtgcggcggcggcggaagcggaagaagaagaagggt

SEQ ID NO: 11385 - DNA, 703 bp, Oryza sativa
gagggatcttcatctgcgggaagcagcggcggcggttgggagctcgcggaggcgctggcgcggcggcggttgtaccgggaggtgacgctggcgctgcgcacggggctgcgcgacgccaaggccgacttctccttcctccgcgcgcgggggctccgcagcctcctcggcttcctccgctccaccgcctccgccaccgacgactcgcagctgctcctcttccggcattcccagtctatccccgatctccaaggtacaaaccgattttcccatccattccggcgatccaacgatagggcaccgggttgttctcgtgattctcatccggcgccgtaattggagcgacatttggttggcctgatctctaatgcaatgcaatatccagtggtggttagaatgaaatcgatgaacatagttactgtcttgccacaatcggcacaaatttaagatgagagcatcgagtaaacctatttgttattagatgtaacatgtcagtcagaacacaagattcagtattaggtgataagcgctgattgagctggtttagtttggtgctgcacaaaacttggttcattataaatgaaacaagtgctcttggtggtatgtgtttattatatcgatgctaatgctttctacttctcttcgtgatgcatttatggggagagctaacctcataacggtaccttgataatctctttccgagtta

SEQ ID NO: 11386 - DNA, 1716 bp, Oryza sativa
tgggccgggacaaggtggattgcataccttattttcaaacatttctttgaaacgaggatcagtccactatgccttggtcatttccaggttctttttcttcttcttgatgcccgaattttcatccttctccaaatcagcatccatttcctcttcctctttaaggatattatccattatttggccggtaacccttggtattttccccacctggctgctgaaggtaaaaaagggccaccttccttaaaggggatggtccggacctggtaccatgtatccagccaaggacccctttttaagggcagacaaaccggtattgcaaaatttctccggttctccaatttcttttggttaaccctctcttggatattctcaggatccacagcactagtagctagtaggtggaaagaaatgaaaatgttagtaaagagcatgttcaatgtattcgttcctgccacccaaccccacatacaaaaattccaatataggcaggccatttttatattcaactctaaggtcagatggctttagatgggatatacataatgacaaaaaaaaactggtccacaaaagagtcttcatgttactagagaggttgactgcaaccatcctacagcagcatgaattcacttagatgtccacgaaaacagtttaccttcttatatagctgaagtttcatcacatatccatgcatatgcgctctcacaagaccctgatcaatgtacttagagagatcatatcgatccatctcatcttttgttaaaaacttgaaatcttcatatacaatattctctgtcttctcttccatttcttcctgttcaggagaaattcatagttggtagtgtcagcaaggtttattagaactagaaaaatagtgaaaattattcactcaccgttagattatcaagatgcgagcaccactttggagcagggcccaatgcaggaataaagtgggcagggatctggctattgtccaaagctaataacatcaaaccactgttccggaaaacacaaacatcattgatagtaccaccatctggttcaatgctagtcatgttatttccctgtagaaaagggtaaggccatcatccaacaaagttaatgccttccaggaaaaaatgaagcctgcactttccaaagaaagaaaaatggaagaactcactgtattaggatcccaaactctcactatatgcttgtcagcagtaatcagcttaggttcagtagaattaagtgtctggtgccacttaatacttaatattgggctaccatacctgcaataacagcaagtacatgataatatattatccaatgcaggaacatttcagctattggctaccacggctcaatcccccaccagcagcacctttgcttttataagataagatgatcctgacttggagccaagagaataactttttgaaaaactaggtggggttcacaataagattttcatagagaatcacatctagtaagagtatctcattttctccaaaagtccttatagctttgacatgtactaaaggaatatggtttatgatgaaagcatgaaaccttttctttttaaaagaaaagataccgaacttacatatgatccttaactcgcaaaggggaagacatacgtagatcatatattgctacctgcagaaaatcccaaacatttaagactaaaaaatgataaacaaaaatcgtcatttttacagattgggttgtccatgaaca

SEQ ID NO: 11387 - DNA, 1023 bp, Oryza sativa
tctgcccctccctctgcctctgcctgtgcctcctctcctaccaccaccacctcctcctccaccttttccaccaccaccacctcctcctctcccacgacctcctcctcctcctcttcctcttcctctgccacggcttccaccgaacaaatagtactcggctttgccttgtttcaagcccagggattgcacacctctcctcttgaaatccttgggctcttcgtcatcagattcttcggtgcgccttcttgagcctctagcgatgaatgagattttgcgtgaaccaccaggtccatactttacctcataaagggcatggagttccgctgcctctccagagcagctaccctatcgccaataggtatagcatcctcattggcaagggaggtgctattcaaaaatgcctcagcgtgacggtcatccttgacttcatacaacctgcacggtggagagcagttggcataactccaatgcgccacaagaaaagcatcctcgggaaatagaacgaatagccccctcactaatctaaaaatgaaatgaatggatgtggccagaagccagatccctctataggatagatagaatgcagcttaactcatgtaattatgcacgttggcattgcttaaaaccagtaagcatgtgcctattactcaatcatcaacctaaccaaccgaggccattgcaaacgatttttttataaaaaaaagaatcaaataatggtaaatgcgcaatttaacctaaccaactcaccttatacgctttgaactttgcatgccattgtcactgtcagactctgctgatgcatcagatgaactagcatcttcttgttcctcatcatcactaacagtctcaaaatgttcctcaattagacgaggctccttcaaagatgtttgaggatgaagtgcaagatattctcttgattgttcatcaatttcaaagtcctgcccacgtgattaatgggattagaaaaccagattagcttaaaaaatataacatatggtcaaaaggcacagctgagacatgact

SEQ ID NO: 11388 - DNA, 15457 bp, Oryza sativa
cagtataattttttccctcaggtttgtaacttgatcaagaacttgtgatgctcatgcattttgttggatatacttcttgtatgtatacctgagaaaggagcaggaactgacgagctggtgttctgtgacagttattcctgttctctttcagaactcattgcatcaaccaaaggaagatcctgttgtgaccttggatcatatatttggagtagaaccaatgaagattacaagccccccaacagataatgaaattgctctcgctcttagagtcttggaaggatgttgccttttgtatagccgatgcactgctctggcacacaagtacaaggctgtgaaggtaatatccaattatctgtagtgcttgctttgttctaagacatctgttttatgcttgatggtttaattaggccattcccaacccaagacattagacatagtttccataaactccacatcatcaagaaactagtactagacactactcttccaatgcaaacaccactattccatacttaaatttaatgatacctatctcacttgatgtcttggatgttgtgtagaaaccatgtctcatgcaagacatggtttccttctctttcctcatttatttacttgtcatattatttttcatcctaggtggcagcttatttaatgctatggacaccatcctagtcattgggttgggaatggccttatgtttgttaaatcatactggctagaagttttttttttttttggtctcactcagatggtaatctgttgatcatgcaatttatttatcgcatagccgtagcgtcaaatcgttagttctatattgtatatcactgtcaagaagttcctgttctctgtggttgcggattctttcttcgagcataaatcattgctcaatatggtaccatctgctcatgtgatttttgtcctgtcccatatattcttcgcttgattagctaaaacctttattttctataggtaatcctgaatatattagctaaccgaggtccagctgagcaaggagtgtgcttggacgcgctgatatcgttgatgttggattcaccccccaatcagatggtgctgttacctctttacctaattgttatgattctcttaaaatcttttacatgttagtttttttttctattacattacttagggttagtgtacaattacttgacataagagaaatataaacatcaggtttatttcagaacaaaatgaataagacttactcttagtttgaaaggacattgagcattaaataagttgacatagtttattgtttctgtttcctatcattttttgtgctcttcagttggtccaaggctcacattgtatataacttcttccttatctaggatttcgaggaattcagtggacttgagaaggttgcagagcttttaaaggatgtgcaagtagaagagcacataaggcacgtattattcctttaagcatttctttagtctgaatgcataatctggcagttcaaaccaaattttactctctccctccctgttgaagaaaaccaaattttactcttcatgtgtctgatggattgatctgtccgtatctcatcaatcaattggaaaaacagaaagttaaacaaacgagccatgcaacctactagcttggtgacaacatgccctcaaaactattgatatctgaagtttttagctgttgacctctactcctagtctttgttttagcaaggtttgtgtgctaaccttaatattacatcctgacttactatgtgatattagctttactgttctggggtcctaattttgatgatcaaaatcttgagtctataactccactactaacagagtcaattgcacatttgtttctccaaattgtttgttcgtttttggattaacctacttttgttgaatgatgctttgatgcagattgaaatgtggggagttcctactattgctaattgggcatgtttatgcgaaagaaaactctcccatacacgaacaaatgagaattttgttcggcgagcagtgcgcatcactgatatgggcagcaagtcggtttggctccactctcgacgtggagcagaggcagatggccttgcaaatacaagcaaggagagttgttgaatccttggagccctactaagacaaagcacatcaatgcgttctttttgtcttcctgacaatggtctgatatcactgatccaagcaatgtgcttcatttgcctatagcaaagctttgttgtcatattttctgtgtagagccattcttatgtttctgtatgtacaaactttgttgaaaatattctattagttcagctttgcagaaaagatgttattagtttccattcgaaaaccatggactaggttacggtggtaacttagggcttgtagtggttccccattttgtaaaccgtgggtttaatacgaaatttgcctacaaattgccttttatgcttcaacagcaatattggcaacagtttcattgaaacagaggaaatcccctccaattgggaaatacttaatatattttgttgttgttgttggacgtacatacatacatacgcatgtgattatgacaagtttaaataaaaatgctatggcatgaaattagtttcataaataaaaccgaatatataaatatcgtgatagtatatttatttggtattatggatattaattattagtttttttataaaattggttaagttagagaattttgaccaagtacaaaagctacaaaactttaagtaacttgcattttgaaatggagagagaacaaatttgccttagagtggcgaagtgagcgttgcttaattggttaggtttcttatggtggagctgcccacttagattcaagtccaagacttgacataggtgcccgcatttaagactaattattcttttagtaatagacgacgtactcgctacaaaactttcagcaacttgcattttgaaatagagggagtataaatttgcctcaataatggtgaagtgagcgttgctcaattggttaggtcttttatggtggaatcagtccacttaggttgaagtcgtagacttacatggctgcccacatttatgactaattattttttcagtgatagacggtgtacccgccaccgacagcgagacgttcatgatgacttcgtcaatcttaaaatatatcggtccaatctttgaaagatatttatagaggttgggtgtgcatgtgtggtgagcatatttgtttgtactgttgtattttaaaaaaattgcctcacaaatgatgtgaagtttttttttttcagtccattagcctagcagattggagtattattcgggccatgaacgacccaaggccccagaacgagcccatatccatctcgccgaccaaatccctaaccctattccccccaccgagcacgcggcagctacacgcccccacgtcgccgtcgtcctcctccctccgccgcgccgtcgatctccctcccctcccgggccgccgccgccgcggcgtcctccacgccgcctgttgttcttgcctccttccccgaccgccactcttcttcaagaggtggccgtccgtcggcggagcagcacgggaagtcgacgccgctagctccgcctcccgtcgatcagtcggagatggagcaggtcagtttctacccaagaaaaacatgaaccaccacttcgtgagccgagctagtagaggctggattgatttctttccctcgaattgaattgtactgagcttgtttaccaaaagaagaagaagaattaccttttagagcaagaatgcaagatgatatgacattaaagggtgtgctttcaaaggattcctgaattttatgtattagtattacttactgctcccaaagtaatcgctgcagcggtgcagccactgtcataaacaatcacaatcaattggtttaaaacgactatctctgttctgatgaaatcataatcaattggttgtgcaggttcgtggtgttgtgcttcaaagaaacacgctggtgatgtctgctgcatagacaacacatggaaccatccgatctagttgatggatacaagttcggtgatcaaactacaagcgatgttcgtgtttgctttaaacgggccgatgaccaggcagaatggttttgctgccattcatctgtgctttccggaaatagcaagtattttgcagactggcttagcagaaatgacattggttcaaacaactgcattggggttgactgtataagtgctgactatgaacattatgtcaaggtgttgaagttaatatatcttcctgcagaatcaattatagattcttttgaatctgttaggtcagcggttggcgtgcttcgagcgtcaacacttctcaaatgtgagttaattaccagaagctgcattgaataccttgaagcagcttcatgggatgaaaaagaggaggaagagattttggaagtagctcagagccttggctcagaggaagcagtagctctgttagcccgtcttcaagccccaaatgtttctgctgtgaagaatgtcttcatctctgccattcgttttgctacgtccatggaaagtccatctcctcctttcttggatgatctcaagacttctgctcaggagcaaattgacttcatgctccatgaggacgatgacactgctttggttacaatggatgaggatgtgaggtctgtggtgcgagaaggattgaaaaaactgttctccacgcttaagattggactagatctgttgacctcggagtatgagcaattgcctgaacaggcagaacaaagggttctctgtagtttagctgacattgactggatggctaatgtcttgacaaagattgagatgatgaacgagtttgtctctggttggtcagaaatctctggctatgttctttcagttgttcaggataagaagtatagctcaggattgtggcttgtaaaagcaaaacttattgaagtgactggaaaggcctttgatgctgttggctatggctctgtggttttcccagcatcatccagagttcattttctgcggatgtggcttccattcatgcaaacaacgaagcgcttgcttgatgaaaagtcgaaggatgatgcgattccacagatggatgcagacttgtttcagaacattgagggtgcaatagtctcattggtgttagcattgccatcaggtgatcaggcagacattcttggagagtggatgaagaatgcagagcagttcagatatcctgatctcactgaggcatttgaggtgtggtgttaccgtagtaaaacggcaaagaggaggctagtaggagggctaaacgggagtggcaaccccacagtcagcttgtaactttgtaaggctaccattaattttaatcttttgttgtagcctatacaagtcagtgaaatcaggtggttggtaccaagcaatataccaactagattttcattgttgtatgttgtaaaacaactgctcatgtgtaatacacttgagctttcttgcagtatgttcattacccttgtccaagttcactacttcttcctgacctgagacatttcgaagcatagtccatggagcaactaggttactattggatatttcgaagcataattctgatgcattttttactcttttgcatcataaaacatgataagagttcattaactgactgtacaatcaggtctggtacaccctctgttcctggaattgttatgcatggatcctggggattcttaaattcttaaacattctttggtttaaatttgctactaaaaaaaagaactatttttttccctttatcatccaattggtttctgtgttgaatacaagaaaggcagaaaggtccttctttagtattcttgtacaggtttaatgaagtggtccgtcagataggttggaaattttagttggtagagatcattgtcttcatcaaactgcttgattcaaatattcagactaaattatgatttatctcaacccagctgctcatgcatcattagtcacttcattcctaatcaaacgaaaccatttgggatttggcacttctgcaaaagcatcgcattaattagttgtcccgttgtggcacaggaatcttcagggctttctagctaatcttcaactgattgcggccatcatgaggatgatcttctgctaatgatatcttaaatcattccaagcacttgattaagtacatatattaggtttagccatgtacttattggtacaaagtgctttctttaagacagaaggaatgattgatagcaaatgtccagcttaattcttccaatctcctgatgtgtttggggtagctaaaagaagctttcttcatagtggaacataaaggagatgattaacaactagttgggggtaccatgagtcttcttagtccatcattatttaaccctctattcagagttcagattaactgctggttaggatcattatgaggtcttgttggtcaattttcttctaagtgattattattacctagtaatagataacttgcataatgtcataagttatgctttccagcaaacaaacaggtgagtgattctatggctctctgtccccatttagcaaattgacctgtagtggagcttcagttgcaagcatctttcacttcatttgttgattggtatctttttcctttcctcgtgcataatgtgataaacaattagcaaactgctccaattgagattgggaatgaacctaagttccccttttttcctcttcaattacagacaaacaatttgatcatttgatggtagggcatgattagatgacgtgcaaacagtgaagtccactaatgcatggggccaaaagatgagtatctagtacaatggatcaaataattatacctggtagtggagttgaacatttgcatctaatctagtctaatctagtccaatctagtgtggttgattgacattgaagaagaacatgtggcatactgatctttgcagggcagctcaaaacacactaacacatattcttcttttttcagtgaacactgctcttctgtttcacattataagtttttaaataagtcatttttttagaaattgttgattaactataatagaaaaatatagtaatatcttcaacacaaaattagtttcattaaggacatgttcactttgatgacattttcaaccttaccaaattttggtaaagttgtcaaaaaagtggctacatttagtttgctaccaaattttggtaactaaataagaaatcctaccaaaattttggcaagttaccaaaattttgccaaaatttgataaggttttttctggcatcaaagtgaacaggccctaaatctatcactgaatatattttaatagtatgtttgttttgtgtttaaaattttgctatgtttttgtataaactaaatcaaacttgaaagaagtcaaaacgttttataacatgaaacatgatacagcatatatcacgatattatacatatggtgtaattgtatgtatatatttacatctagcatattcttatacatatctaacatattatcttacatctaaactcagattacagtatacatataccattatactctagtgtttttactctctgtaattactcctctggtttctgaaactgacaatctaacttgaattttcttccaggctctgtgatgaatctctttgaatttgtcgggcgtcggcgatcaaaattggattaattttttttcttcttctggtgatgatgaactgaactgatgatcttgctagctaggcgaaagccaagccacggtctgcattggagctctgaacctggagcctgaagctgccggcatgaacactctcctccttctcctccgcagcgacctcgtcggagaatctccacagcttggcggcctcgtcggcgttggatcccagcctcgacggcgacgcctcgttgcagtcggcgaagtacttgccggacactccggccaccgccgggtgcaccgccacgtagcacgtcgtcgccgccgcctgttgattatatatagcatgagcaagacaggatcagaatttaagaagaaaccagggttggaatttcggactgtccgatacgatattatttcgaccaaaattttttattttcttaatattttcataaattttggtaatatttatttaaattcaactaaaatttgtttaaaattttggaaatttcagtatttcgatgatgtccaatcaaattggctaaaccgaatggtttaaccctggaagaaacatggatcatcgaagattcaattcaaagcaccattttcagtaaattcttgcctacgaaatccactgatgaaactgacctgagggatcgtcttgagcagcttggacgccaggaagaagactgtatctgcagttaaaatcatttcttgggtaaatttcttacttggatgctggtaaatttgttgaaaaaattgaagagggatgagaagaattactggtgacaaggccgtcgcgttctcggatgagccgggtcctgacgataccagggtggacgcagtttgccgtcacgttggctttcatctcctgctcaagccattgatggcaattagcttaatctagagctaattaattaaggttaattgcttaatttagcactggctatgctttgtcgtgtgattaagtcatgagatcagggaaactttttttttatggaatggatatcccttctttattttctgtatgcgacctaaataattattattttttttgaaaactgataagatgtgataaatatacgttgtatcgccacttcataaatatccaacctaaaattcaacttctacaactcgtgaaaaaataacaaatataaccgaaatactctttccgtccaaaaaataaaataataaatctaggactggatctgacatattctagtacaacgaatctggacagaggtatgttcagatttatagtactggaaacacatccagtactagcttgattttttatgtgacgcagggagtatgtatgtgtgtatatactagtcttaatttgatttatgagatcagagtgaataataattaccttgagccgatccgcgagtgccctcgtgtggagaacgttggccagcttggagagcgcgtaggctctcgtcggatcgtacggtctgcacaggtgcatgatatccaaaacgtgaatcttaaagcacggattaatatctccatcgtcttttttttgtcttattttcttttgagaaattaaatttaagtgtgatgtgacagggatttgtaactaactctacgcacatcttcctgcgcgtgacggcgtcgatgtagccgacggcgtcgtcgccggcgaaccagctgtggattgtggaggatacgttgacgatgcggccctcgacgccggtcgccgccgccgtctccgccatcttctccatcagcagcttcgtcagcaggaagtgccctgaattaattatatccaatccattaacgcgataattagttagcaccgtaattaattagcatcttcgataaacacttagcgtaattatttaagctttgttaatcgcatgcaacgtacgtacccaagtagtttgtggcgaaggtcatctcgacgccgtcgtcggacaaggcgaatcggtcggcgaacttgccggcgttgttgctgcatgaattcatcgtgcatggtgccaaattaattaaaaaagtacatactttaattaaattgtgataaaactaaaatttaaagtgttgtatcataaaaatatatttcgcattaattaattttatcccacaactacgtattagatagcaaatttatcataataaaactataggtaaactattacgttcatagttccaatataacggtagtaaaagagatttaaactaaaaaatcaatagttttgtattaacttcaacattgtatttgtagatttgtaatactttagttttatgatagtttagttaaaatatatgtagttttatgaaatttagtctaattaaaaacacctcatatatatttaaaccaaaccaaaccaaaccaaccatgcaaataattcctctagctaggcaatgtgcaatattatttgatggtactaattagcaccaacaattaattagcatgatcgtgattagtgggaggagttggtgataattaacagtagtacacgtacatgaggaggttgagagggaggccgagcgcgaggaatcgggcggcgaagcggcggacggaggcgagcgagctgaggtccagcggcatcaccaccacgtcgccggcggcggcggggcactcggcgagcagccgcgcccgcgcctccgccgccgccttgaggctcctcgccggcagcaccagcctcgcccctcgcttcgccagcaccctcgccgtctccgcccctatccccgacgtcgccccggtgatgatggcggtgatgtggcggaggtcggagcaggccgcggtggcgtcctccgcggtggcgcgcgacccgaagccgctcgcccccgccgtgccggccaggtatctcagcgaggtcagcatggctaagctaagctagcttaattatggttaagctaagctaagctatggcggtgatgagttggcgcgagatcgaagagaagtcgtcgcatctcgtcggagaagaagatgagctgagctgggtataaatagtgagtgagtgagtgagtgagtacagttgcactggaaagccatgagctttacataatataatcatgttgttattaggaaataattaagctgatttaagcttttaattaattggaagaagagggggtacagtttattttcgttaatttttagctgattttgtgcgtgtcagtcagtgtgtgagtgagctgtgagcatcagatcgatcgacccaattaattaattggtgataccttagttttaatcatctgtagtattcatctttcctttgcttaacactagctttccagtagagacaaaagtagtacaaatttaagtcatcttcttcctcggttcttcctcatcatctcctcgtttttttttaaaaaaaattcctctctttaatttggaacctttccatcggtcatcacacacatgtcatcaccattgatgcgcttgcacacacgagagatactaattaacaaggaacatatcatatacacataaactttccgtacacacttcgtacacaccaattagcaaatatcatagaaaattctagaaaaaattagacacatatttctaatagtattgtacccactgtgaaatcttatctcaaattcattatattttagccgtaacaaaattctaacagatttttaccctaaaaattgtcagattttccactttttttatggctaaaatataatgaatttgaatatgagattttgcagatatgtgtaatattatattaggagtatgtgtctaattttttctagaatttgtgacatttgtaattggtatgtacggagtgtgcatgggaagcttgtctgcatatatatatatatatatatatatatatatataggacactcatatggggcaccatggtgcccgggcaccatggtttcaaatgcacaaaatcactcaaatttttcaaaattttcaaattgtgagtatatacctagttataagaattcgattcatacctatacctatcaacaaaacaactcaaatttaactttatttcacaatccatgattacatacctaactaattatatgtatggatgctatatacctagaatcaaaatctaacaaaaacaagttcaaattcagttcaaacttgctttcaactagttagtaaagtagttaatattaatacctaaataattgaaaaagtttcatgctcatttgaattggatatatactcaatttcaacaatggtgcccgggcaccatggagcaccaaacaaatttactatatatatatatatatatatatatatatatatatatatatatatatatatatatatatatatatatatattcccaattaacacattgcaatttgaaattagtactaattaattagctctccatcgatgcaggtcgctctcatgcttgtcgctgaatgcgaaggcgagatcatgcaggaatgggcgaacgattcatggctgcatgtacatgctctaaacacaaggtgttgatagctatatgttcgtcttggatcgtgcagcttatctgtaagcgctatcgaagatgacactatgtgtgactaatacaacaaggatgtaaaatggttccttggcttcatctgaaaattttctaccctgatgcatatgtgaaactacttgcattgaccggtagtggactttaataatgtctttctccctctgtcctaaaagtgtaacattttttaagagattgtaggtattagggaaaggggtagaaaattttgtttgtcttattaagatatgtaatgtgtaggctcgaattataataaagccaaaagaagcgcgtggtggcaaaattatcttttatatgtcctacccctgtcaaaaaaaaaacccatttttaagtatgaatgtgctttttttttttttgaaacagagaggggtaggttgctatcgatctaagacaaaatttgaactctagactttttatatttggagatggaagaagtagtatattggctaacacgtagtcttttgttctactagaagaactttagcgcaagttctatctcaggttgttttgttgtttcaattttcttggctagagcaaaatttaattttaaggcttactcatcgtagtttattttttcaatattaacaatttagatataagagttttacttataatttctttccgtttgttagttgatttttttacagcttattagctgtagatcaaactagctaagttttcctattaatactctgaatggtaagttggtgatcccagcatgaattatttctactagcttgccataaaagctgggtccatctgggccacctttcaaaaaaattttttgaatgaacttaaaaaaacctttgataaggtcttattctaaacaaagatttataatattgtaaattaatattcaacagaagtatagatatacagtaagatttttacactttcaccggtcattttcctccttcatggttcatatattaatctggcaaattaaagctctaatatatgatatatttacgtatattagtttgagaattaaattaatcaagaattgaaaaccgtttgaaacttgaaacaatgttaacaattattgggagtttctgaatataaaaaggaaatacatccaaactgaaggagctgttatcagttagttagtagtgggagaagtgggcttgataatttgtaaacttgtatatgaatatagtgggtgtttgcagatcaaatcaagcttgcaataggccaatggtggtgggtggggagcaattagctaagctagctccaagattgggagcaaagaggagtaggtcacatttgccccaaaaaaacataataataatttggcaatttggcattgctctaaaacaaaaccaaacagaggaggaaaagaagggggaaaggaggatgtgatggagatgggagctaatgaatagtggctatagtggtaatccgtatccgatgatggattttatgagcattacttttgtatgtgcgtggtttgcacagctaacaaaaataattagagcaagatgtaccatgcgtagatgcgtattagttgaattagtagttttctgtgtggttcctctttctcatttcccacaaattataggtgacactagcatatatagacataaaaaagctagataagtaaaataaatagaaataacgtatgagcgaccgtgattaattagcatcatgatcttatactgcttttctctcatgcaagccccttttaatttagattatttagttgattattacatgaattatctacatgattatagaaataaattaaatatattcatgattattacatgaattatctacatgattatagaaataaataaattaattaaatatattgataaataaacttaacaaatagtttaaaataagtgatctaaaataatactgtagaagaataagagaatgttttttttaagtgtggaggtttcaataatccaagtaatcacgaagtgacttgtgacaagtttctgtatacattgcaggagatcagcttcccatttccctttgtcttgtgagtcgtgactacttttggctggaaggtcccaggaagatcctcgatctttgacgcaaaaatattcttggaacacctataagcgatagatcttgcaatcattgtaacagtatataaagagctttgcaaattgtgcttattttttagtggtctccccttaaaacaagttggatgtagcaacaactttgaattggttgtgtgaaagaattgcatctattacattcattacagagggctatatctgattactctgataattagacacatgcatttcagttatgttcttgttgggttccaagaaaacaaaaaatcactactgataatctatgtcagtattcagtagtgtacacaattttgatttttgaagaacaccagaaaggtctggtaaggtgtcaacttgatggattctctctgtgtgcaataatttgcttaacttttgttctcatgttgttactatgctaaggccttgtttagttcccaattttttttcaaaaacgccacatcgaatctttgtacatatatatagagaattaaatatagataaaaataaaaactaattgcacagtttgcatggaaatcgcgagacgattcttttgagtgtaattagatcatgattagccataagtgctataataacctatatgtgctaatgacgaattaattagatttaataaattcgtctcatggtttccagacgagttatgaaattagttttttcattcgcgtccgaaaaccccttccgacatccagtcaaacgttcgatgtgacacccaaaaaatttcttttcgcgaactaaacaaactctaaagccatgaaagaaacaaaatatacaaaattttgccatgagcccatgggtcatgggtggctgttaaacaattcagcaagatagagctgcatcagctgtgaaggtgatgcccattttggctacaaatggttgttgcaatcatcgctcaatcctagctccttgtttagagtttaataattaaacttttctctcttcttttttttatttattgtagggaatagaaaatgatcctactatacgagcaccaactcaaacatgctagatggagaaaactatccgtatacatggtacctatttttgacatgaaattctgatagaatgaaatgcatagtcattacttatttttattttctttacatggtatcggctaatggtgagctaatgatcatgcataagtgcataacttctgcccatctagattcatgcaaatatgcaaaccacaatacgcacctgaacaataaatctagatgcaacaataaaaacggagtgggcgtccaaatctatgcagaatactggtcggaagagtaatattggttttggtcaatcaatattgccttgtcacatactcacattattgccttgtcacatcctttcagtct

SEQ ID NO: 11389 - DNA, 536 bp, Oryza sativa
ctgctcggtttgtgttcgtgcccagattcagtggccgaagaagcaaggatgatgcactgaggtgggggggggggggggggagtcggtgagagatttcagcggagaatctcgtctgattccagcgtgtgggacctccgggcgatggccgccgctggcggcggcggcgacgccaagtacaactcgtacaaggcggcggggctacgcggcgccatactggaggcggcgcacgtgtcgtgcctcgaggatcgctacgcgctggggccccagctcgggtggggccagttcggcgtgatccggtcgtgctccgacatggtcaccggcgaggcgctcgcctgcaagtccatcgccaaggaccgcctcgtgtcccccgacgacgtgaggggggtcaagctcgagatcgaggtcatggcgcgcctctcgggccaccccaacgtcgttgacctcaaagccgtgtaccaggacgaagcgtccgtgcacctggtcatggagctctgcgccggcggggagctcttccaccgcctcgaggagcgcgggtg

SEQ ID NO: 11390 - DNA, 644 bp, Oryza sativa
ccaacaacagtggacatcaatcagtacataagaatgatcggctaattcgaccaaactgttcaaatacaatgttgagagaattgcttttacatgcataaacaaatttggccaaaaaaaagaaatatactgaaagcagcacaatactgtttgccatgttaccgcctacatcgaaaatgtatcatagtctacagcaatacactaacaaatgccctgcatggcatggcaccaacgttctgcaactccagcagtggttccatatagcagtggacaagtctgcagtagcagcacacggcgtatgctcctgcacctccatgagaagggtaaagaagaggaaaagactccaaaacacaaaggaaactcttaactcgataaaatctcaacccagttattaactttgagaggttctctgaaacttacccacactcagattgagcatcagagcacacgtgcacatcaagtcaagatcccatgtatagcatggcttgcacaattgcatgttagggcttttatgatctataaatcagcaaaagcgaaaacttccagctaactgtaaatcgccatagtagtcatatagcttaccagacaggttgatactagaagaccatgctgagattggtttataggtaaacttaagttttatgtta

SEQ ID NO: 11391 - DNA, 6863 bp, Oryza sativa
gattttcattgctaagaacacgtatatgagcaccagtgtcactgcggattccctgtataatatgcccaccttttccaataatgcatccaatctggtctgatggcacaagcaaccgaacggtaacttgagctaaaccttcatcactttcttcattcccaatatcatcatctatggatagcttttcatgaactctaaagagagcgtcttgggcagggcaaaccttatcttcagcatctactagggtattagtttccctgcttgagctaaatattgtgataactctctcatcacaaccagatacactctcaccaatccttatcttagcttgagtgtcggccctcatctgcttagcaatttctccacccctcccaatgatgctccctatttttctagaagggcaaagatagcggtagacagtatcatctggaccaggagcatatgtatcatcaccaggattccttctcttgccacctccattttcagcataatcagagtgacgcttcccgtgactgttcctatgcccaggtccaaccattgtctacaatcggagaaagaacggtcaacacagtagagaatattgggtcaaataaatggaaactaaaataacgcgcaagaaggaagctattctaagattattcacatcaaaccctcctgaaattctcatttaccaaataaaatcaactataatcacacgaatcaccctgtcaaattcgtaatgacagcacatattaataatccttacacttgtatggctgcatgatggcatgtttatcatggccaagcgttaaacgaatccacatgaacaaatcaatcccataccacaatgaacaaaagtcatctttcgatcctaccaactagattactataaaagatctaacgagaaaaaataaaaattgtttggtctattcatgataacctctccgactctttttttacagttcaattattattaagttgaagaactaacaaagatatcccgacaaaaaaaaaattctaaccaaaacactccaaccacgcgaatcaggggcggatccaacttgggacgtgggggttcagttgaacccccaaactattggggggaacaaacaaactgttacttgtattaaggttaaggctctgaaatcaaatagaagaacctcttccagatctataagagaagctagggttaacgcaagcaaattccacggaggtgcaatcccggtggaagagagagatagatgaatcagaaagagaatgcagatggatgctcaccaagatcccctcccctcccctgctccgctcgccggatggagatcgccgcccctcccctgttcagccgcgagatggcgcaaggagcggaggagacgacgagacggggagattttcttttacgccaagcctagggaagcggccaagggggagacacccgtgtacaccgccttttatctcaagcttttcactaaagcccgaaaatttgacaaattaaccctttcagaaaacttatctaaaaaataaatcgtgctaaaaactaatcatgcgcttagagccatcgaggttaacaatgacgccgttgattttttttttaacatgtttgaccgtttgtcttgtttaaaacttttgtgaaatatgtaaaactatatgtatacataaaaatatatttaacaataaatcaaatgatatgaaaagaattaataattacttgtttttttaataagacgaacggtaaaacatgttttaaaaagtcagcggtgtcaaatatttaggagcggagggagtatatcctttttaacatctttgacgttggcgtttcatcgaagatgacatgaatttgccaggttatatataaatatcacattaacgctaaagatattgaatattccatcggaagcggcaagaatttaccagattatatataaaaatagtaggtatgaggctatgtctgtcaagcttgaaaccctggttcaaatactagggatgcctcccatttgaaggaatttctttctaccccttattttctttggcgaaattaagaaatagtgacatattttttggtgaaattattttttaatataaaatttaaaatacaaatatattatggataccacataccaaaaagtggttgactaagctcggtagggcacaccatgtaccaagtgttatacggaatcatacctcgtatatagaaggaattccggataaggaatgacgaatagagttctatatgtaaactataaggactacttggattgtatccatattgatctctctagttttacatggacaatgggacacctatggtataaatatatcccataggaggagggaaaaaaagatcaatacacgacacaacaacagatcaacacacgccaagacaagccgctagatatcgacatcagagataagcctagacaaacccaatatgatgtatgcggaggccaataagagagatctagcgctatctctgatctcgtcgagtgcgaattcgaggaggaagactaccccgttgttggctacgtgatggtattttcgggcgccaagtcgataacggctagataggtatatcccaaatattgtactggtctaattataatgaataagagcaacatcggcttcgcccaacatgagtagggctattacctgtcagataaggggcctgagcctgtataaaatttcttgtctccatatcttttacttcaatctcgcatataccttggtaccaacgatccccatactatgcaaaataccgtagtcgcggtatcacccatcgacaatatctattttatagttaatctttaactaaaacactaaatatatataattcttaagagaacactaagctcgaactaaagcaaatgctggtgtcctcgggagctttttatttcttttaaattcctaaaatccttatattattggctaaactaagaaattgtgatatatattttggtgaaaatgtttttattaaaattattgacttcataattaatactttaattaaaacacttattctacataattcttagttttaaaattcctaaaatatttcattattttcttcgtgtatgatttatttaaacaaaatgtgtcatttcccaataaaatacgaaaaataattaacaagtgtagaattggtaaaaaaggtaaagatccttaaaaggagtagaaggaaggactcaaaccagggtcttcaggatgagagcaccagacccagtagcaactcacgtgtgtattacatatacaagcatgtatttatatattttcttataacttagtaccgagcaccagatccagtagcaactcacatgtgcattacatatacaagcatgcatttatatattttcttataacttagtaccaaacaccatgaagctaattctatatgactagttaaatttttgtcttctcgaataggatgtgagtgtcaatattcttgacactaaagcattatatatcaccactaatcttaatagcgttgagctgacgatttatttatgcaaataagtttttagcacggtcgttgcaaaaagttttctggaagggtcagtttgtagagagatctatgctgcgcacaggcacaacctttaggcagccacacgctggtctcctcgaactcgaaccctagccttttgctgctccctccggcctccacacgcgcgagatcccttcccctctcctcccctcccggcgagatgtcgtcgtcggtcggcggcggcggcgggcagcagttccggtacacgcagacgccgtccaaggtgctgcacctgcggaacctgccgtgggagtgcgcggaggaggagctcgtcgagctctgcaaccccttcggccgcatcgtcaacaccaagtgcggcgtcggcgccaaccgcaaccaggccttcgtcgagttcgtaagccctccccccgttctccctccccttccccacccgcctggcccgcctccatctcccccctctcgtcgctcgatctcattcgagatccgttcggatgaatcggccaccggatgatctgccatgttcaatccacgatctatcgattcggccgtataggtatagcgcagtcctgtaattaggggattttgtctcggatagtatagcgcagtccgtaattaggggacagtgggggtcactggctcacatgccgtcctcacatctgcttggttttagcttttttttttttttttttgctatgccaacacatcgcgaagatggaattgatatgagcttcggtcatcgtaaaggatttgataagatgcggctgcaggatacacgcgggactggatatttgatactagtagtaaagttgtttaacaatgttagtattttggatgggttttcaggtggattgttgggtttgtgattggagttgaccgaggttagtttatgatactggaatgctatatgttgtatcaatctgtctgtcaggaatcgatctgtagcatactcggtaaccgctatctatatggatggctgggcctatgtggttttgtggttttaaaagttccacatgtcactgtttggtttgtgataggatacagttacagggatgtgatttgtggctcttggatatatggtggcgggagctgggagctttgaaatgacagcaaagctgtattctgtgtcattagtaactttagagtatgattctatttgtgagattgattatctaataaaatgtggtgtatctttagacttctaggaaaggctttcagaaactttatcttcctacaaattctattattgtttatacttatgttttatttgtaataaatgctgcgcattacttatgcaaagccattccttctttgcagactgacattaatcaagctatttcgatggtttcttactttgcatcatcttcggaaccagcgcaaatccgaggcaaaactgtttacattcagtattcaaacagacaagaaatagttaacaacaagagccctggagagactgctggaaatgtgttgctagttactatagaaggtgttcaagcaaacgatgtcaccatcgatgtgatccatctggtgagttctaaattttagtttcttttccaacatgaaagtatttcaatgggtgaattagtaagatcatgaaaaatttaagtgtgactgttgctatatcggttgccattgactgaagggatccaagggagtctacctgacctgatccttgtaaatcaaagattttacatagctcttcatctcgtagtaacgtattctgcatgaatcagcaggcccatgttaacacggagaaaatgtcgttatcaacatctgcaattggagagatatcatgtttgttttgctgcctctgtcttctaactattacatctgaagtttttatgaactcttggggatgccattttctaattatctttcatcatcacgcttttccacggtgtagggcacctccctgtttatccaagttattgatgaaaggttaaattcccaacctttagaaaattagtacatctatggtgcttcttttgtgatcattttgtggttcttttatccatctattagcaatacaatatagttccattcgtccctggttcatctgtctaagatcttctgtcctctttgtctttttggtggacaaaaggataacctttaagagtttcctgccagatagaatatttaataattgattttatgtactacaactacaagatttttatatgtgctgccagttcctggattaattttctcttttactcctatatatgacccttctattatatttcaggttttctcagcttttggatttgttcacaaaatagccacttttgagaaggctgcaggttttcaggttacttgaaatttcaaattctgttaatatacttgattgtttacaaaggcgatcttcccaccttattttcttcccccgcaggcactgattcaatacacagatgcagccacagcttctgcagcaagagaagccttagatggaagaagcatcccaaggtgacatctttgttctctgtacattgcatcttttaatattgttcacactttgctcctcctataaactgaattcctctgagactttaatttaatgtaggtacttgcttccagagcatgtaacatcttgttgtttgcgtatttcgttctctgcgcataaggatctgaatatcaagttccagtcacatcgcagcaggtatcacttatatcttttttgccttgagttaatttacaaagatcaaatttcgcggttgttaagatggatctctatatgtctaggaggattgtaatatcaacatactacctggtaccatattttaatgtctacattaagatttatgcctaggcattgcaagatcatacctcatattttccctgcaaattcagaaatacgtgttctgccacatcatgggcattttacctttattcatctttcctgttcatcctgctgcctccttatatactgacacatgattactttgaaaacctggtaaaatagactatcaaccactggattccagatttgaatttgcaacctaatcgttggctaaaacaaagtagcttttttcatggggaaagggcatattcttccatagtatcacttggcttccatttttttagcctcttgctttttgtatggaacttccatatttgtatgagtatattactgcaaaatctttatttgtcaggggatccgtcttctccatctttgttccttatcttatttgccttgggttattattagatcaaaatgcttcttactatgtatcttgttaaacatgttttcttttttattttgcagggattacaccaacccttaccttccggttaattcatctgcaatagatacgttacaggtactactattggatatcaccaacatttgaataatttaattgtctttttttttccatttatatgaacctgcctttcatataaa

SEQ ID NO: 11392 - DNA, 2798 bp, Oryza sativa
ccacctggagctgctgctccaaaccacggcacaacagggcaagtgccaaattggaatcccgggaactctgggtatgctccagctccaggagcatatccaggtcaaatgtactcgtcaccaatgcagtatggcgcatcagggggcttctctgctcctgctgccccaccacaagagttgcatacttcgcagcagatgccgccgcctcaatatggaaatcagcctggaccagcaggtgcaccaggaaccgggcaaccacatccatattatcgctaaatttagattcctattcacaactggtactatgccctttctaattagtaactttgtgtacctttgcaatagggcaaaaccagttccttttccctgtctttcttctcatggaaccttttttataaataaactcttcatccagttgttctcatccgcggcacaaaatgaagggttttcatcgaaactcatcatagttttctcccaaaggtaactttgtatattcctaatatgtttatcgtcagctcgttggtctgtatcttggaatttagtattccctcgttttttacttgtcactgttgtgacaaaaaaaatcactgctttaactttgatcaccaatcatttttttaagttgaacaaatccacatggttacatttatatcagacgcactttgattaatatggtactatttttttacaagtaaagtgcacaagcggttattaaacttataaggttatgtcatttaggttcctaaactcttaaaatatagatccaagttttagaacttgtcaaagtgtcatttaggtcttaaaacgtcacaacctctttaggatcttacgtgacgtgtgacgttgatgtggcatgccacacgaacatgacgtgacatcatcttgaccggcaaatgagacctagatgagatattttgacaagttttggaaattggatttgtatttgagagtttgggaatctagatgatacacccttacaagtttaagtatcacccatgcactttactcattttttaagtactaggaataatgcccgtgcgttgcaacggtaaagtcgtttgttccagtggtacaacaaaagccaaagccattttctccaatggcacaacaatcattaggagctgagcgataaattaaaacattggtaccgctatacattatattgaataagttaattaaaatccatacttggctttgggtcgaaagcccattctttcctttctttttagccgcagcccggttgtaagatttccataataccgttgggccaaaatagagtgaaatggcatgattgaaataaaatatattaattgtgcacataaataaaaatctattccttaatatcgtagacatatatggaacaataaaatattaaaacataacgtgacaattaacacgcataatttcataggattttaattgtatctcactttggggctataaataaagctaagtgtcaaaatgtcataaaaaacatataatggtttggccaaaatgaagctaaattaacattatatatgaataatggaaataaattaaattttgttgccaaatttattgttggttccatttagctacatatatgatcttaattgcacaagaaagtttataatgcaactttatgtcatcaaataattgcttaaacggattaaaatgctcttatgtaaagaggaaatcattaattcggtccgataataacggaaaatcaatttggcccgaagaccggcaacggctcggaggctagagctggcacgtgatcgtgcggcccatgaggcacgcgaagcccaagcgcggcccgttagcgtgagctgtccgatcctgatggatggctacaatctctgatgggtggctgatgcagtgtgggagagtcgtgggtcctctaatgctgatcggacggtttagattgatcaacccggataaaattgccaccagccgaaaccctaaccctattaccctctctccctggccctattttctggtgctaggcgaggggtagtggtcacggcgacgccgacggagcggcggcgatgttgaggcgccagtgtgtggcgaacctgatgtcgagcatggctccggcgaggccagggcggcggcgcgcagtgggatgccatggccaaggcgacggttcatgtgagctgaggccgtcggcatcgagcgaaatggcggcgatggtggtaaacggcgtgctgcgagctgataccatgcgtcgatccctctctcccacctcagttctcctcctcgacacggcgcaagactacaacaaggcgagcctcgacctcgagcggcaaactgaggcggcgctcaagttcgagttctcctcctcaacatgacggctaagggatgcacggcggtgcgtgtagctgtacaccagtcgcacgaagatggttgagagttcggaggtgcgcacacaggcggagctcatgccgtgcgccacgaagtccgacgaactaaccctaatcccggtgagtcttagggttttccattgagctggtgatttgcctgttcggggttaactgttcttaattttgggaatttcttaggttagggttcgtatttttcggaaaaatcaaaataagggtttcgaatttgggggatattcttactcttataccgatctgattcgcctcctcgtaacaatctcttattgtacttttaggatcggtaggacttaaggtttaggtagtgacaaacgaacaaagattaagtttccttatatatgagctaggggattgggggcgagtccatggcgtaatcggatgtgctagtatacgaatgaaagattaccgcggaatcgacggatg

SEQ ID NO: 11393 - DNA, 716 bp, Oryza sativa
ttcctgcagcccttgtaaaccttaagaggctgtcaaatatgctactgattattatgttcattagcacagtagcatgggtagtaccgcttactacaactgtacactatcatatcgttcacttatattgttcaatcatatcccctcccttctctctctaactggtgactgtagcatcacaatgggtcttatcatgcaactcattatcagcagtattacacattgtaaactaatatgttaatgtggacatgcaaaatcacctccatattgtagtatttgcagaaatatatcttttgttcacacatttatcttttgatatgtggcagatgatggaggttgagctcaagaagctggaggatactatcaactctatccatgaagaaatgttttatcttcgcgcaaggtatggcttgcaatgataaaacatttctttgtgaaattcaatatgatctcttaatcattattatccgtgtttcatttctctagggaggaggagatgcaggaactgaacaggagaacaaactcaaggatggcttggcttggtttcttctcactagctatctgcctgtcagtggcggggttgcagttgtggcatctgaagaacttctttgagagaaagaagcttctataattctgactcagaacatttaggcataaaattgtgtgatttctctttttatgcttaccaagcgtaaaattcctgcaagggacagatgtta

SEQ ID NO: 11394 - DNA, 613 bp, Oryza sativa
tagtagcatcaaagtctccagcaacctgcacagacaaggtattttagaaatttaaatgggtggtgttatatccacaggtgagatgagaattaaagagaagaaagtacctcaaaactaatgacaccaccaaagccggtcatctgactcttggcaatgtgatgttctgggtgacttggcagaccaggatagtagacacgtgcaatctaaggataggaaataagagactcataaaaaacaacacaacaaaaagaactactcgtagcttcatagcttgtacaacaaatgaaaagtgcagagtttgcaaacctttggatgttcctctaaaaattgggccatccgcattgcagtattattctgacattgtacacggagatgcagtgtcttcatgcctcgaagaatcaagtaggaagcattctggtatcataatggcatgaaaagttaagagacaagagaccagaatattcatcaacagtataacatacagaaatagaatgcaaagacattcacaacttcaattcaaatcgctttcagacattcacagctgcagatcatctattatagtgtgttatctatttctgtacaattgacgattttaattacagaattacctaac

SEQ ID NO: 11395 - DNA, 792 bp, Oryza sativa
  unsure (1)..(792): unsure at all n locations
aaagtcagtgttatgtctgcacttctcttataatgtatctcagttgatctttacaatatccattattgtattccagcaatatgggaatatccgaacactttatactgcaacgaaacatagaggttttgtgatgatatcttattttgatatccgagctgcacgtggtgcgatgcgtggattgcagaacaagcctctgaggaggagaaagttggacattcatttctccatcccgaaggtttattatgttatggttcactttcaaatgcttagtccctttaccataaagtacttagcagtttgccatgttgattttgtaggagaatccatcagataaagatttaaaccagggaactctggttatttttaacttggatccctcagtttccaatgaagaagttcgccagatttttggaacatatggggaagtaaaggaggttaggatgttacttccaatttttccctttgaaatatgtttttgcttgaaaattgcatgttcttacgttcttcgtatactttgtttctgttttttggaattcaatctgatggtgttagtttctatccacagataagagagacaccaaataaaaagcatcataagtttattgagttctatgatgtaagagcagcagaagctgctcttcggtcactgaataaaagcgagatagctggaaaacgcataaagtaaaaaccaagtcgtcctggtggaacgcgcagaaagtatgattatgcgttttctttccctatccatttttctgtcntgtgcttggggtgcganctgcattcctacccgcg

SEQ ID NO: 11396 - DNA, 741 bp, Oryza sativa
  unsure (1)..(741): unsure at all n locations
actggccttgaatgacgctcggctccctacnncgcncgcgttctatgaaaatatccgtccaactgaaaaaccaacggggccttagtttctcacatgcttccgtacgcctcaaccaattctgattctgaaaccttatagcgagatgcatctggacatacagaacgtacaaaggttcattgcacctggacgtacaaggttcattgcacctggacgttgtaaaaaccaacgaacctagccgcgcaaacgccccggcgtccacacaccgaaacatatataaaaccgcctcgtatcgtacaagacgccaatccacccgaacctgcaacggaaaaggaaacggctttgccggcacacggcaacaaatcttgttcgcgcccccgcgtgcagtgctcgtttcgatcgaggcaacccggcgatcgcgcgccgcccgattggcgtgttggatgggagcgacacggccgtcgccgatggcgtacaagaaggccacgccggtgctggacgagccggcaagggcaccgttgcgtggcccgttcgccagcggtgccgcgtccctccggcgtgatcaagacgacgacgacgacgacctcctggtggatctggtgcacgagttctacgacgacggcgagcccggcgcggacgccacggcgaggggcggcgtgtcgtcttcgccggagcccgagcctaccgagtggaaagacnctcttcgcgaagcgctaagcgacgcaacgttcgacgcgggggccg

SEQ ID NO: 11397 - DNA, 740 bp, Oryza sativa
  unsure (1)..(740): unsure at all n locations
cgtgacattggtggagacattgnaccaccncaccactgatgatgttctattatcgagagaagaaaggtcctttcggatgtggatcaacagtcttggggttgactcttacgtgaacaatgtttttgaagatgttcgccatgggtatgagattattcgaatgagcatttgtgtctgtctccaaatgaattgggcacttacatcctttctcatgcagatgggtacttcttgaagtactggacaaagtttctccaggatctgtcaattggaagctggcctcgaaacctccaattaaactaccattcaggaaattggagaattgcaatcaagtggttaaaatcggaaaggagttaaagttttccttaataaatttagctgggaatgatattgttcaaggtaacaagaaattgattgttggtgagtgtgactgaatcaagtctttttagtggtttctgattgatgttatctgttcagcacacaattgaagccatatctgttgtttttcagcacttctgtcgcaattgatgagatttaatatgcttcaattgttgaatagactgagatcccactcccaaggatcccaaggaaaagaaattactgatgctgatatactaaaatgggcaaacagcaaagtgaaagcttcatgaagaacatctcaaatggaaaagcttcaaggtgttattaaatttcttgttaaattagtatttagtttgttggtaagatcacctacagctaatgaaatt

SEQ ID NO: 11398 - DNA, 706 bp, Oryza sativa
caaaacatatgatataaagattaatgaaatattaagtagactaggcctaaaaaaaattagtgcacacttaagagtgaatttccatacatagagaaacataaatatttggtattatgacaggtactgtctatactgctgactcataaagtacaggtatgcttacccactgctgccagaacgaccactatatccaccataagccccataacctcctccagagacctggagaaattccagtcgaagttttgataagagtctgttagcatgaagaggaaaggaagggaagtgaaagggaagctatacctgggagctgccataacttgcatagctgtcaatagggccaatatcatctgagccacgatatccacttgaatatggataatcatgcccaagaggcttagtatctctgcctagatactttggcccttcagaaacaccaactggaagaggatggtaagggattacaggtgggaaacctgataaagcaccttctctttcaaagaaattggctttcagcctagtagttatttgcagaagagcatgtcttacaacatcaaggtctccactgatctgttgtgcaagcaaattacattggtgaactcatcgcagtacaaaagaccagtaaaaaaaaattaaaacataagtttaaattgtacctgaaccatctcttcgtcttctgctgctacttttggtacattctccttag

SEQ ID NO: 11399 - DNA, 979 bp, Oryza sativa
acaggccaccccagtcccaacattgttaatttacatgatcgctgcagcaatcgttagtgataattataaaacgatcatatacgtgtgaaacatttatcttcttttatcttctttcttttttatatggtatataagggtagaatggtcattttgttcataccgctgcatgcgaggatgacttagcatgctcacatggctttttttttttggtcaaaggactatattaacccaaatgattaatttggaggacttgtttggacgatttgaaacctcaagaactaaactgagcccaaagcgaaacttcagtgaccatgttagttattcacccttaaaaaaaaggaataagttcacttggtgactctcaaaagtgattgtaatctaatccgtgaccctaaaccacagaaccggatatcttgacccccaaactatggaaatcggtacaatttgactccctcggcggttttagagggcggtttcgctgatgtggcgctgacgtggcggtattgaccgggtcttttttacacgtggcgttgacgtggcgcttaggtggcatttcaattaaaaagttatacgtgggacccatttgtcattcacatacacaattgtggggcccactaacatgtgggccccacacgcatcttctccctttcttcttcctcccctcccttctctctttctttctccctctcctctacgccgtccgtggggagcgagcggcggcggcggccgtgggctggagctgaagcggcggccgctcgccgttcctctcgcaccaccaccacccgcaccactcggcggccggcatcgagacgtcgtcggcggccgagcggcggcggcaacagcccacgggcagcggcggtgggcggcggcgggcgggagaagcagtgggaggacaaggggaacggcggcgggcggcagaagcagtgggaggacgaggggaacggcggcaggcgggagaagcaggccacggcggcgactt

SEQ ID NO: 11400 - DNA, 1775 bp, Oryza sativa
ataagattattagagatgtaatattcgaaacttaattagacttagcatatatgattatctaccgtacaaatacacgacacttagacttagcatatttgagtgttagagatagttagagatttaatataagattattagaggtttaatatacgaaacttaattagacttagcatatgtgagtgttagagatttaatataagattactagagatgtaatattcgaaatatatttgattgttagagatttaatataagattattagagatgtaaaattcgaaacttaattagacttaggatatatgattatctaccgtacaaatacacgacacttagacttaacatatttgagtgttagagatagttagagatttaatataagattattagaggtttaatatacgaaacttaattagacttagcatatgtgagtgttagagatttaatataagattattagagatgtaatattcgaaacatatttgattgttagaaatttaatataagattattagagatgtaatattcgaaacttaaatagacttagcatatatgattatttgagttttaatacaagattagtagagtgttaatattacgcttagcaaatatttcttctatgaacagatggctgatcgtgatgaggaacagatactgtacgatacaatcgcatcgggaagcagctagtactggaacgaagaagaggggaacgaggatccaaaccagtacttgaacgaggaggggaacacggagagggatgcagaggggaacgaggaggggaacgtggagagggatgcggaggggaacgaggaggaggctagtggaagtcatccctccgctggacagaagagggcatgcggaaaacgaggtgccgcgaagaagatagagggtcggcacatcataactgaggtggacgcagatggccgacgtagtgccccggcacaagcagccaagaattttgtacgccacagcggttgggttgtgagggataacgtgcctgtcagcaaggtgtactggcgcagaacaagggcacgcaggggtgatgacagctttgtcccggaatcagagaaagagatgctgtggaccacaatgctcgagacgttcacgctccctgcaggtacagagaacatagtgaaatagtggactcttaagaaaatggcagaacagttccagaccttcaagggagatctgtaccagaaatacatcctgaaggggcagacaccgaacttcgacgtattcctgaagctatgggatcactgggacgagttcgttgcttacaagacaggtcaacaagggcaggcgatgatggaaagaaacaaagaaaatgccgctaagaagaagtaccatcaccacttggtgtcaggcggctatagcgtcgcgatgccgaagtgggaggagatggaggcaagcttgcttgagaagggtatcgaaccggccaccgctaaagggcctgatcgatcgaagttctggtactatgctcacggtggaatgctcaacccagttgatggctccttggtcttcagcgatcagatacgcgaggctgcgaatcgactaacggacgcagtggaagcctcttctcagggcatgttctgacccgacagagagaaggacgagctgtcactcgccctacagactcccgagcatctaggacgaacacgagggaaaggcgtgattccctggaagatgggattcaaggaggacatccacacgtacaagagtcggatgaggagcaagagagataccgaggcgaagattgcaaatcttgagtacagggtat

SEQ ID NO: 11401 - DNA, 656 bp, Oryza sativa
caccgtctcctcctgggtagtccaactcgaggtcctcgtacacggcttccaccagctcaactttaaccctcgagtatcctgctggaatcggcctgcagtggtaagtccctgaaatgtccgttgggatggccattcccaacgccaccttcacgtgatgagaggttatctattagtaatcaacctaagtagcaacttgcggaatgtacgagtcaaaaatcatatattacatcgagtataccttgattgataagttcttgaagggaatatgcagctcacatggtgtccgttgcgtgatctcatcaacggggcaggtggtttcgtcctgggtttgcatggcgtccatgctatgtgatactacctgccccattgaggcgcagctgctatgattgcctgatgggctgaccattggaggaggtatgtacggctggggatcgtgtgaccgatgtgctgccatgcgttcatccaccttccgggccacctcctcttgcatgctgagctcgtagctcgataccctgtactcaagatctgcaatcttcgcctcggtatctctcttgctcctcatccgactcttgtacgtgtggatgtcctccttgaatcccatcttccagggaatcacgcctttccctcgtgttcgtcctagatgctcgggagtctgt

SEQ ID NO: 11402 - DNA, 1174 bp, Oryza sativa
taactaataaaaatggggttacacttctggattgaatgaatttataaactctaacagcagttccaattccacctaactttcagaaattcctgttaacacagttgcaaaaaatagggtctggcaggtggtgtgctactttttgggctaattcttgaaaatgattcagttctcctaacctagcctttgtgtgatttgtagtgccctacaactattgtacctttctttggtgaccaaccattctggggagaccgagtgcatgctagaggggtagggcctctacctataccagttgatcaattcagcttgcaaaaattggttgatgctataaacttcatgatggagccaaaggtaacatctactttgcaacacaattcaaatatgttcttaatgttgctgttatttttgttggtaagatgtataaagacaacaagaatatggatcggatgtatatatgttgtcaataggattgcgaatatatagatttcacccctcgtagatatgctgactagctggtgcattttaacttggttctaatgcttcctctttcatacataacatgatatcttccattcaaacatgtttaaccgtccaacaaatgtaaatagttaacagggaatctactacctccgttctcaagtagattacgtcttgagatcttaaattttaatatgctaaaaaatatttggatttgatatgtgaaaatggtattaataaatttataatgaaaaatactttcatatatttatgtttcaattttttgtaaatatatagttgaaaaaggtagcaatggaacatgcgcatcagggactgttgatgtgcaaaatgtctagtaaaaaacgaacatttgcttcaccgaaacaaccaacattgcatatatactgctcctactttgtgacaacagagttgctcctgcactgtctgtcttgaactcgctagggtttggaaaaccagtgttctctggagccttatcctgtttggtctctatttgcttggctggttttctctttatttggatctgcttgtatttgcagtttgaccagaataggcattatatcacctgttttctaagattatatattatatcactttttgccttccaaattaatggaccagcttttgtgctggaaatcacctgtttcaggatgaaaaccagaactggcaatatccgtttttt

SEQ ID NO: 11403 - DNA, 7872 bp, Oryza sativa
ttcctttttaaaataataaaataatctgtagatatgataataccatttggaattgaacattaccttgtgctggaatggttggcaataggcagtagtagggtatttttttccattgcacaatgtcgtcaatttccactgttgtcccagatagccgctgccactactgtttcaatacaatctgtaccaagttatcatagccattatctgctgtgtaaaccagccgatatagatatatatatatattttacttttatgtactttttatgtaagtgtcaattaacataaatcgaaatatttgatacgatgttgaaaagtactaattttcccatagcgtggataaggataaggggatactatggtctatggcatggtggtgtacattgtatgacgggtctgcttcgtacctgatcaatgactttgtcgggtgtcatatgtaattttaggtgaaagacaatgccgtggagcttgccaaggccatggaatctgaagatggtgtgtcaggtgcagtcagggcattcctcagacatctaccttcaagagcagaggaaacagcacctcagcagacatccagcttcctggaattcttaggtcctgtaagtaaatgtcttggttgctcataggtgacagtgaggcaattacacaaagaatgccatttctccctgttgaaagaagagaattttgaacatccctgcaaggatcaggagaacggatttcctggagagtgtgctttattatcttttatttttttcctttttgtgtattttttctcttttattgtgtaaaaggtgcttgtctatacatcattttgatgtgcatcgttgccctgctggtcctgcaacaagtaaagaatctcacatgtacgaccagtcctttctgtgtatatggagagaagtggagaggcacacgaatagttgagttgtcgattgctgcaatgattctaaccaaagcttcaggtttattgtattggtcatattgtaccttttataccattttctttagttctcgttttatgatatctttcatgtcatggcattgcaaactatagtagcattgtacatgtgccaataccacctaggggcatctctgtctgtctctagcagagtattaattcttgtggatccaacagtactagcgaacagcagaaacttgggtggtctaggcatatgttcgatgatgttttgcggtttgtcgtttggaggacgaacacaacaagatgggtcactcatgttttgacaacaaatgctgggatgtaggccgtggcaacttggcaaggccgcttgctccactcgattgtacattttctactgactgtaccctccctggttgtgttggatggcaacatttgcagctaaaatctccacaacttttgggcgttattgtcttggaaggtcataagatcgtgccaagtgggctgtgaaagtgtaccatgataggaccatggcacgtcagcctccacgtgtactgtgagattattctatgtggtcgcaattatgtaaagtcttggacatcgacactgtcttctatgggctccttcggaacaaaggggaaatggaggaattatcaaagattgaattcttaggggaaataattcttatgtgattgttttgaataaaagaatgactctgaaaagcatcttcagaattcctacggaatgggccatttgatggaattttttttttgaggaaaactaacatgaagtcttacctcgtggtttctcttacaaaaacgccacacttaggtttttagcctttggattagaatacaagagctgatagtggtcgagtgcatgagtacaccaagataggtgtgtgcataggataagttgcctagatctcaccccaaaattttaaactctgtcatatcgaacgtttaaacacatgcgtggagtattaaatataggctaaagaaatagctaatagcacatattgcgactaatttgcgagacggatcttttaagcctaattgctccatgatttgacaatatggtgttacaataaacatgtgctaatgacagattaattatgcttataataaattcgtctcgtggtttactaacggatactgtaattagttcttttattagtgcctgaacaccccatgcgacaccctatataatacctgatgtgacacgccaaaactttacacccctgtatctaaacacctcctagtatgcaaacttcatcacataataagtggcaacctattcacattttttctgtttcaaccacttttgatttaaattaattccttcccattttatcattcatcatttaaattacatgccatcccactctcaatcccatccgggcatttaggtaattcgtttgtcctactaatttggtttttaattaaattctacaactgcacttaatataagatggagagtactcttgtacttttttttcctgtctagatttacatagtagtgtaagttacatttagttatagactgctatattctaggatgagagagtatataaaaaataagcaaaataaactaaatttatacaaagtcacatcgaagtttgcctctcagccgctaccaaaattaaaaattgtgaagcagaattttagtttctttattggctaagaataaaacgaccaccgcgccgcgcggatggccggccagccgacctcaccacctggtgtcgccgccggcgacaagcatcgccttcccgctgctcgctgcggccaacaggtggccggtcttgcctatgatttatcgacaggcagcattgctagctaactagctggctacctagaaaacgtagctgcttataagctattttatctgtttgttattagggaattggtttttagctggagcagtccggaggcaggcaccatcctcagcgttccactaagttgacatcagataatcatgttatgtattttccacggtcaagattttcttttcactacaagtgaaacataatccaccacacggacgcttgctaagagcatgcctagcagctcatctatcatgttctccattgaaaaaatggcatatggagggaaaaaagcgactctagcatatatgctatccaggcctccaaaaatggtgcatacgctatcccacagagagaaacaccaaatttatatttggcgtttctctctcctcacgccatattgcaaccgactcctccagatcaagctcccgcccccattcggatcaactacccctgcccctacgcctgcagcacctccaattgcgacaacttcggcggccctgtgcgacccgcgctatcacctgcgccgctcacgccctcccctaggaggctctagcggcccacagtctgtgaccagtgcacctctcgtgctgagccgctgacccaactccgatggccctgcaccacccgtgcccatctgcgtcgctagctcccactgtcgcccctctactcggttgtcctagtccacccttcccctcttcctcttctctggatcgagcacccgggatgaacctgtcatagagaaaagatgaagagaaatatacttttaccagttaggagttgaaagatattaataaaatataaaaaggtgtggtttattgaagatgtaatatgaatgatttgttggagtgaaaagagatatagagatggatttttttatgaccattcaaatggtaatatggtagatcaggtttggatgagctaggacatgctctaacatgttagaggtagcgggagttctaaaggttgccaaagacgaactgcgcgctaattacaagtcaggaacttttccaaaatgtaactacaagttccccgtcaaatgccaaaaaaaaagctgatttctatactcttacctactattggttcacaaatggaagagttttatcccttcaataccccttacctaccaaccaacccaccaatactactttcatattaatgagatatgccaattttccctatatcaaatccctattacttatgtacggttttattcgagaataagtagaggcaacgcgacgagcaagggacaagacgagcaggtcgccaacggcatacggtgcagatcggcaaatggcgtagcttgggtagttgggcgagtagtttgtcaatttacttgtcaaatgaaaaagaaatactgcatgctctcaaaatatagcaagtgttaagctataaatctgaacacatatttgtccatattcataaccaaaagttggttatatgcatggtagaaaacaggaccaaatctaacaaagggcaatcagttaagaatctattacctccatccttcataaaatatagctacagctagaaatagccatattttgataactataaagtgaggtataatagaaggggataaatctcataagcaggcctcttgatcactaacaatagaaagataatgacatggcggatagctcggccgagacaatttaatgattgactacacagaagccatcatttgttgaacttaaaatcccacatccctaatcaaactgctacgtactatatgtatgtattgccaaatgccaatcagcaggcttgtgcaaccagcaagaatctacgagatctcatggagtatcaaaacttcagttaaaatatatgatgccccgctagcaagtcctaaagcaaatctagtttagtgactgatggacctacctttcaaagtattgctgcgtgggaaacaatcaggtaacctattctatgttgtatcgttgcgaacaccaaagcaaaaaatctgctgttctcccgttccaactgcagcacttatttcttttcagggttgatgagcaatagggtaaagaaaaaactaatccatggtagctgtttccggaccaaaagtattctccagatggattcacttctgtggaggtgacggagatggaggcggaggtggcgtcggcgttggttgggacttgcatgccttgcaatcaatttgtggtgatggtgtcgtgttgtctggaattgttaccctaattgtttggtgtttcccatcgtcagtaggaacatcaaggatagcatccattaatagtatttcccagtcactgcgttgcaggaatgaaaaccaagactcatctgcaagaataagaatgacatgggattagaaataggctcctacaacatggatcaagacttgtagagactcaaaaaatatcaaaatcagttgtctaacaaaaatttcttcagttaaccggtacttcagttctgtatcaacatgatttttcaaagatagcatgccaaagggaaaaatggaaacaagatttcattggaggaaaaatctggaagtgatgaatttaagaactaacaggtcccagatgaacgcaatatcagtagcaacacgatagaatgtgctctgggcctcaatatgaagaaaaccatcaactgagcaatcaaaaacaccaatgggaccaaaagttacaaactactccctccatcccataatacaagggattttgagtttttgtttgccctgtttgaccactcgtcttattcaaaaaaattttagaattattttttttgacttactttattacccaaagtactttaagcacaacattttattttttatatttgtacaaattttttgaataatagttacaatagttattttaggctcacatcgaattggatacgggcgacgtaccaaaattccggcggaaacatcttcaatttttataatagtagagatatttgaaatggcttgaactgttattttgtaaatggcaatcagacaataggttttgttgtgcttactttgtttgcattgttgtgcatctctgggatagggtcccaactctgacaattttggcctgcctgcttgtgctcgtttgttgttagactgatttgggtggtaaactcaagtgagttactgtatgcagagagttagtttctggcttcattcagtgtggctggtgttcttgggagtgctctttaggttgcaagggaccttgatccaatttatagtaattcttgtaattaaataggttgcaattttgctgcattccctaaaaacaaccatgcaccacatgtcaaagttagagatcatctccctaactcacatcaagcacttgttgaaagattcatactcaaatcactcattttcttctgatctgatttgttatctaatcttcaaatggtttacacttgcagctttcttatcaaattgttgactctatgatttggcttggtatccgagatatgataaatgaatttaggaagaagaagctgaagttgcgtccggtaacatacctaagtggtgcacagggttctgggaatgacattcctcatggttacatctggagtcctcaccttgttccaaaaccgaaaggttcctgatgagtattagctttatctgaaatttatatgttatcccttttcacgtcatgcttaaccttgtcatccttcgattgtatagtttttaaaacttgtggaccttaatctggtcctatggtttcttttcatttgactttcttatagcattcagttgttgtattgaaaagagcttgcttgagtatttgctgtgataacactgtgaaccaagtcaatattagtaatgccaactgaaattggtagcctttcagtttgataccacatttttctaattggtaatgagcatgaaagtttgctactccctccgtcccaaaatataagaatttttgaactttgacacggtttccgagatgctactctgaccagcaatatctataaaagtaagatgttttaaataaaaagagttacatattatgatagtttgtttaataataaatctagtaacatcaattttacatgattatgaaaaaatatgggagagagtagagaggagaagtgaagaaaggtgtggagagcattctttttttgggtcatgtacctatccccggggttcttttgatggttagaggctgctggcctaaaggagtcagttgttttctaatgctgtaggagtagcaaatatatcaaaaccaccgaaaaaccaatggcactgtagcaataagctcatttccgatggcagaccgatgactgatgcaaactctggtggcaaatatccaattctttctaaaatatatcattaggaaaatgcttgttaagctattttatgctttttcagtaatcactgatgtgtataaggaactatcatatcctttcaataatatgagttgtaagatatggatatattagtgcgttaactgttaaggaaaaaaccttgaagtttcctgctcaattttggtgttaactgagcaatttttgttgttaattgtctgtaattctactgtgaattacatagtctattctgttgcagattggggccctaagattgatgttgttggattttgctttcttgatcttgcttccaattatgtgcctcctgaaccacttgtaaaatggcttgaagctggtgacaagcccatatacgttgggtttggtagtcttgtaagatcactttgatctcgatttgtattattagaggttttcagtttttgttcccctgttctgatctaggcatcgtttgacgtattatgtttctactcttctatgtatgatggcacaattagttgacctttacttgtactatatagttaaactttgaactgcttgtctaatttgataggactgtgtgcatgtgttatcatttctgtagttgtccaaatgacatcggtggttaatgcagcttgtggattagtggaactcatatttattttactgcatgaaacaacactttacagtgttttcactttttaccattgcatatttacatctagtagtacactgttatgtcacttatgaagcttagcatagcatctcatggcaaacaatagttatgttattcacattagtttatgtcttactctagaaaatggtatatggacgtcaggagatcaaattgttatggaaaccataactttgatgcaccagagaagcttgg

SEQ ID NO: 11404 - DNA, 618 bp, Oryza sativa
gatccccgaggcggccggcaactgatgctgctccccggagcactcgtcgttgtcggggctgctcccgaggaggtcgaaccggaataatcctccgccaccgccaccgccaccgccgcctccggcgtccccggagtttagcaccgaggagctcgacgtgccggaccgttccggcgactccacattgagatccaacaacatctccaatcctcaccacaccggcaacccaaccaaacacttccaccctctctcgctcttccgacttcgatcgagttcaactcaccaccaactctcctcgccttctgcttcaccctggctatagctcagctcgatcgttggcgcctcgactgacgacgactcactcaccggcttcgagcggtggcgaggcaggagcagcagcaaccacagcaccaggtggtggtcgccatggggggttggatgaagaagaagaggaggaggagagagagaggtggggagcagcgggagaaaaggaaatagagagagatggatgggacgtcgaagtggcggaggagggtatctcagggaggagatgagaaactatcgcacaggggattagaatttcgctacggccacacgcgcagcggacgccgggctgcagga

SEQ ID NO: 11405 - DNA, 6274 bp, Oryza sativa
caaaatttcttcaaaaaagaggggaggtcatgccaaaatttatagtaaatttactttggtgattatatacaaatcggaggtgcctaaaaggttagcaacttcatcctccaatgttttttttgtcatttgcagctatgttttgcatacttttttgtctccaaaattttgttgtaagttgatgagagagaaaatttgtgtgggaaaagaaagaatatatagaaattttgtttatttgctaaataaggttttataaaataattgagtaggaaaatatagtgaaagttaatcttaaataaaagaaaacaaactaaattgaaaactaaaagaatttaaaacttaaaaaaaataaataagaattatttggtggaatattttataatttttgtatgaataatgatatgtcattattgtatgactgttgaaagagtttgtgattattttgtcattattgtatgattgtcattattgtacgaatgattatttgtgtacgattttttttgcatttcatgtagatggatcggcaatggatgtacactgaccggcggtccaaagagtttattaacggcgtgcattattttttgagagtggccgaagctaacaagcagaagggttttatttgttgtccatgcaataagtgtaagaatcagaaggagtattctgcatccaggactattcatttccacttgtttgagtcggggttcatgccaagctataattgttggacatcccacggagagcaaggggttgaaatgaaagaagatgaagtggaagacgacaatattccagactttgctcagtacgctgaatttgaaggaaatcaaacgggcgaggaggacatagatgctgattataacgacgttgcggatgatcttagtcagatgttgcaggatgccaaggaggactgcgaaagtgaaaagggggcccataaattggacaagatgttagaggaccacagaacgtcgttgtacccaggttgcgagcagaggcacaaaaagttggataccactctggagttcttgcaatggaaggcaaaaaatggtgttagtgacaaggcatttggcgatttattgaaactcgtcaagaacattcttccggagggaaacaaattgcccgagacaacgtacgaggctaagaagatagtctgccctctaggactggaagttcagaagattcacgcatgtccgaatgattgtatcctatatcacggtgaggagtacgagaacctagaagcatgccctgtttgtaaagcactacgatacaagattagacgagatgatctaggtgaggttgatgggcagctaacgaagaagagaattcctgctaaagtgatgtggtatttccctataataccacggctaaggcgtttgctcaggaacaaggggaatgctagaatgatgtgttggcacgctgaagaaagtcaacaggacgggatgctgagacaccccgcagatggttcgcagtggcgaaacattgatagaaaatttaaagactttggaaaggacgcacgaaacatacggtttggtttaagtacggatggcatgaatccttttggagagatgagcagcggccatagcacttggcccgttacgatgtgtatctacaacctcctcccttggctatgcatgaagaggaagtacataatgatgccgattattattcaaggccccaagcaacctggtaacgacatcgatgtgttcctaagaccactggttgaagatcttaaactgttgtggaagaaggaaggtgtccccgtgtgggacgaggacaaacaggagaagtttaacctacaagcgctactgttcgtaaccatcaacgattggcctgcacttagcaacctatccggacagtccaacaaggggtacaaggcttgcactcactgtatggatgaaacagaaagtacgtatcttaaccactgtaggaaggttgtgtacatgggtcatcgtcgattccttgcagcaaaccacccggtacggaagaaaggcaagcactttgaacatacggcggaccaccgtacgcagcgggaaaacagtgtttgctatggttaaagatcttaaagtagtgtttggaaaggagcctggcagccagcctatagagagtgaagatggtcacgcggcgatgtggaaaaaaaactccatattttgggagttaccctagtgggaattcttggacgtccgccacgcaatcgacgtgatgcacctcactaagaaccttttcgtaaaccttcttggcttcctaggtgtatatggaaagttgaaagatacactggaagcacgtaatgatctgaagcatatgaaacaacgcggcgaccttcacccggaaccacaggagaaaggcagccattacttgagtccagccagctacactcttagcaaggcagagaaggaaagtatgtttcaatgcttggagagcatcaaggtaccgtctggatactccacgaatataaagcgaataataagcacgaaggagaagaagttcacaaacctaaagtctcatgactatcacgtgttgatgacacagctgctaccagttataataaggagtatcctcccagacaatgtccgggtaacaataacaaagctatgttctttcatgaacgcaatttcgcagaaggtcatcgatccggataggttagaagcccttcagaatgatgtggtgcaatgtcttgtcagctttgagttgatatttccaccttcatttttcaatataatgacgcatctgatttgtcacctagtgaaagagatcggtattctcgggcctgtgttcctacacaacatgtttcctttcgagaggtacatgggcgttctgaagaagtatattcgtaaccgtgctcttccagaggcaagcatcgccaaggggtatggaacatgggcgtagaatttattgaagaccttcgcccaatcggggtacctgaatcacgccacgaagggagactacggggaaaggggactctcggaaggaaagcaataatgacggtagacaacaatttatttcataaagcccatttcacggttttacaacaatcttcattggtggctccttacatcgaggagcacttggctctagttcgcgccagaaacatcggtaagtccgatgcatggattacacggcatcacattgatactttccccgcatggctgcaacaacatctcatgggtaacgagacgattaaccagtaactggccttcctggcaaggggttcatctgagtcgatcgcgatattccagggatatgagatcaatgggtacacattctacacaagagcccaagacatgaagagcacgaaccagaacagtgctattcgtatcaatgccatgggacacgatggtacaactggcacatattacggagccatcgaggagatataggaacttgactatggacctctcaaggtccctctgttccggtgccaatgggttaggttgactggtggaggcgtaacgattaatgacagtgggatgacaacggttgaccttaacaaggttggatactcggacgaaccttttgtccttgccaatgatgtaacgcaagttttttatgtgaaggacatgtctagcaaaggaaagaatggcaaagggcctgacgagccgaagcgccacgtggttctcccaggcaaaagaaaaatcgtcggagtagaggataagactgacgaggattacgatcagtttgatgggcaaccccctttcacggtgacggttgaccctagcatcctcctatcaaacgaagacaccccttactcatgtagcgatcacaaggaaggaacaatagtgaggagaaagtacgtgcggacaaccgtcaccgctgatctattgccgtaattgttgtaaactaatttggatgtattgaatatgctagttatatatgattaattacaatttttaacaatttaatatcatgcatatactaattatatatgattattagaatttttaaaagttttaaatcatgcatatgggatttacatatgttagttacaatttttaacaatttaatatcatgcatatgctaattatatacaattattagaatttttaaaagttttaaatcatgcatgtgggatttacatatgtttgttacaatttttaacaatttaatatcatgcatatgctaattatatataattattagaatttttaaaagttttaaatcaagcatgtgggatttacatatgttaattagaatttttaatgcattatttactattttagaaacacatatgcaacgaaattcaatattcagtgctattaactttagtcctgtttcttaaccctaaccaggtttaaaaaagaatttgaaaatagcgggaaaatatctttactcccggttcttctcaccaaccgggagtaaagatccgggggtatatatattcccggtgcgccctcgtcttctccaccaacacttagacgtttttccatcgagatcgagcatcggcttctccttcgtcgccactgcctagcgctaccccgcgccgacgccgccgttgtctctcaccgtcgcctggtggtcctcgccacctccgccgcagacgccgtcgccgcgtctcttgggtgagagccctcgccctctctctctctttctcgatgtagctctctgtctctctctctttcgccgacggacaccgacgacgccgacgccgacgtatgccgccgggccgctacgttacgctgccgccgcgcccccatgccgccgggcccccatgccgccgccgcggcccgccgccgccatgcccccacgccgccgggccccgcccccgccgccgcgagacgccgccaccgcgagatgacgccgccgccgccacgcccccacgccgccaggccggcccacggcgccagaccacgcccccaccgccgcgagacgccgccaccgcgagatgatgccgccgccgcgcccccacgccgccgggccggcccacggcgccggaccgtgcccccaccgccgcgagacgccgccgccgcgaacgaacgcttaacaaacgtgactgaacgcgaacgaacgcgaacgaacgtgaacgaacgcgaacgaacgcttaacgaatgcgaacgaacgtgaacgaacgcgaacgaaacgttaaagaaacgtgaacgaacgcgaacgaaacgtgaatgaacgtgaacgaacgcgaatgaacgtgactgaaatgtgaacgaacgtgagtgttagtgaacgaacacgaatgaacgtgaacgaacgcgaacgaacgcttaacgaacgcgaacgaacgtgaacgaacgcgaacgaaacgttaaagaaacgtgaacgaacgcgaacgaaacgtgaacgaacgtgaacaaacgtgactgaaacgtgaacgaacgtgagtgttagtgaacgaacgcgaacgaacgcgaatgaaacgcgaacgaacgtgattgaaacgttaacgaacattaatgcacttgaactaaaagtgtgagaacgaacgcgagcgaaacgtgtacgaacgagataattaaactattgttgaacttagcatatatatatgattatatatacttgaaaacatgaaatacatttttttgcatgttgcagagaagacgtcgtcgtcgtcgtccctcaagccgaagtggtagctagccctcgaaggaattcgcgcaggcaagtgatgtaaagatgtgattgttagagatataatataagattgttagatttctaatataagattattagattattagagttaccatatgtgagtgttagaaattattagattattagacttagcatatttgagtgttagagatagttagagatttaatataagattattagaggtttaatatacgaaacttaattagacttagcatatgtgagtgttagagatttaatataagattattagagatgtaatattcgaaacatatttgattgttagagatttaatataagattattagagatgtaatattcgaaacttaattagacttagcatatatgattatctaccgtacaaatacacgacacttagacttagcatatttgagtgttagagatagttagagatttaatataagattattagaggtttaatatacgaaacttaattagacttagcatatgtgagtgttagagatttaatataagattactagagatgtaatattcgaaatatatttgattgttagagatttaatataagattattagagatgtaaaattcgaaacttaattagacttaggatatatgattatctaccgtacaaatacacgacacttagacttaacatatttgagtgttagagatagttagagatttaatataagattattagaggtttaa

SEQ ID NO: 11406 - DNA, 536 bp, Oryza sativa
acacgagcagcgcacaggcgcactagccagtcccatcggtcattcgaccggtcacagaacggttgagtgcactgcacgccgcattaaatacggcgtggcgcgatcgctcgggatgccataaatgcggtaggtgggcacctggaggcggacgcctaacccaccgtacgtggtgacctagagagggggtcgggggagcctgacccctagtcacgggagggggcggccgccgcccgacctcgggcccgatccccctcggggaggagccacgtggcgcctggggcggcattctccctctagtctcggccagggagtggccgccgccctacctcgggcccgacccccctcggggaagggccacgtagcattggagggcagcatcctccatccagtctctgggaaggagtggccgcggtcctaccttgggcctgactcccctcaagggagggccacgtggtatcgggaggcagcctcctacctctaaacctgatacccccgggcccatatcaccgacaatatatatatatatatatatatag

SEQ ID NO: 11407 - DNA, 687 bp, Oryza sativa
  unsure (1)..(687): unsure at all n locations
aattgctcttgtcgatggcccggtgatcacaaggtcatctacatagaccccgacgagtagagcagagccaccattgtttcgtcggtacatggcgtgctcatgcttgctttggtcgaaaccgagctccttcagagtacaatcaagcttcgcattccaggctcttggcgcctgccgcaggccataaagagccttgcgcaggcggaggaccttgtcttcttctccggcgacgacaaaaccagggggctgcttcacatacacctcctctgccaaatctccattgagaaaggcagacttcacgtccatgtgatggacgtgccaccctttttgggcggcgaccgcaagcaggagacgaattgactccatgcgcgcgacgggcgcaaacacctcgtcaaaatcaatcccaggttgctggacaaatcccctggcgacgagacgagctttgtgcttgaccacctttccggcctcgttcttcttcaatttatagacccatttgagtccaattgggcgatggccatgtgggagatcaacaagctcccaaatcccattgcgattcaccgcgtccatctcttcacgcatggctgctcgccatgcatcatcaccctccggctctgcaaacgagcatgggctcacaggtccagcgagggagcaagacgcctnctcgantncccgtttggcatccttggtgcg

SEQ ID NO: 11408 - DNA, 699 bp, Oryza sativa
tttactatggctggttttgccgatgcactgagaccggataaattcaccggtgtgcattttaagagatggcagatcagggtcactctgtggctgacagctatgaaatgcttctgggtgagtactggcaaacctgaaggagttcttactgctgaacagcagaagcaattcgaggaagccactactctctttgtgggatgcattcttagcgttcttggcgatcgtctggtcgaggtgtatatgcatatgaccgacgctaaggagttgtgggatgcactgaatactaaattcggtgctactgatgctagcaatgatctgtatatcatggagcagtttcatgactacaaaatggctaacaaccgttctgtagtcgaacaggctcatgagatacaaaccatggctaaggaactcgaactccttaagtgtgtcttacccgacaaatttgtggccgggtgcattattgcaaaactaccttcatcttggaggagtttcggtactgcactcaaacacaagagacaggaatactccgttgaggggttgattgcgtctcttgatgttgaggagaaagctcgggaaaaagatgccgcgtctaagggcgatggtgggcagtccagtgccaatgttgtgcacaaggcccaaaacaagagcaaggggaaatacaaagctcagcagaccacccacttcaagaagcagaagaagaac

SEQ ID NO: 11409 - DNA, 1666 bp, Oryza sativa
atagtatcttattttacaaattctcttcaaaagtatatgtctttcatgaagacaacaaaaaaattgtcacatgcaaatttggggcaaaattgaaccgtcccatgatgcaagtgtagtagtgcacaattagccttgctcgtcttcagttcttcacaagtttcaggaccagttccagtttgataccggtgttacctatgatccttcagtaactgatgacgacctggaactatataagtaattccagaatggctaatttgtgttgaattcattgcatggttagtatgaactcgttgtgattaacatgaactgcattgtccagttgtgagctgagacttctgaatcatgtatcaatgttcagatcgagcccaatgttcatcccgttgtacgcaattggcgcatacatccacatttcatcggagctgaggagctgcaggattggacaaaatatgataagtggatcttgttacaggataatggatgatatgaactgaactgtattctgtagatgctcaccttgatctgaagctgcaggaacttcacatagtggactgcctcctcaagcatggtgctgatatcaacctacaagatcaagacaagcattgttcttttagccatttggttcaagaattccatgtcatgtgagtgtaattggtagcacttatgttcagaagcttactttggtgccattgggcacaaggttctgaagtgtcttgagcctctcattgatcctctctctccttttctgattaagcagagaacttatgttagcatttttttttcacattcagttgttgaaaagattatgttttcaggagatgatcatgttctagtacccttgcatagaggctctggggatcagtggctgctccgcggccagcccgggatttgcctttcgaagtagcaccagcatctgcaacctcctgggatgaactggaatcattgtcagaaatggaacagctcccatttgggatggcaacacttgcatccttctccacagtttgcttggccttcttcgctcgcttcggttcagcctttctcgcgcattttgaaccctgcatttcgatcattccaagcgatttttacattagcactccaaacatcttcctgaaagataacaagagtgaagaatgatcactgatgagcaaggacttactcttgtttggccatcaaattctccttctgccgactgttttctcttgttagtcccactaaccgaatcaagatcctcgtggcccagctcgccattaccgaatgaatcaagggaatggtttgggatcacattcagaaactcagttgcaccttgcacctggaccatgctcaggtcatgtggtgcaatgctggagctgacacccagggcctcatttgagtcactgaagcagtatccttcatactcagatggagcaggaatgctactagcattgctgttgctgtatgcagtgctgctagcattgcagctatagtagcatggattggaagattgatcaaaccatgggagctgctcatggccttcctcctcaccatggatggggaatgcactgaagagttgcgccatcatctccgactcatcgctgtgcgatggcaagtcgaagacggtccagctcatatcggcgatcagtcctccaccctccattctgatgtgaattcaggacttggaggtagacaactg

SEQ ID NO: 11410 - DNA, 989 bp, Oryza sativa
ccctttagcttttgatatgcgccacatattgacatgggataccggcgcatacatggacattatctgaatatactaaggaaatcttccacagtgtttaagtcctactcggacaagaaagggtcgtcaatatatcgtgtagggtcagatgtctccaagttcgatttgagaccacctgatttgcgatataaaggggaccccgtgggaggacctaaaggatggaatctgatagccaacacaacccccacagcttaagaagtgggagcttgcaggagccaaatcgccggggatctagtggaatcaacttaattaggatttcgccggtttcatcgagttccattgttccttttgtaacctgtggttttccatcatataatcccatatcaataaaattagggttattacctatcaaggggcttgacccagtataatttttgtctttaattgcttgatgtcgtactacgtagatccttgtacaaacgtaccccaataccctctatatccggtctacgggtatcaccggtcgacagcttgatatttagcacatgtgtgttttgcttatcaaatccatattatacatacatgttgaaaatgccagttctaagtggtggaattggtaggttggcatataatatgtttgaagtatgatttggctcatcagtctttaatatttatttaaagccaaatcgtatgtgtttttatgggtcaccatataagatatagatttattgcaccatgaaagttttgcttattagtaattcggctaatatcaatggtcaatgtgatgatttgttttagagttattttatttaggaacattggcattgttaatattttgcatacacgctcaagccaattacttacatttgtagtttattggaatctatgcatgtgacacatatgactttggccattcattattgattatacttcaattggctaagtgttttgatgccatgatgattattgttttaaaagccatttgaattagt

SEQ ID NO: 11411 - DNA, 2770 bp, Oryza sativa
  unsure (1)..(2770): unsure at all n locations
aaccaaatgttggttcggattatcttgctagcttgggtaatgatgcaacaatcattatagccgaaccaagcaacggttcggagtgtgttactagtttagacaatgatggaatagccgaaccaagtgatgattcggattgtgttgctagcttagagaataatgccattgaagatatagccgaactaaatgacggtttggattgtatcacaagcgaaagtgaaatagcattgtcacctaagaccgagtcacaaatcggtcgtgtggatgttgaaaagatgatgacaatgtcttgcggaatagtagtgaaatagaatccaaagtagccatgcatacatatcaaaggccgtatcctgaacacgtagattcggtcccatacccgcaaggatttgaggtgcccaacttcacgaaattcacaggtgagaatgctatgactacaatagagcatatcggccgctttattgatcaatgtggtaaggccggtagtgatgatttgcttaagttgaagttgtttcccctttctttgtcaaactttgcatctacatggtatagtttgcttgctcctagttcaatttctacatggtcacaaatggagcatgagtttcatggttatttcaaagatgcaagcttgatggagcaaagaccgattaatacttcatcggtcacttgtgaaactatttcgggtacacctatgctaagaccggaattgttaggaattctctccctattaatcctattgatgttgataaaaagaaagggaaaaatggtattggtaaggatcctcgggccaagacacttaggatcaataatgcgaaagccgaaaatcataaagttgcaaaggatgagtcatctagtatccaaaggaccaaaaagccgaagctcacttttgatatgcttatggctaaatacaagaaaggattagccggtcaatgatttgacaaccaaactagtgattcgaaaagaccaagatcatctcgtaggaagagatttggtcaaacatcaaagcaatcggagccatcaaccataccaactccatataaacctccaattgtgatgccatggtatccatatccaatgtcactatatgggtatccttttatgtattacatgccatggatgcctcaattctctacgccgtttcatcaaggatgggaggaatcacctaaggcagtaccaagtcattctaactcaagacaagaccgtttccacaaaagaatcggtccggtggatcaaaggtgaaaaaggcgaagaaggtgtgggtgaggaaggaagccaaagctccggaggtcgttgctatcaaagaggagtctcaagatgttcatgtacctactggagatgcgatggaaattacgcaagcaaaggagatcgaagccgacgccgtgactgtcaacattggtggtctaaccgagatagctggcgggtctaaccgcaagactatggccggtctgaccaaccctcctggccggtttgaccgacggcttgtggccggtctgacgggacctagaggccggtctgacggaggggcattagagaagagtgagaaaattgagagcaacacagnaggttccacttcgaccaaaaatatgaagaatcatcatttggctcctggaaaacaaccacagccgaagtggataccttccggcttatctcgctctcaaaacaggaggcttcagcgtcttcgggccatgggtaaaaaagaaaaggagaccaaagatgtggagaacaaaacatgtaacaatttagatcctcgaacgacatctaggcaagtgtggagacccaaagaggtaaaagttaagagaccggtgatttcccatagtagagataaatccaatttgatgagagaagaatcatcggtcattagagataagtctccttcgcatgatgctatggatgttggtgcggtgttcatcttgccttcgaaatcgtgcagtcgagaaagccgattttgcttgaggggcaagacattaatatgctcatgaagaaatcaagagaagatgaacggcgatggatacaacatcacatctttgagccgccgttcgtcggatgctaaggcaaggtatgggtttattgtgtttaccattatatgcctatgccatgttaaaacattgcttgtgtcagggttacgggttaggtataccccttacccttcgatatgcaccacatatcgacatggcatacccgcgcatacacgggcattatctgcatatactaaggaaatcttccacagtgtttaagtcctactcggacaagacagggtcgtcaatatatcgtgtagggtccgatgtctccgagttcgacttggagaccacttgatttgcgatataaaagggatcccctgggaggacctaaaggatggaatctgatagccaacacaacccccacagcctacgaagtcggagcctgcaggagccaaatcgccggggatctagtcgaatcaacttaattacgatctcgccgcttcatcgagttccattgttccctttgtaacatgtggttttccatcatataatcccatattcaactggattaggactattacctatcaaggggcctgacccagaataatttttgtcttttattgcttgatgtcaaactacgtagatccttgtaccaacttaccacaataccctatatattcggtctactggtatgacccgtcgacagtggcgcgccatgtaagggggcttggtgctcaaggntttactactatttcatccagctttgttgacaacagcgtaaacaccaaccttaaccactggttttctgctttaaa

SEQ ID NO: 11412 - DNA, 1576 bp, Oryza sativa
  unsure (1)..(1576): unsure at all n locations
cttgtctttccgacaagaaccacgagccgacgagaacagcttccgaagcgacaagggcctggtgtcctatccacaaaaccaggaaacatactttgcaagcctgctgggtcttcctcaatgcccacgccgaaattcgcgcctgtagagagcgtggaattcagcgcgtttctccaactcgtgatgtctattgtcctattcacaagacaaagaatcacgacctctcaagctgcaaggtttttctcagcgccataaagatgtcatctcctaaggtccagccatcaagcgtatcccttagagaggaagacaagagacagggaacgacgctgacctcagatcgattcgttggtgcgattgacatcgactcccacgaaccatcagttctacatctactcaaggactatggctcgtcatcaacgagtacaccatgcgaggtattggctatcgatgggaccagcacgtcagcacgcgctaatgccgaggcggagaatcaagtagttacaccggctcagcgcatcagtacccttaacacaatactgagggaggcaccttacgatcccgttctgaacgacgatcttgcgtggtggcaggaacggctacgagaatcagtaaccaacctcagccacacgttcgaaggggctgctgctgatgcacacccggaacagccaccaactggcggcgtcgatggcgaaaaccccgaacagcgggagtcaccctaccgagcaaccccttcaccccgcggcactggcgacctccgcgatcacctgaacggccgccgagaagcacgtcgcacacagggcaacgggagccgctctcgacatcacatcccttcacggcatcacgataatgaagaacgaggaggccgctcgaacgaagaccgagaccgtgatgatcgcgacaatcgtgagcggcgggcgccgggcaataccagtcgaggacgccgccataatggcgaagacgacagagatcggccccgggacaacgacggagggcgacgatgggattctcgagaacccggccgatgtcctcgtaatcctacaccagaaccaagcgattcttcgtcatcgtcatcctcttcttcatcctcatcgtcagatagacatccacgaaggacacacgatcgccgacaacccactgcccccagcgctgggtgtagagctttcggtcgttccctgcgtgatgtccgatggcctgagagattccgacccggaacaatagagaagtacgatgggagtactaacccagaagaatttcttcaagtctactccatagtactttacgctgccggagcagatgacaacgcattggcaaattatttgccgactgcgttaaaaggctctgcacgttcatggctgatgcatctaccgccctactcgatttcttcatgggcagacctgtggcagcaattcgtcgccaacttccaaggaacttacaagcgccatgcgatcgaagacgacctacatgcgttgacacagaactcgggtgaatccttgagggaatatgttcggcgcttcaacgagtgcagaaatacaatccccaagatcaccgacgcttctgtaattngcgccttcaagtctgg

SEQ ID NO: 11413 - DNA, 962 bp, Oryza sativa
actcagcatatccagactctgacctccacgtttcacacatcttcggaggctccacatcgtactcttcatagcgagaatacaagaaagtggaacgtgaagtctgttcgacatggcagggggctgcacctaatatgaagtggtctgaacagaagatagaattttcggaagaagagcatcccaagactgccgttatcccaggacgctatccgatcgtggtcgagcccactattcggaacatcaaggtcgcgcgggttctcattgacggtggcagctcaatcaaccttctcttcgccagcactttggatgcgatgggggtcccacgaagcgagttgacgcctaccaatcaacccttccatggaattactccccagtcctcgtccaaaccattgggcaaaattacgttgcctgtgactttcggccaagcaaacaacttccgaaaggagcagatcacctttgatgtcgctgaattcgatacagcgtataacgccatcatcgggagaactgcacttgcgaagttcatggccgcatctcactacgcgtatcaagtgctcaagatgccgggaccgaagggaataatcaccattcaagggaacgcaaagctggcggtacaatgcgacaagcggagcctcgatatggtcgagcaaacgcccaacccacccgccacaactgagcctcccaagaaagtgagcaagacaaataagacgccgaaaccagacggcgccatcaagatcgttccactctccagtgccaaccccgacaagaccgtcaagatcggggcatcactaagcgaggaataggaaatcgcgctcatcaccttcctccgcgacaatgctgacgtgttcgcttggcagctgtccgacatgccgggggtccccagggaggtgattgagcacaaactcatggtgcgacccgatgccaagccagtaaagcaaaaactgcggagatttgcaccagaccgaaaa

SEQ ID NO: 11414 - DNA, 2512 bp, Oryza sativa
  unsure (1)..(2512): unsure at all n locations
tctcggtgaagtcgtgagaaacaaagacgttgtcggccgcattgcgaaatggggggtggagctaagctagtgggatgtccactttgtgccacgaacaaccatcaagtcccaaatactcgccgacttcgtagctgattggactatgcccgacaacaaatcagacaaccaaatcgacaacgaaacgtggacaatggcgttcgatggtgcactcaacagccaaggagcaggggcaggattcatcttgacatctccttctggagatcaattcaagcacgcaatccacctcaacttcagggcaaccaacaacacggccgagtaagaaggactactcgccaggataagagccgcaaccgcatttggggtcaaacgactgatcgtgaaaggggactccgaactagtcgcgaaccaggtacacaaagattataaatgctccaaccccgagttatccaagtatctcgcagaagttaggaagcaggagaaaaggttcgatgggatcaaagtccgacacgtataccgcaaagaaaacgtcgagccagacgagctagcacgacgcacgttcagacgagaaccactcgaacccggcacttttctggacatcctggcaaagccatcggtaaaagaggtcagcggcgaagttaacccagacacccccgacatcagctgggaggccacagaagcagaccgccgccgtgccgatatcaaaaccacagacgactggcgcaccccacttgatcaaattcatcaacagcgacgagttgctcgaggacgatgcagaggccaagaaaataacccgtaaagcaaaaatctatggcacgatcggcaatgatctatacaagaaagcgccaaacggggtacttctcaaatgagttccgtccgacgacggcagacacctcctccacgatatacacgaaggcatctgtgggtcacacgccgtcggtcggacgttggtcgggaaagcttttcgacaaggattcttttggccaacctccctcaaagatgcatgcgacatggtccagcggtgcgaagcctgtcaatttcacagtaagcacacaaagctacccgcgcaagcgctccagactatccctctcacttggccgttctggtgctaggggctagatatactcgggcctttcccatgaggacagggcggctataggttcctattcgtggcgatagacaaattcacaaaatggatcgaggcgatgcccacgggagaaatcaaggccgacaacgccatcaaatttatcaaagggatattttgcagatacggactaccacatcgcatcatcactgacaacggctcccagttcatcagcgccgatttccaagattattacatcaggctgggagtcaagatatgcttcgcttcagtctctcatcctcaaagcaacgggcaagtcgagagggcaaatggcatagtgctacaagggatcaagacccgtgtctacgacaggctcatgtcacacgacaagaaatgggtcgaagaactcccatcagtactatgggccgtacgcaccacaccgacaacgtctaacaaggaaacaccctttttcctcatgtacggctctgaggccatgctccccagtgagctacgacatcaaagtacatgagtacagaagtactccgacgaggatcaggaggaacagcgaaacgacgatgtgaatctactcgaggaacatcgcgaacgagttgccgtccgagcagccggttaccaacaggccctccaccgttatcacgagaagcgcatccgagcacgcatactttcgacgggttcaaagccaagcagggcgaaacaagctctcacccaaatgggaaggaccttacatgatcacgcaagtcttgcggccaggcgcattcaagatagcagatggcgacggccgcgagttggcaaattcttggaacattgaccaactacgtaaattctacgtataggtcaatatcatccatacctgtaagacaccttacagtatcaataaagcctatgttcgggcacatattacaattacagtgttcatgcctgatgatcccttacccagatgatacctagcgttgaaacctatccttatgtccctttacaccgtcctgacaaggcctccgaggaacctaagggatcctcggctggggacgcccagagccgataaggtcttgtcggatcctgtagagacgaaagaccatgtaagacctggtcgtgtaagagttctcgccgtgcgtattaaccaagccgtgtaatcggaaaattaactttccaacttcacggctgggggctaggatcagtgctttctcaaccaaggcaggtcaaaggtctaagagccttgtcccccgagaagtatcctccgacgacaaggctgggggctagggagagtgtacgactcaaacgactgaccaaagtcgtgaactgaggaaacactcttacacactatatccagagtaagaaagattcaccaagatagatttcttccctacttcgcanaatacttcttacaattatatacaaatccagaactttattaca

SEQ ID NO: 11415 - DNA, 1875 bp, Oryza sativa
ctacttcgcaaaatacttcttacaattatatacaaatccagaactttattacattctttccctaagatatctgtcacagggtacgaatactaccaagaaggccaacgccagtccatagactggaaaaccttctccgctaacggggccatcgacttcgccaggtggtctatctccgcaggagtcctctgagaatgagtgaatccttcatggagaaactcgaggtgcagttgcggacgatgatctcgtacacaagccaatacatgccctcctgcatatcggctcgatcggcggcattcctgtttcagagcctcgtcaatccgcttgccaacgccctcaagctgagtacaagccccattcaaccacgggatatatccggctgctgactcctcgggatccccgcgaggtactcggagctctctgcaaacttgggccatggacgtgcagcaactcttcaggtatgagttgaaccacacctcacgacctcaaagtgtttccacggcctgctccttctttacttccaacatggctctctcgagttccaccacttcaaatttcgtcttccaatattggatacgacgatctcggtcagcaagtgcgttctcgaggtctgttcgacatggaaacgactacgttaggctgctcttctctctcgagaacacggttgatcaagtcggaggagcgaaaaggatgaaaaggccaccaaccaaaggaagtcgtcgccgtccccgctctcccgggtacaatgtcattcacatcgtccagcaacgcgtgtccctcaaacgcaagaatcggagggatcactggcgactcaggttgcccgcgctgctggacaccctcgtcatcagcatctctacaaaggacaaaaattcccgaggtcaacatacaagggcaaactagaatgataattgcacgtattctgaggcggtccaatttcaagttttacacagcatgtcttggaagtacaagaagacctactcttcaaatagggggagaacagattccccagatcaccgacttcttccatcacctccttacgcgtggtactagccgccccctgatccaagatctcgcgcagatcgagttcaggacgcgatagctttacgcacgcaaggacataacacgccccagtgtagatcccgttcgatgtctcctctgcgaccctggccgcatgcttggaggggatctccgtcatcgccgtcaatagtaccgcaagggaggaggtcagcgaaaattcgtcaggattcaccgggatggtagacttgatgccgcactccccggcaagctggtgcaggccagtgtaggtgacccgcaacgagccctgaatttccgacaggttgtgcccgagttccgacatgcggttctcgagcccctaccgttgtcgctcgttgccggccaccagttccctcatcttcgtgaggtcttcatgagcttccgccaactcgcgcaccaaccggtcagcacgcgcgttcgccaacgccgcttctgaccttgcctctgcaacctcgtggccaatgctgcgggcaccagcttctaggaggcgccccatttcgacttggagctcctcccaggcgaggatagcagtgggcggaccacgacctgccgcgggatcgctgactgggccactaggcgtcacctcccggctcccagctgcgagtacgacatccgtcgaggccgcggtaggcgaggcgctggaagcccctcctgacttgctctgcgcggcctttgcccacgcttccctatgggacgaccacggatcatacaacgcttgaacagaatcatgggaacttaaaaacccaactacttacttctcgccgatcgtcacaagacgttgtcgtcgcggaggcgggggagatgcgtccaaagcctgaaagacaa

SEQ ID NO: 11416 - DNA, 2974 bp, Oryza sativa
gactcagggcatttttcaatcagaatatcaaagaagaaagcatcaatcaggtattgcacttagatgcagctagagaaaaaccctcaaattaacaatctccacaattccaaacggtagtatatatagcttggtatgagtctatgagaccatacttgttcaaacaatacatactatacacgaggcatgcccacatagaaatgaagttttatcatgtcagattgctcatcactcatcagtgataggaaaccaaatatttcaccaaactgataaacaaaactaaatcatgactgttgaagtaaatacggtcactgaacactcgagaacattgttgccggagcaactactttgtcttcagaaattcaattttgactgagctctgaaagattttaaagtcacaaactggtacgagtaacaatatagcacgtccacatgaaatctttagttgccagatgcaaacgcattgtgccgatctaacatatgatcagtggccacagaagataagatagtgtccaattgtgtttcaaaaaaaatgaagtaccacaaaccactgggcaccttgaattgccagcatcatgatctccacaagtcaatgcagaagtccatgatcacaaattgtcagtgaaagttgtacaggaaagcaggaatgcaatagtgatagcaagcagaacaacaaactccaaaataggtgattctcattccccatgaataattggcactcctttaaaaaaaattatgccgtgttttgatgtattacaaggatcattcaagtccgaattcccaaataactcatgtgcctacaaatttaaagatgagacttttattgcagagcactggatagaacaagctaatattgtcacgaccgatatcttagttgcttccaacatgcttcgagaaggacactgatattaatagggacaacttgagaggcccttagttgtttcattccgcttagtctgccttcacaaggacaaaaactggcttgttccccagcttgtcccgaccctgaaaaaacatggcatagttagagcactggatgtcatcttaagccatgttatttctaaccaaagttttaatcttgatctaaattcctggcagtgacaaatgcagataatcccaaagttttttaaaaatgagatttcgatcatgaagagcacatcttttgaattattccaaagtcttttcaatgagtttctagtcatggtttgttaatacttcctttcttgtagctaatttcaaatttaatgttaatctttgcatgagtattacccaaaaaataatgtacagccaaaaggaaacttcctacagtcgacgactatataacagtcaagcactaccatgaaaaatctccttattcacatctaactaaagcttctttttcttttctttgcttgagcatgcagatcaattacccaacacatacccacatgctaacttaatacactgttctgtataagagaatcagagatattgatgcgtcaaaagaattataccttcagttctggtagttcaatgacacatgcgcactcaacaacctctgctccagcacgctctacaaagagtgaaggttaattgagttaagtaaaccatatcacaaatcataggaataaatcccaaaagtatattcagaatgttaaggcatattccattcaaatatattaaaaaaaacaaagaaaacatgaacagcatagctaaataaacataagtccttcgaaacatcaattccctaaactccatatatatgcactacagcgaatttatctcaaagtttggaaaataagtattggagtcatatggttttcaaatctacaagtacgaaagtacaaatcgaatggaccggacataaactatatctattttgtagctcaagaaaaggggactttttatgaatagcatgtcttataaaatttaagtagctgaatttaggacattatctatagtgttcaaactacaaaaacaaagcttaaacaggaccttaccaataagtttaacggctgcagataaggttccacctgtagcgattagatcatcaacaacaacggcccggccatttggctccacagctcctacatgcatttctattttatctgtaccatattccaaagaatattcttccgagatcacctcacctagtataaacatgtaagattagccaccacatctcttaggcaaaggcatagttgttcaataactggaggcaatgtatgctaaataacaaaaagtttagtacataccaggtaacttttttggcttcctcaatggaacaaattttgcacctagtgctaaagcaatgggcggaccaaaaatgaatcctctagcttcaacacctgatatttcacaacgagggaaattatgaaaagaaaatgtacaacagaatatatgtgcatctcagttgcatcatttataattctaactttttaaccatgaatgcatgtaatgtcacaaaagaagtagcacttaattttacattaccagcaattacagtgatccctttgtccttgtatcgctcaacgaagagctcgatcgtgtcacgaaatgcatctggcttgagaagcattgttgtgatatcttgaaacataatccctacataaagaaacagaaagaagaaaggtttttattttatatctgaaaacatgaaaaatatattacacataaaaatgtagcgcatttttcatttttatttctatagctatgttgaaaaactaacatgtcattttaaaagcattctggccaacataacactaacccaagttccatacaacaccccacccaccatagagaaaatcaatgtatgaccgtctagagagaacaaaaaaaaagggcatcgcacaaaactaagctaactagcaaacaagcagcaggacaaaacctccacttggataaataaagatctatatataatctattaaaccaggaaaaaaaacattgttaattactccactcagacagttcatactcagttacgaactaactactg

SEQ ID NO: 11417 - DNA, 15962 bp, Oryza sativa
  unsure (1)..(15962): unsure at all n locations
ttttgtgaaatatgtaaaactatatgtatacataaaaagtatatttaacaatgaattaaataggaaaagaattaataattacttaattttttttgaattagacgaacggtcaaacctgtttagaaaagtcaacgacgtcaaatatttaggaacgaaggggacaatattttggaacagccagcgaacactatagttaagtactccatccgtttcaagttataagatgttttgactttggtcaaagtcaaatggtttaaatttgactaagtttatggacaaatataataatatttatacatttccaaattggttttattaaattagtaattaaacatatttgtataataaatttattttggttcgaaaatgtaactattttttctataaacttagtcaaacattttataacctgaaatggagggactagaaatttctagtccttaagaaagtatctggagataccaagattttacactataaattttggtacctcaagatacttagtacgtagagggaccaaattttacactataaaatatgatacctcccggtactttctaaagtatggtaaaattacccatagttaaattgctagagagttagcatgcatattgaaacatagtagcatatctttattactcccttcgtcccaaaataagtgcagttttacattattcatgtccaacggttgaccattcgtcttattttaaattttttatgattactatttttattgttattagatgataaaacatgaatagtactttatgtatgactattttttttatttttttttataaatttttcaaataagactaatggtcaaacgttggacatagattttcatggctgcacttattttaggacggatgtagtatgagctaagtgactaacgtaactgatacttgatgattggtttgccgtgttgaagaacatggagcatatttgtctgaatgccctggcgctctataaatagtgattcaagtagtacctcactattatccttctgtacaactctatacttctgtcatttagtggtttgccagcacacgaccttatgtactttggcagctaatttagtctggtctaaccagttactaactgtaatcatgacagcttgatttgagagagaatgtcgtgattgcagtatcaaaaactagagcataatctacgtactaactgttcttctggaaagaaaatagctggggcaataaaacagccaacagaacagttcagactttcttaactagcgtgttgtgtgtacattatttgcttcttttctcagagcctgtacctagctagttgcattgagcgccttgtgacttgtcttcttttccattgtttgctgcagtcggaaacggagtgaaacgatgcagaaggcaaagcaagagagaacaatggacaaggttggagggattggatgtatatggtaagcacaatcgaacaagttgtctgcatttgtttttctttttccccctctcatctagcctggaattagtttcaattgcttctgacatttgcttcttttcaatttttggttgcagtctggaacgcatggaaatgttgagacaggaccgcgaaaaacaagagtttgcaatgctagacagcatagattggtagcttatggcaacggatccaatgaaggtcttgcgcagtttgcagctggttgaatgacatgggggacccactttggtattacccatatgtcagtaacaagaagtgcactgaggagtttggttcattgtcatacttatggcaagccacactttcttaccatcttaaaccatatgtcagactacaaattataggccaaaaaaagtgtggcaagccacacttgcctaacattgcctaaaatgagttatggcaatgttagttaagaaccaaacagcccctaaagatatcatgccgtacttacttatttattacaccatccgtcccataatataagggattttgcatgacgatttccatataaactgtataatttgtttttctttttatctatactagaaaaatgcccgtgcgttgtaatgggtgaatgctatcttaatcttattattgttatacggtttagctaaagtgaattcactatagaaatttgcttggatataattttttacaagatcatgagctacaattatgagtctgatcatctcaagttagcatgcaaattttttaaagagatttcttatatgactccttctatattttcaaaagcaaacgaatttaaaaacctactcaaatacaaattaattccaaaagcaaatgacttaaaaatcgactcaaacacggatgacgtatcaaagtaccagcaaaaatatctttaatttttataatagtagagatttaatgctccatacatgtgtttaaatattcgatatgatattttttaggaaatattttctgggaactaaacagggcctaattaacatacccatgcaacagccccatggagcaggagcatatccgatccgattggtaagagcgaggccacttaccaggcctggcagtttcctaacacaaaaagaaccgcgtgattgaagcatataccccccgtttaacgccgttggctttttagcatatatttgaccattcatcttattaaaaactcttgtaaaatatgtaagactatgtttatataaaagtatatttaacaatgaactagatgggaaaaaaattaataattacttaaattgtttgaataagacgaacgatcaaacatgtttaaaaaagtcaacggcgtcgacggagtgtatatatatacactacaaaaattgtgcgtgcgttgcaacggatgaagactattttaataataatattattatatggtttaattaaggaaaaatttactgtgggaattcatttggttatatatatttttagagctgtagttagtagtccggtcatctaagttagcatgcgagttttttttggttaaaaggatttcttatacgactccttttgtatttccaaaaacgaaaacgtttaaaaaccgactcaaatactgatacgtatttccaaaagcgaacgaacttaaaaaccgactcatatacggatgatatatcaaagtatcgataaaaacatcttttaatttaatttttataatagtagagatattgatagaggtatacacgctagcatgcatagcttttactcatcgtgccgccgtcccctgggtggaggccggcaaaaccctagatcatctcacggtggcgacatggaagcgcatggatggatggtcctggaccgcattgtccgctgctggagcgacgacgacgacgtcgtcggcggcgacgatgaccccacgtcgtcggaggtcgcctacacctgcagcgggcaccccatccgcgtttccctccgcgtcgccgacccccccgccgtcttccgcctttacgtncaccgccccggctggccgcgcgtntacgacctgngcgacgccgaggccatcgccgcccaccgcggatccatcctcctctcggcgcgcgtccccttcgcggacctcggcaccgtcgcgccgggccaattccccgtcgactactacgtctacaccgcggcaaagggcctgcggcgcccatcgctcacgcggctgcccccttgcttcatcggtggattctcctccccggaggtcgaccgccacttcaagccgcaccggtgccagcagcagcgggtcatggtagagcagaacgtcggcttcttctgccacggcgccggcaatttcacggtggcggacatcaacatccataagggtaaggccgtcgagctctgcgtcctcaaccactatgctgattgcccccaacaaccccaatggaaggtccagatcctggagatgcagcagcaacccaaccaaaaccaccacctcagaggttggtggaccgacgccgttcttcccctgcacgacagctacctcgcctgcgtcgactgctaccatggcatcatcctcatcgacgtcaagacccagcgttacttcaactacataccgctgccggcagaggcgaagcatggccgccgccgcgttgacaagtacagccctgatccagctcgttctgcctccatcaacagcgctggcaatatcacggttgtctgcatagccgacgacaatgccgcagcaggaggccgcaacaacaacagcactgctggctctgctttcatcgagatcgagtcatggtgtctggtcgacatccacgaaagtagatggattcttgatttcactatggaagccggcaagttctgggatatttgctctgctgcaaaccagcccctccttccacatgcgccgcctactttccccctggtgagcatggctaatccatttgccatctccttcctcctctacgacaaggccaacaacttcctcctcgaggacaagggcaatggcctttactggatgattgaggtagacatgagaaaccaaatcctgctgtcaccagccaccctctacatcagtgaagaagaagaagagctcttcatcaatggaaaagaagaagagcaagaaagatgttgtgatgagagatacccgcccatgaaatatttttatggccataacttcatccccagctggttcccctcttacttgaagaaaggtggcgacaccacaaggtttgctatgttttcttttttatttgtgatacaaaaacatttaccatttgtgtgatgtgttcaaatatgaaaataataccagttggaatatccattcaattgctttagccactgtttaggaattaacaagcagataactggatagttaaatggctgagcagttagcatattggaatagagcatatctttattagctaaatgactttgacgattggtttgctatgttgtaacatgagcatatttgatcgaatgccctgccaatcctgcaaatagtgattcaagcaataactcggaattattcttctgtactcctcttctatacttggacattgcctcttaattaaattttcattacattcatttttcttttcgcacagttaaactagtagagcctttcatttggtgaaagttttactgatttgccagcacataaccttaagtaatttggttagctaagttcttggtctaatcaattaccaactgtaaacatcatagcttgatttgaaggaacatcgggattgcaggatcaaaaactacagcctaaactgttactgtttcttctgctggaaagcaaatataatattaggccttaagacagacagccacagaacagtgcagactttcttaactagtgtgtcgcatttgcttattttcttaccgtctgtatctagttgcattgatcgccttgtgacttcttttccatttcttgatgcagtcggctgcggagtttaatgatgcagcaggcaaaacaagagagtgtaatgcaaaagattggacggtaattaagcacaatgaacaagctgtgtccatgtttttttatctagcctggaattagttgcattgccagggttttcggtttctttcggccattttggttttaccaaaattcctgaaatttcggttttctgcactttttggaccccattttttgaaattttaacataatttagctgattttgaccaaattcgtaaaaaaaaagagagaccgaaaatttcgaccagataatcacttgccgagggatccgaaatttcgaaccgaaattacaatcagtgtatatagctgttgtctgcccatgccaactcccgcaacatcggaaggcgtgacgaggtgatcatggcgtagctgaacaatccagcaaaccttcgcacccaacgcctactaccacgacaagacagacagagcggtcgtctcccagagaacttttattttagttttgggtttgattatacaatcgggttttaaccgtatgtaggttatgttcttgatggtggtttaagatgtttaacactataggatgggttatagttcgatgttagaattattcccgtacctggactactattgtttgatgttgaatttacaagttcaatatgatgttttgcacaactcattttagttatcatagagtttctttttagttttctcgttgcaacgcattgacactacccaacaataagagaaaagctctctttaaaaatcacgcctatttataatctacttcgttagcttcgatgtgctcttcttaattatcatatatatactcccttcatcccggtttaatcatcactttccatgtgctctccttaattaccatatataacacatagtattatactccctccatcccagaaaggaggacgttctgcttctaaccaaaagtcccataattcttgacgctggcagcctggcaggcactagcaaactcctagacaagcacacataaaaaaaagaagtggggccatctaaaacagtagcgaactctttctcctccaaacgatttttgctctgaagcgctaccttatcctctcctctcgtattctcttcttccccatcgctcgtctctcgttttcttctccttccacgccacgtcttccaaaccagcaccccgcttttccctcccatcagcacaccgcaccaatccccatccatcccccctcccctcccccacccccagacgagcaagccatatccggtgtgcgacaacatgctcaacggccgcggcaacactgagagcgccatcagcagcaatgacggaaaccctaggggttgcagcggcggcgaacctaggggctatggcggtggaggccgtagggatggttacggcgctggctttggcgagagatcaggttgtggaggtgatgatggaggcggaaactgtaggggccgtgatgtcggaggccctaagggctacaacagcagcagccctaggggtggcggtggcggcggcttcggcgagagattgggatgcggcttcgacgatggcgacgcaaaccctaggggctgcatcggcggcgaacctaggggctgcggaggtggaggccctaggggcagcggcttcggcaagagattgggttgtggcggtgatgacagcggcaggttgcgaagtgccagacagatgtgcggtaagaaacggcgtcgaggcatgtggtactgtcgaatatctagccaattattggaagaaggtgagaattttgttttggatacacaagatgggtccgacgatgaccagattgagttcatccctgattctgatgatgaaggcatcgagtactgcttctcctcagatcaggagtttgtgcccgaaactgagttccaggattgtggggaagtggaggagaagggtggtgggattcaggattgtggggaggtgaacgagaagggtggtgggattcaggattgtggggaggtgaacgagaagggtggtgggattcaagattgtggggaagcgaaggagaatggtggtgagattcaggattgcgggaagttggagaagggtggtgggatttgtggcggcagcaacatagtgcactcaaatgatgaatgcaaacagcctgcccagatgtggtgcgggtagcgggttcgaggcaagtggtttcatcgtgaatctggccgatgtttagaagaaggcaagaatgtgatctttgatacccaggatgggcccgatatggatgagtatgagttctggcctgatttggataatgaaggaggcgacttcgtatttgaagattggttcattgacgttgtgcccaagaaaaagatgcacgatggtgttgcaatggagaagaagcgaggcagtaaaattggcaagctgatgagctccaatgtgacttatggcatgggacgacccagttctaccattaccaaggcatccttttcgtcgaatgcttcttacccgcagggaggtgacctgtggcaggggacaatggccaaccacagtgctgaaccgagcaagcacttcgtggtggagtcctccaatatcagcgagcagagcaaggtgtgtgctattaatttatttgagtcaactttgcataaaaaattgaaaatatattatttaataactatggaaacttacagataaactcatgaggagcctgctatgtataatatatccatatacttctagctagtaacaattaggtaaccatagatatttaatcactctaactttaatgcattatgtaatgtgcaaccaaagccacaagttagtaagcagtatagtgccatatagctggaagacttgatctgttcaatggagagtcatgcaccatctaatgttctagccgttaccacacaggatctttattgcattccatttaatattgttttgccatgataagagtcttgcaacgcataatattactattattaattttagcttttataaaactaagataataaaatgtgttgtgaagtctgaacatagtctctatctgccacctactgattttgtaagtatgtaacaaaaatagaaattcatacttttcagtcctcttcttctccaatactgcaacttgcctagtagaccagatattataattattagacatgtgcttaaacatcagaaactggctgcaacagagaaaaggaagttcagcattttaactccattgaataaaattattggtaatacataatttagtactgcattttaactccattaaggaagttcttactgcatactttgtcaaaccggtgtagtaccattacgcataaatgcatggtttggtcagccgatcatgaagcatcaattcaatttgcaaatcacagaattggggaatggaattgaacaaccaagaataaaccgagtgtatagtggatctataaacatgtgccaaacacaaaaatgcccttcttaaaaataatataataaacaatatagaaagaataagtaatctaatcttttttatgaactaatactataaataaaagcaggaatagcagtcaggatgtctacaccttcatatgaactagaaaagactatgaatggttccaaagtgataaactaaggaaattcttgaaaataggtgcttgacatgaatatttcacacgaacaaaatatatgatcttgtgcaagcactcggcatacaatgtattgattactattattaaatttctgtagcttccaattttgatttgttttcatatatgttcaggaggtgtccatccaatttatgcccaacgaggaggagatacccagcgaggagaagatgccgagcgacaaagaaaatggtgatggtcagtttgtaggcgtggacctttgggttgattcacaggaggaagaatacgagctcattgatgacacgaagttggaaatgctacgtctactgatcccaggttacaccgagtgtttccaagtaaaaaaaagtagtgtgttgattaagtgacatgaatagtgtgtcgtctacgtacttcttgttgttagtccgaagtacgaactcataattagtcagctgcatagtggcatcctatcatgttatatattatgtggttctgtttggtgacatcttttggaatatatggttattcaacatcttattgaaatgtcatgcatctctatgaaatactagcgcttgttttttttattgtgcatatggacaatcaacttgttaatagaacctaggataaaacattcatacaagcaaacatattatatatttagtttccacaattacatagacgacacatgtacatagatgacaaaagtacatattatgacacaagtgcacaattagttgcctagaagttgtatgactttctcatacaactgacgatcacagcgaatgcctctagcctcgctttgttcatgtgagggatcttgtacttattccctccattagcttccattacttcaatgcagtagctttgtagtgtcacgaatactctattcagagtctttggatcgtagtcattatattccttctgaacattctctattagctcctccatgtttttagacaccctattagcagttaaggactgaagtgatgcaaagaagccaagatctagacaattcatatcgggggaattgggaggttgattcacgaggcgaatatcaagccccatttgagctactgcaacactgaactgctcatcgtcaattggtacatgagttctagcattgtcttgttgaataaatattgttcttcttgcatcttctagaggccaacctgctctaatagctgggagaactttagagatcataaatgatctcatagtgtctctatcaaccttaattgtctttgttacaagtgtccccctctctctattatggcttctcctttgtgcgggttcctgttagtaaatcaaataggctaggtttaaacataaaaaacagaagtaaataacacttgtataagaaggttgtgttacctttctaacaaaaggccaaatgcctatcttaccatcaaaagtacaattgccttcagcatcatacctaggcctcgcaactgctgatagaaacattactttctcaattgcattcttattttggacaggtctatagtgttcctcctcaaggggatgcaggtagaaagtcctgttctttttggtggcattgaaccatttttcatctatatggacaatgttttccatttcaataaacttggggtcgtttggtaacgtacgatgatctagcataccaacacaccactgcagcctttcttttttgtttgcttccttcaaagaaggctttagtgagttagagtgacgtcgtagatgcccttctttgaacatacctagggcttcagcaagtgaccgtatagtgcttctttggcgcaatggaatagctgatacaaccgacaagtctattacaacctttttgcggccacaattgtaacgcttcctcgagtcaacattaacttgtactccatgtgcgatgcaaagctttgctctcttccaaatacgctggactgtacggatgctgacaatgaacacttgagcaactgcacgtgtggtgtctttttctagttttccatccttactttttgcaagcaacaattcataaattctttgcctttgtgggtttgtcaattctgtagaactgttttcctcatttccatttgcatctggatttggatttggatttggatttgcatcttcttcttcttctgagtccgacaactcctctctatcaaagacaacattgacagtatctatatacacgccatagtcccgaagatcatcctccaaggcttccagctcatgttgcaattcattgtcattgtctacaaaaaattttacatggtaagttaatgtatgttaatcagattgtgtagatttattcagtcctaaaatcaagaatgtaaacatgtttgtaactgatcaaaaagtaatgaacttttacccagttgaatttcttgttcctcatttccatttgcatgcatatccaggtcatgctccatgtcttgctgataattgtctaaaaaaaactacttgctagtcagtgccgcacaaagaatattgaatatgtttaggatttgcaatgtcatgactcataactgtagtttacaatagtactaactcttccatatttccatatcaagatccatgacttattcataaatctgttcgtaaggtagcattgatttattgtcatgctaattcagttatgtatttaattctacctctagctctatttaagttctagtgctgtacaagtaatttttttcaggtacttaattcagttcttgcttattttcagtagcaagtcaacaggaatattgtgtctgggactgggagctggagttaaggatgcttcacaattcaaatttcacaagtttgtgaccatctaagcatgattcaatatttcgcatcataaacacgtgatttgttgatgaatattaaatactaaaatttggcaagacgtgtgggttcttggcaataaattggttctttgtactagcaattaacaaaatcagttagtaaatcttgacatcgttctgctcaccaataggttgtgcctgttaattcttccaacatgctgtggccatgaccaaagttacttcctccctaattcgatgttaggtaacaatgtgctatttacagttcatttgttttctctatcttctgtaaagtccatatgctctaggattctgaaaagaaatggttagatgtgaactaaaatttcatactaggctctgaaatctaatctatttgtttgccaatgctttaatctgtttgaaaccatagtgacatgtcttgagttttactctctatgattactacacctgttgtctagtttctaaagtgtcttctgatacatgataatggaactagaagaactaaactctgcaaaactgtcacagtagcaaccttttgttcttttcagatcgtgtgtgtgtgtgagaaagagagagagagagagatagagcatgtgtgttgatgagggggtataatctgctgttgcatgtcatacaacaccatagttttttagagccagatttactaatgcaatcaacatgcactgagaaagaacccattttatgcattgagaaagattagatgaagtaaaaaacctggatgcagttgttcttgttcttctgttgcttccaagttgagatcaaaagctcccaagttgagatcaaaagaatgtacaacttgatcatttccatggcaagcaactcgagcaaggtcatctacctggataacatgccttccaggaacttcttcttctagattggcttgtgcttcattgaggtcaggtaaagcccctccatcttcctcttcttctgctaatatgtttagatctatagccattgtgatgggtgggtgtggagttggtttgtaggatgatggatgaagtgataaaaggcttgtagctgcctcgctgcttgaggattatggagggtacccttgggcggcaaagcaccatccatggagtttttgaatttgattagaccggttggattattttaagcccttatgttttggcgccatatcactcgaattaggtgtataacaccaatctgtagtgttgatactagtagtagcacccagcattaattggatgcttcaaatattccttttgtacagatgtggcagtgtacttgtcgtactcctactaagcattcaaatgattagccccaatcctataaattgagggcaaaatggtcattttcacacaacactaatttttcctaactaacctagaacgtcctcctttctgggatggagggagtattacgtaaagtctcactaaaagtacaccatacacatacatatatattactaggtgattcctcgcactttgctgcggaaattactaagtaatttttaatatatgttttttttcaacaatcgaacaaggagtaagcatgatgttaattattaacaacaaataaaactgatttgtcaagccatgtttgaagataaataaatttaatagactttgtagaagattatagataaaatttaggttgttggccagtatcgcaagaagcgaaagataggggaaaaagaaatgaaaagctaggatttattagcagtacacatgaaataaactaaataatatctctactttgatacggaatatatagatgaatgtacgctaagtattatgaaaatgatggatatatttgttgaaatattgtggaaactaatgataagagaggttatgattggatctatttgcattttgatttgtagaattaaataaattatggatggtattgcatgtttgcatgagctttttgataagtagttattgctagtggatgatgaggccgtcatgtttgcatgttgagctttagacttagtgagctctaactttatagtaagagatgataagtctcactgaaagtgcacgtatagaaggtaagattttcttaaatagtggtgggttctaggagttgagtctggagtggagttgtggagcagcctaaacctagctccaactctctagttcattttgtgagagaggtccacctaactctgctcccattttagatggagctgaaactatttggctgagctggtgttcttttcccctaaagatgaagattgagttttttacacaaacgaggtggtattaacgtatgattaattgagttttaattattacaatcttgaaaaatagattaatatgatattttagagcaatttcatataaaaatttttcgcacgaaacgcatcgtttagcagtttgaaaagcgtgccatgaaaatccaaaatttcatccaactcttgttagagaaatgaacgggatgtggagctggagctgtgccaagcatgcctgatccctttaatatggctccgctgcaatcaatcaaacctatttcccaggggatgtgggccaagggccgatgaggcggcggcggcgtcaccgacatggcggggaagagggtcagcgcggccgacagggaaggagcggcgaagaggagatcgatcggacggctccccacccggcgaacgcgaggaggagcacgcacaggcggcgcacgtgtagaggagcagatcggccatgttcgtgctggggcaggcgctggtctacctcatcctccgtagctcgtggagcgtcttctccaaggacagcaagctcagcggtgatgtggcggcggagacacgggagaaggggatggtaacggcacggcgagacggtgtcggcgggcgagcgcgatggcggaaaagccacagaggcggtaggcgagtgcagctatggatggggaagcggcgacgccgacgactccggcgccactcggcctcatcgtcgtcggcggctccatgcacagacggaggactcctctgataggctatgtcagccacagtcactgcgccaccggaccgagctctttgtttcctcttcttatccactctttgtgcgacggaaagcggccggaccggaccgaggtggcgagcgtcgacaacgacgaggcgtgcgagctggtgagcggcacggacctcgtcatcggtgtcgacgttgatgacgagggcgaggacatgtccgcgcctcacctgccagccgcagcgtcgcgccgccatcgccaacggcaacgacttgatggcggcgtcgtcgagtcgatcttggtgatgatggccatagccgcacgccaccatcgccgaccgcacgagtgggacggggatgccagcgagcttgctccaccctgagcccgcgcaccgccacccgggagccgctgttgtcggtcacaccaccctccggccgcgcgcgctaccggtgcgagagcacaaagcgagagggaggaaggaaggagagaaatagagaaatagaagagggggaaagagagtagatgctgacgtggcaccctgacatgtggggcccacatgggtcctacagtgactcagctgccacgtgggataaaactggggttaaaaccaccgagggatctagtttgcactggttttataagttgggagatgtgttgtatccggttttgcggttaggggacgattttgtgactcgatgacaagttgagggacatttggtgtactttttccttgtgttaaagcccactctgctagtctcaagtccaataactctggttaccaaagcccctaaagcccactctatctggtaaaggagaggtggttaaggctatattaactctgatgtgaaaaggacttcgttaatatgggtgccaaaaaattaccttcttctctgatagacgctccagtttcttcccctcctgttacagaaaaaccccaatccaatctagcttcgctgccatcgcttgctgcaatggcgaacaccaaccctaatcctcaccgtttcctatgtgctgatcacgtggttcatcaaggaggagtcatgaggattccccgcgttgatctcatagctgctacaaagctcccaaaacaccataaacagtatgctttggccttgctggaacggttgattcctgagaacctctggaatgaccattaggtaactagtacgtaccccgctgcgttgctgcgggtttaatagatgacttaatacataaatttttttgactcaaacaatgatgaaatgggaaattaagtgccttctcaaaatcataattttagttacatctatattcagatctgagatacgtacgattatcctttacagtgtttatattgaaaccgtacatgcaagcttcggtataaatgt

SEQ ID NO: 11418 - DNA, 5247 bp, Oryza sativa
tgtttctaggtctttgctgtggaaacagattggcttcctttacacctgctggcttctatcgaaggaagacaggcgtcgctgacaggcaacgcggttttggacgcaagggggcatgcgaccgtgaggattattggatgggccgtccatacatccacctaactagaaaaaatgcccgtgcgttgcaacgggtaaaatattttttattgctatacacttttcagtcccaacccaccccgctatctttctctacttgcctatctttgatgtagcccacaagtggagctgtaggctcagctcgcatggtcggctgtcgtatccaacctccggaagacagttctatgtccgtacgataccagaactgatcattcctatcaaatccggttgaatatttctcgatttcccaaaattggttaaggcgttttgatacactcaacctcctctttttgtttttatcaaaatcgaaacggatctgtaattggttgagggcttttgatatactcaatctcctccttttgttttcatcaaaatcgaaacggatctgcaattggttgagggcttttgatatactcaatctcctctttccggttttatcaaaatcgaaacgaatctggaaaactcggatagaatggtgacttttaaatggtgattaaatccaataaattaaagcggaattgaaagggaaaatcatgtggggaaatgatgagggagtagtggggaatcgacttttgcaatcaattggaggaaagaacgtatgaggaagtagatcgacatagcggcgacgttagggtttcgtccggtgacgaaaaaactgagcagataaaaacaatccttaccagccagacggcggaaaattcatgcaaataaagaacaaatccttactgcatgtgcacgtactcttacgcatgttaaagaacacttaacacgacattaaaaaataatgaaaaaaggatgaaaaagaaaaaaagtcagcggaaaaaaagacggatagaaagaaagggcgacaagaataagacgaaaaaatagggaaaaaagacgggagaaaaaaaggcgaaaaaagagacagccaaaaaaaaggaaaaccggagaaaaaccgaaaaacggagaaatggcaaaaaaagggaaaatcggaaaatcaccaaaaaagaaacggacgaaaaaaacacggaaaccttgtgtatttttatattaggtatagatatagatatagatctgggattggccgctaaactcaggagatgacgtctgctatcagacagctcagatcaaagcaagaccgacgatccaatggctatgacatatcgatgatgtggctgcaccagagggctgctttatagcaataattgctagtagtgggtatcaactatctaggaagaagggattacttctgattttcttgagcagacttagcatattactgtttggcgttctccttcagctctcggcgacggcgaaggtgacggtggccatggctccttagatcgacgatgatgtgggcttcggcaatgacggcggcggggtcacggggcaccgtcgggagagctcgtctacatgccaattgccgtctacctcgtcctcttcgatagtttgctgatttgttgctttcaatttgtacatatattgtggatctgttgtgcatgagcttgggatctatattctatgaatttgtaatgtggatgaaatggttgattttgtgcataagcttggggaatctatcgatttgtgatccaatcccataattttttgaatttgaagttgggatttagatccgttttttctctttcttttttttttttgcgaaaagtaggttttcattggcgggcctcttacgctaacgcctctgataatcagatcttcacttgcggtacctctaaaggggccacctgccaaatgttttttttatagcgggcgtgttccacctatgaaaatcattgattttcacttgcctttgatctctgtaaaatcaaagtgtgtttgattcttattctatgatgaacaattggcatatgtgattgttggttttgatatttggagattatcggcgaagtggttttggagatgattggatttgcagatgatttacaggtgttgctgttgtcgggtccggtcagaccggcgctatgcgagcggtctgaccgaccagcccgcggtctgaccggccgactctatgtcggtttcggtttcgggttgtttgtttggatatccgtggatgtttcgtgtttatggcttctcgatggatactatgtgtatgtaatactgttgtttgttaacaatgagtcaagttggagatagcttggtctcggaatatatggtttctttgtttgattcatgtgtaggtaacttgatgtctcgggagagtattgtcggtgatggatcgggagtaaacttggagataaggtgacgtctggacggtcagatatcatgcgggatacttaggctaaagatcaatgcacgtggttggtaaagattccatatgtcatacgatggagatattgtgtgcgtgtgggatgcggagtcgaatttggaaagactccaaatttggtatgattggagtttgtaaagtttgtttcttgtacggaaatgttatctaggtggattaggacttcttgtatgagtttggttagtggctttaggctaactacctcatgtataaatagagagggagcgtgaggcttcatggtatcgcttttgagagcattgagctgagagtttagttagagttttgagtttagtcgagatttttgtgaggagtgttgttgttgcactttgtaaacacagagagaagtaataaagttgtcatctacatcaagagctattcgatttatgtttgctcaggttcggcggtctaaccggtgagacaccggcggtcagaccggtggcatcacggcgatcagacaggcgggtacatggcggtcagaccagcgacggcgacagggagcagaggcgacttcagagcgatcggaccgagcgatctacaccggtcagaccggcggcgcaggagcagtcagaccgactgatcaacctcggtcagaccgatctacatcgatttgagggtaacttttaattccactaaaactttgaatttttgggtacaccaactattcaccccccctctggttggcttagttctttctatttgatcttacaatctctagcgactggcagtgctgtaacaccccaggtaaccacgtacctagagtgccacaccaaacatacactcaaaccactaactcccaaaattattagaaatttcggcagagtctcccctgtaaatacggacatccacgacaggcaattataagttaaactaataacaatatcattcccaccatacgatccatccttataatccatggggaagaaactattaaaaatctaaaagattattacaagaccgaaccatgatataatttaagtatcattatggacttaagcaatatagtttgatagtatgcagataaatgtgtatataagggtgctacttcccgcccatgcatgtcggtctcaatatgtacctaaaaccaattaaaacacaagagtgagtataaaaatactcagcaagtacaatatggagctagaaaacacatatacacatcattggcaataaagcatgaacaaaaggctttctttctttgataggaaacacattttcaaataccaagtcaaagaagataatagttctcatcccgggcaggcatgaattgaaatagtagtttccatcccagaaaatagtgaatacatcctagcatttgccggcaaagccgagtaagcgtaatcagcgcttacccacaggaacttgaataaacaaccaaattgcactcccatgactacgcatggtacttgaataattgaaaccggaatcaaagaaccaaattgaaaccatattgcacattcatggcaaacagggaacttgaattatttacccagaaccagaatccggaatattgaaacaagaataacatcgtaaacataggataaacatgaaaacctaaatggcgcgaacaacaatatgaatataagcagtcacatgtcacatagaaatatatcggaaataaatagatagagcaaacaatccatcaatcacacacttagttcgtcatgcacttgcctccaatgaagggttggtatcatgcacgatctgaaggaccaccacctaatcacaaataaaacctcagcaaacacattcaaacatgcatataaaacaatgaaaaagatgaacctactgccccatcccatcaaaacgcaataacaaggaacgccgcttgcactataaacaatattgttgcttcaaacctttatatcttgaaatatgaaaaggctatgactgcaaataaatatattttagaaatctacagaacaaggcctacaactcttatgtggaaatcatatttttattatgccattaaaatggtctaatttgcgcttgaaagcaggcttcacaatctgtccagaaaattcagactatccgcactaaaacaatcataactggagttctacttgcccaatcagggtgtactttaccaatatggaaagctaagaaaaacctctacaactttgtctataggcgtcttggctgttccactgtttagcccatccaaaaacagttcaatctactactatccagattatggcataaaaacaacagttatactcaaaaattcgtatcgtctaaaccacttgagataaaatcgcgccctttggtcagaagatagatataaatattatctacaactttctagttatacactttcgcataaaatatcatttagatctccaaaacttcaaaaaaccgaaacattgtaaatctgccaacgtgcaaaacagccaattcgaaccacaacaaacaaaactccttctctaaccttccttatccacgaattaaaccactaaaaccaccctagaacaactgatatgacaaggggaaaaacctcacctagggtttctttagagaacttgtgagaagacaataggggagactctgatctaatccctccttttactcccctcctcctcctcgtttcgtttttctatttcgctttttgatccaagctatgaaggtggagatctagggagggcaatttgttgtagaggggagagatgcgaacataggagaaggggaggaaggaggtgccggccagggagaggggtggcggcactatgaggggaggtgggagtcgggtcccctctctcttggttttagggagaactaatgggctggatgtatgggccttctcatgttggcccacttct

SEQ ID NO: 11419 - DNA, 644 bp, Oryza sativa
tagggtccgatgtctccgagttcgacttggagaccacttgatttgcgatataaaagggatcccctgggaggacctaaaggatggaatctgatagccaacacaacccccacagcctacgaagtcggagcctgcaggagccaaatcgccggggatctagtcgaatcaacttaattacgatctcgccgcttcatcgagttccattgttccctttgtaacatgtggttttccatcatataatcccatatcaactggattaggactattacctatcaaggggcctgaaccagtataatttttgtcttttattgcttgatgtcgtactacgtagatccttgtaccaacgtaccccaataccctctatatccggtctacgggtatcacccgtcgacagtggcgcgccaggtaggggggcttggtgctcaaggttttactactatgtcatccagcttcgtcgacaacagcgtcaacaccaacctcaaccacgggtttcctgcttcaacaacgttggtgtggactcaagtcggcgaaatcgtcttccccgtgtacaccacgatgccgatctcagccggtccattcaatgaccgaaacgagaacgcagtggcttgaacccaaggcgaattcatgtcgaaagaccctcccggcaa

SEQ ID NO: 11420 - DNA, 4839 bp, Oryza sativa
  unsure (1)..(4839): unsure at all n locations
atccctctaccanaatccgtcgacaggctgtaccacgagaccggcaagagaccatcgccgtcggcgcgaaggccggcaccgtcgcgtttatgatctctctggcgcggcgtcttcctcgtcgacgagctccccgtgctctgggacatcccgctgacggcgccggcgaaggggaattggaataacttcctctaccaattcgatcctactccctccgtttcatactataagactttctagtattgtccacattcatataaatgctaatgaatatgggcaatgctagaaagtcttataatatgaaacggaggaagtagctatttccgcgacgtcaccgtgtctcgaaacagacaagtatgttgagatggaaatctggtcacgaacagagccaatgaataataatcctaccccagtttcttacgtggattgggtgcgcgatctcaataaaccgaagaaattcaaagaaatcgatcgtggatggaaggctacaacatatagcatgccaatgccggtgaattgttcttcttcgtgctgctgtgatgatgattggcagattgactgtgaaatcgatgataattaaacacatcagcttaagcgacagctgtcgttctaatctgagctgcagcgacgacgacgaaaacagagagacaattgaaacaatattcaaaaaacttccaattggaaaccccaccataattaagcatggatgaagatgtgattttcttgctttctataactagccccatgaaaacggataggttggaagttgtgtttgctgttgatgtgaggaagggcatgcttcaaggattagcaaagcttgatgttcgaccgaagaacttggctatcatggtcaccttatgcaccagcgagatttgcaggtatctagcctgatgaatattattacaggtaacttaattctctacgctggtaattaactttattgtgtgtttttatgcgtgatcaatatgtgtgattatgaatgccatgcttgccaattaagatctagggaattattgtgttggtaattttctggtttcagtagggtctagagcttaattcagaagccatggcttgatgacagtgttatgccacaaaaagattgtatctgtctcgaagtacaccaatccgttacattctgtttgcccccttaattaacaatcctcttttgttggctacattgttcttaattagtgagacagtctgatgtgcagatgcacaataatgttctctcatttgaagaaaagaacaataatgcacaataatgctactttactcgcttggatccattttagttgagttgtatttactatttatgcaaacccaactttgatggtaaaatacctaaaattattatatgtacgtagtatgtgccccctccagttataaatatttaatgcagttgattttgatcataaagcttgatcatttatcatatttaaaagtttagtgtaaaaatatgcaaaaatatcatgtttaaagtacctttaacaataaaataagtcataaaaaaattagtgtactttttttaataagacaaattatcaaatttttgtggcaaagtcaactgcgttatgaccagaggaagtaccggaatttctcttaacatacagttggcattgtcttaattgtattggacttgtcgagcttggtgtttttttgtgggcatttctgacatgattttccctaatctatttacaggaggaaccattaactttgacaggacctaataatcgagtacttggtgcactatacagaatagagttacatttaaagattagagacgatggtggtgttgaccaagatttctgcgagaagccgagaacacaatgcatcagctataaatttttagtggaagtagccacaaaatgtccggaccagtatgtgaacaagtataatcgagtggcaaattgatcttctgtatctgctataaaattatgtagctctgtgatggaaagcttgaaggagctcacaattccagtcaaatttctagtaaaaaaagaaaaggaaaactaaaaaaaaagtttaaactcaaagcccactagtaaatactactaatacaactaaggcccatattgggccgcccatcacggcccacgaacagcaacctaatcctcgcgctggaagagacgagacaatacgccacgcgccgcctgagccctcgcgtcgcgacaccgctcgccgcggcggcgctgctcctctccggcgaccacgcgaggagggagaagaggaggaagaaggcgagaagggagcgagctggaagagcgggagagggggacatctaggtcgtcgacggcctcatcaatggggtggggcatgccgacgcggccaccggcgacgtcgacgccgtcgcgggtgcaggcgctgtacgagctctgcaagcgcaccttcccatcgccgtcctccgtcgccgcgtcttcctcaccgtcgtccccgccgcccgaccacgccatccgcgccatctcctctctgatgggtaggtgacctgacctgacctgacccgccgcccaatcttgtttttgttcttgtgttcagagttcggactgcaaattgattgctctttcctctgcaaaatcgttcgtatgctgatgtattgaggaattggatgtgatttttgtgttcagatacaatcactcctgtggatgttggactcagagatgataatctcgaggatggaagagggtttgggttctttgaatcaaacttcctgaagaattcagcgagggttgctagatgggcgcaacccataacctacctgcatgtctacgagtgtgacgccttctctgtatgtggatgttcaaatgttcaattgggtcatcttcttgtaacacttctgtgacagagaatactactagaagttaatgaataattggatatcttctctgctaatctgcaattgcttcgtgtttgttctgtagattggaatattctgcttaccaacatcggcggttattcctctccatgatcatccgggaatgactgtgttgagcaaattactctatggttcgatgcatgtcaaatcgtatgattgggtagagcctgctgttctagcaaatggcaagccaggttatttttcataccctgtttcaaatatttgtttttatttatctactagtatatattgcattgcagagtgatgacttaatgaactcgttgtctctgagaatacaagtgtactgaaaacatttatttcttcagatggtttctacagtaccaagttaatgaacaatattggttgtagcatagtaatagtattgatactacccaaccctattggtcactagtgttgcactgttgctcaggcatcattttagattgctcatttctatgccttgatgatttttcgggttctggtatattaaggattttttttctttctcctgatgtgcagtgaaacttggaaagttacatacggatgatgttctgaatgccccttgtccaactgctgttttgtatccccaaagtggtgggaacatgcactgcttcacttcagtaaaatcatgtgctggtcttgatgtcattgccccaccatactctgaatcttctggccgtgtttgcacctattttcacgattatccattttctagcttctgtaagtgaaatccctcactgtcatcatattacatgtttgtgtcagattcatgtttaactaaatccaccattttggtggaagcagaataccagccatctctggtatttgttcaaaacatatattattagtcacagtgctgttcagtccttttctgtcaggaacagcaatcaccttgtacattatgttcatttatatgagaagaaaatttaatttgttgatatgttgtcaaaactcaaaagtgttcatattcactattctatgtcatatctgattttctcacggatcactccaactgcagcagctggacaagcaaaagtagtccatgggccagataattatgcttggcttgaggccttaatcgtaccggtgaatattaatatgcgccctggcacgtacactggcccaactatacaggtatggcctaatttctacatattattgttgatgttgtcttctgtagcaaccaaaacgtgcttgggaggtgagagttgagagttgagactgtttctgatggaagtaatatttgtctttttttctaggaacatctgccataatcaataaaaatgggcaggacagagcgtcaaactgtgtccaagtgccatctcacaaatacagttcttgtcatgtagtgatgtaaatgtaacatgttcatctttaacttttgatttatgttgtccttcattgaaaaggtgtggctatagtggtgacatagtcaaaacagtttgtactagctactttgtatcatagttaccaatcaaattctgcattctaaattgcttctggagatattgtaaatgtatttatgttaatgtctacatttttctttctatttctatgccttcagagaggctggttggcatggtgtcaatatggtctggaattcaaatattcaacaacccttgttaagatggtagttgagattcaatcaaaatttttagattattgtgctccattttgtacctgttctttccgtatttttattgggattacaaagcaaactcaatgcagttcaagaaagagttaaagtgtgaaactgacaagctggcagctcaaaaagtactggcccaatatgtatgggctgaacatgaactacaacactgttctggcccaatatatatgggccgcatgtgagtcacattactcttccgtcgntcaagcccattaatttgggctcaacacgcaggaccttgccttttttggcttcttgcgggaagttcaaatttttgcaccacattggcgcgggcgccactata

SEQ ID NO: 11421 - DNA, 1952 bp, Oryza sativa
ttcaagaacgcaaaataaactttggtaggtccagaaaaggttatacagactaccagacagatccatactccctactagacatcagtatcttatagattaccagtctaccagtacatataactaaataagtcttgcaggcagattttcagttaagcacgagttcaactcagctgaacaaaaaaattataatctatataccaagaaagaactgcttgagatgtaacagcttcccccatataaatcttcatactacatatcaccttaacacgcggaagtcaccgatacgctcaaacaattttctgcgctgtcgatgcttaaaggcagctgtccaaacaacattcacctgcagttcatagggaccttgctcaaggacacattcttcatcattgtgtccaagaacgagctcaaagattgagccagctccttcagaaacacagacattgagcaccagttcatcatccaaattgacggctacgaaacagcgagtcagatcgactgatccatcagctccaagaactctgttcctgccttccacttcactgtcatacaggatgattttgttctgatcatctccagtagtccaagcagtcactttgccagtgaaaaacttggatacaacccccttaattttgactgcaacagaagcttccacagctaattgaacaggactatacacaaaatcaattctactcaggcagctctctagcgataaagtcatcggctgctttgtatagcagatggcattgtgttctcgcacacctttgcagaaatctttgtcgacatcaccgtctctaatcttcaaattgaactcgaaatacattttgtctattgcacccagcgctcgattaggtcctgtcagagttagtgtgtcctcctataaatagattagggaaaatcatgtcagaaatgccaccagaaacactaggctcgataagtcaaatacagttcagacagtgccaacaatatgttaagagaaatttgggtacataatacatacagataataattttaggtctatgaagttatgaacagcctgtgaattgcatttcaaactcccatgttcaaatgagcaacatgccaatataaattcttttgtttccacttttttccagtacaaaacgtacatgatcccagagcactaccgttgcactggattaacaaaatagtataacaggtaaaagtaccaggatcttgggatatagaaactaaataagtaaatcaaatctcacaaaaaaaaggggaagtcatggattgattgatgttccaacagtaactgtcctgaccctcttagacagcaggaatggactaccaggcaatcagattcagtggatatatgatattgacagcaaggtttaagatctggcagtagggattttaatgtccaggaaacaggatttctatcgtatcaggcgtttcaccagccattatggaactatgcaaccgtccacatttcacttaacaatgtgagcctaattaacaggtcatttatagtgtagaatatcagacagcggattgaaaaggcaatggcatatggatttgaacaataaatagtattaatctagcaaggaggaggaacgaatcagtaacataccggcgaggtgatgatctggggattgttcctgtcacgcctgaacaaatagacacacctgaaatcgtactcatccctggccagcacagtgccaaataccctgatagggtaacccacatcagactcggccaccttgattgcaatcacattgacagagtccatctcccaccagtagtcggggaaagctagtgacttgataggtggtccacgtgcaagctttgctgcaaaatcaagccagagacataaatcaaaccaggaaagtaaatttttttaagacatgtacaataatcaaagaatgaacaagaaccaaggatgatattataacaaacaaatggatggatgtactcacactctttgtccaggt

SEQ ID NO: 11422 - DNA, 664 bp, Oryza sativa
tcgtagatccccaacagcggcggcataataggccagccgtgtaggcggaggcaccaatcggcggcgacggaggcaggccggcggtgaagtcgtagacgcccaacagcggcggcataataggccagccgtgtaggcggaggcaccactcggcggcgacggaagcaggccggcggtgaagtcgttgacgcccaacagcggcggcataataggccagccgtgtaggcagaggcaccactcggcggcgacggaggcaggccggcggtgaagtcgtagacgcccaacagcggcggcataataggccagccgtgtaggcggaagcaccaatcggcggcgacggaggcaggccggcggtgaagtcgtagacgcccaacagcggcggcataataggccagccgtgtaggcggaggcaccactcggcggcgacggaggcaggccggcggtgaagtcgtagacgcccaacagcggcggcataataggccagccgtgtaggcggaggcaccactcggcggcgacggaggcaagccggcggtgaagtcgcagacgcccaacagcggcggcataataggccagccgtgtaggcggaggcaccaattcgcggcgacggaggcaggccggcggtgaagtcgtagacgcccaacagcgggggcataataggccagccgtg

SEQ ID NO: 11423 - DNA, 1847 bp, Oryza sativa
  unsure (1)..(1847): unsure at all n locations
atagtttattactaccatatgacttgcaagcaaattagttcttaacatcaatancagctttctccaaaatgacatacatcttccctcccaaaataaatcacctaatcaagacatagccaggatttgaatctttttgagacggagaggatgcataccaataaagtgcaaacaaagtggagtatatatcaacctgcatccaaacgcttatatttcatacaaacagcccttcattggcaggacatcctattaggtaaataataacatcatataaggatcaggttgcatattttaaagaacctgatgaattgctacaagcctacagcagttttaaattttcaaatgacaacaaaatacatctactggacctagtttgtatgtatgttgtgctctgactgtttcgtgcctactacaatagcacaaaatggtacgctaatgtatacccttaagttctttaagaatcattgtacaaatttcttccgtgttgattggtaggaagagagaaaaaaaggaatgtatccaaggagagctggccaactcataggagaagtgagagctcatttctcctgtatcacaactcagtctcacaagcatatgtaataaccatcagcatgttttgtgcaattgtgcttattacagatttatgcattagcaagctttggaataggtattaccttcttcagaaatctgttcaaaacagcccagcattcagtgctatgaagcttctttagtcgagattgatgatgtctcaacatcttgaggacctcctgctgctcgttccattggggtttcactttgagcttatgattattatatgcaacaacacctgctattgctccagattgcagaaaagatggtgtaagagaaattaatgggctcaaacttgaacaagggtgtaagagaaaataaagttaaaccaataagagaaaaaacagtataatatacctatcaaataaccaattatatttataaaggtaagctgtgtatctgcaaagatagcagctgacagcaacaccacagtccaatccctcacaattccagtaacacgagctgtcagtgcactagttctggaaatgacaaggaagactgagggatttagggtgaaagtgcatatgcagtttaagaacaattttcaagttaattaattatgagatcaagtggtcaagatatatgcaagggctcacatagtacatcatggaaatcaagttaagcctctccctttttcttcagaaaaatctcatgaagatcagtctaagggcttctgtgacgattccacccatctggtaaaccacacagatcaagctgattgtattttcaccaacagatgccacaataaccccaatgctgatgacaggcatgatagcaagcattttacagctcgacaggcatgatagcaagcattttacagctcatttcttcaaggccaagggcagctccgaggagaaacacagctactacaatgctcaaacaaagagtacattaacatcatattttaaattaatagaaacctataacttgatcaaaaaccagagagctcacatacttatttccttcaacatctgtgcaaatgcaacagatatgtaaaggtacgcactgctccctagacagtgtgtcattgaaaacattgctccaattgcaatgaccgaactaacatatctcaaagtccaggtgaactggttgaattagatagaaatattgtagagcacctaaacatgtgctgctgggtagctacaaccaaatattgaaaatcaatcctttccaaaagagtacaagccaaatattgctgtgtgtggagattatgggtaccccatacccacacggcatggttatccgactagttataggggata

SEQ ID NO: 11424 - DNA, 649 bp, Oryza sativa
tcgatacagcgtataacgccatcatcgggagaactgcacttgcgaagttcatggccgcatctcactacgcgtatcaagtgctcaagatgccgggaccgaagggaataatcaccattcaagggaacgcaaagctggcggtacaatgcgacaagcggagcctcgatatggtcgagcaaacgcccaacccacccgccacaactgagcctcccaagaaagtgagcaagacaaataagacgccgaaaccagacggcgccatcaagatcgttccactctccagtgccaaccccgacaagaccgtcaagatcggggcatcactaagcgaggaataggaaatcgcgctcatcaccttcctccgcgacaatgctgacgtgttcgcttggcagctgtccgacatgccgggggtccccagggaggtgattgagcacaaactcatggtgcgacccgatgccaagccagtaaagcaaaaactgcggagatttgcaccagaccgaaaacaagccatacgagaagagctcgacaaacttctcaaagctggctttatcagagaagttcttcatccagagtggctagccaatccagtcatggtgcggaaggccaacgggaaatggaggatgtgcgtcgatttcatcgacctcaacaagcgtgttcc

SEQ ID NO: 11425 - DNA, 1448 bp, Oryza sativa
attcaggacatgatacgcattcaaaactgcctcaccccaccattccttggaaagccctgcagtgtctaacatagcattcaccccatctcagttagagtacggttatttctttcggccaccccatttgattggggtgaatagggaggcgtcctctcatgaataattccaaactcttcgcaaaaggatgcaaactcattggaaaaatactccccacctctatcagacctcaaccgtttgattttcctttcaagttggttttctacctcagctttatagattttaaagtaatacaatgcctcatcctttgttttcaatagatacacatagcaaaatctagtgcaattatctatcagtgtcatgaaatatttctttccccctttagtcaacacgccgttcatttcgcacaaatcggaatgaacaagttctagaggtgccaaattcctcgcctcagatgccttgtgaggcttgcgaggttgtttcgattgaacgcaagtatggcacttggaacctttgaccaaagtgaattttggaattaaactcaggttagctaagcgcgtcatacaaccgaaattcacatgacagagtcgcgaatgccacacattagactaatcattctcgctaatatggttcacagcattatgattattacacatgtcattcaaagaaaagcggaacaagcctccgctatcataacattttccaacaaaagtcccatatttaggtacgacacatttattggacttaaacacaagtctaaaaccttctctacacaatagagagccgctaactagattcttctttattgaagggacatgctgcacgttcttcagctgcacggtctttcccgaagtaaactttagatcgaccataccaacaccatgaacagccgcaagcgacccgtttcccatcaacaaggaggaacctctcccgacctggtaagaagaaaacagagaaatgtcagcacatacatgaatattagcaccagtgtccacccaccaatcaggtgaatgaaaaacagagagaactgtagataatattttaccgtaccccgatgttcctccgccctcgctaatgaccatgttggcagactttctgtctttgcgctcaggacagtccttggcccaatgcccagacttgtcacacacaaagcagtctacctttgcctttcccttgtctttcttcttaaaattggttgtagccttggatttgacatcaggcttaactttcttgttatcgtgggatgcatgagggttcttcttctgtaccatattggcactagaacctccctcaacctttttgccccggacgtcctttgccctcgccttctcctcaacacccaaagagccaatgagatcagaaacactgaactcttgtctcttgtgctttagagaagtggcaaagtccgaccaagaaggtggtagtttggcaataaatgccacccgcacaat

SEQ ID NO: 11426 - DNA, 955 bp, Oryza sativa
aatcttgtgtgttctaattgtcgatgcattaaggatttagatcccatcctaaaattttatacaatgtcacatcgaatgtttaaacacctgtataaagtattaaaataactagttgcacaaattgtgactaatttgtgagacaaatattttaagcctaattgctacattgtcacggttatggataccacatacctaatagcagttgactagatcttggcaggacccaccacataccatgtcttgtatggacattgacctcagatatggatgaagttccggataagaaaagacaaccagagttctacatggaaacgataaggactacttagattgtatccatattggtctccctagttctacttggacaaggggacacatatgggtataaatacaagaccccctagaaggagaggggagacggacaatatagacgccacaaagccacaagccaatacaagccaacatacgccaagacaagtcgccggatatcgacatcagagatatgcctggattgaccctatccggtacctacagaggccggccatagggatctagtgctatctctgatctcgtcgggcactgattcgaggaggaagactaccctgttgtcgactacgtgatgatactccagtcccgctatgtcgacaacagttagataggctaccccaaatattgtactggtgtgattatggtgaataagagcaataccggcttcggtcaacgggatgtagggttattacctgacaatttaggggccagaacttgtataaaaatcactgtctccatctcttttacctcagtcttgcgtatatcctagtaccaacgatccctataccatgcaaataccggaatcgcgacatcaaacgtccccatacataatttaataatgtggtgctacagtaaacatttgctaatggcgtgttaattaggcttaataaattggtatcgcggttta

SEQ ID NO: 11427 - DNA, 751 bp, Oryza sativa
attttgctacgttaagatgcctttcggactgataacagcagggaatactttccagcgcacggtccagggcgcacttagtgaccagctcggcaacaatgtcgaggcatacgtcgacgacattgttgtcaagaccaagacaagcgactcattgattgacgatctgcgggagacattcgacaacctacgacgatatcgcctcatgcttaatccagagaagtgcacgttcggagtaccgtcgggcaaactgctcggtttcctcgtctctggcagaggaatagaagcaaatcccgagaagatcaaagcaatcgagaacatgaagtcgccacaagactcaaagaagtacaaaagctaaccggatgcatggcagcactaagcaggttcgtcgctaggatgggagaacgaggacaacccttcttcgctctgctgaagaagaaagacaaatttgtatggacacaggaagccgaagaggcattcgttgcactcaagcgctacctaacaaacccccctgtacttgttgctccccaacctaatgaagaattatttctttatattgtcaccacgccatattccgttagcaccgtcattgttgtcgagagagagaaaatacaacgaccagtctactacgtcagcgaagctctccatgacgcaaagacaagatatccgcagattcaaaagctgctctatgcagtaatcatgacatcaagaaagctacaccactactttcaagcccacagagtcacagttgtctcct

SEQ ID NO: 11428 - DNA, 1209 bp, Oryza sativa
atgacgggccgtggtgacgtctttgctgagctcgatcgaagcatcaccggcaccgtcaaatttggagacagctccatcgtagacatcaagggtgccggtaacgtcatcttcaccggcaagaatggcgagcacaaggttctcagtggcgtctactacattccgcgcctcaagagctcaatcatcagcatcggtcagcttgatgaaagcgggacgcgtgtgctggtcgaggacggcatcatgcgtatctgggaccgccgccgccgccgccgtcttcttgccaagatcaagcggggacgaagccgtctatacgtcctccgcctcgaggttgctaggccgatttgcttggctacgcgacacgatgatgttgcctggcgctggcacgagcgcttcgggcacatccacttcggctcgctagagaagatgggccgacaagagctcgtgcgtggcctgcctcgactggagcatgtcgagcagctttgcgacacgtgtgtcatcaccaagcatcggcgcgctgcctttccaaaggcagccaagtaccgcgctcaggagccgctagatctcgtccatggcgacatctgtggccctatcacgccggcaacgccaagtggccggcgttacttcttgctgctggtcgacgatgccacacgatacatgtgggtggcgctcctagcagccaagagcaatgcacctgacgccatcaagaaaattcagatggcagccgagactcactgtgggcgcaagctgtgtgtatttcgcacggacaacggcggcgagttcacgtcgcttgagttcgccacctactgcactgatgagggtatccaacgtcatttctccgcgccctacgccccacaacaaaatggcgtggtcgagcggcggaatcagacagtggtgtccatggcgcgcgcccttctcaaacagaggggaatgcctgcggagttttggggggaggctgtcagcacggctgtcttcctcctcaatcgtgcagggtccaaaagcctcactggcaagacgccgtatgaagcttggcacggcaagaagccgatggtcagcttcctacgtaccttcgggtgcctggcgtacgtgaagaagctaaacgatgtgcgcaagctcgacgaccgcagcacacccggcgtcttcattggctatgaagaaggggtgaaggcatatcgtgtcctggatccaaggacacggcgtgtacgtctcgcccgt

SEQ ID NO: 11429 - DNA, 1800 bp, Oryza sativa
attaaggggagattgttagtataatccttgttctagttagttatttggtttccttagacagtaagctataggctgcagctgttactcggttgtcagactgctgctattagtggtagtagtcaattttgattttacctctagcaggaacatagcagcagcagtattgtcggttcagcaaccgacctatccatgtactataaatatagctattgtgctaacataagtaagctttttcagctcattttcagtttcagtttcagctagactattgagtgtagttcagaagtgatcctaccaacaataaccatcagcatattgtgttcaattgtgcttattacagatttatgcattagcaagcttcagaataggtattaccttcttcagaaatctgttcaaaataacacagcatttacgattgatgatgtctcaacatcttgagggcttcctctgttgactttgctatcagcaccctgctgctcgttcccatgggttttcactttgagcttatgattattatatgcaacaacacctgctattgctgcagatcgcagaaaaaatggtgtaaaagaaattaatgggcccaaatttggacaagggtgtaagataaaataaagttaaaccaataagagaaaaaacagtataatatacctatcaaataaccaattatatttataaaggtaagctgtgtatctgcaacgataagagctgacagcaacaccacagtccaatccctcacaattccagtaacacgagctgtcagtgcactagttctggaaatgacaaggaagactgtgggattttgggtgaaagtgcatatgcagtttaagaacaatgtgaatggtgggaagttctatgagactttcattcatcttgggttctctaaataaagacacacaaagtgcaggaaaacaatatgataaagttaaaatagcaaacagttttcaagttaattaattatgagatcaagtggtcaagatatatgcaagggctaacatagtacatggaaatcaagttaagcctaacacccttttttttttcagaaaaatctcatgaagatcagtctaagggcttctgtgatgactcaccccatccggtaaaccacacagacccagctgattgtattttcaccaacagatgccacaataaccccaacgctgatgacaggcacgatagcaagcatttaacagctcatttcttcaaggccaaaggcagctctgagaagaaacacagctactacaatgctcgaacaaagagtacattaacatcatattttaaattaatagaaaccagagagctcgcatacttatttccttcaacatctgcgcaaatgcaacagatatgtagaggtacgcactgctccctagacagtgtatcattgcaaacattgctccaattggaacgaccgaactaatatatcttgcaagttcaggtgtactggttagaaagaaatacatttctgggtttctgatactcattattaacaggacaagcaagcagtatgccaggagttcagcgttacatgctagttaataaacaaatagtgaaatactttttctgaaggaacaatggcattgaattagatagaaatattgtagagcacctaaacatttgcttctgggtagctacagccaaatattgaaaatcaaacctttcgaaaagagtacaagccaaatatagctgtgtttggtggatgttagttgtgttaacttcagggggaaaaaacggcaggcagttgtggtaactcaactgttcaacagtcttctgtcaatgtaaaaccttcattatctaccatgtaaaact

SEQ ID NO: 11430 - DNA, 799 bp, Oryza sativa
tccttcaacctcagaaagtttaatatagtcaggcactcggccaataggcaaacagctaacatataatttcaagaagcattttaaaagcacaaaacactaagtacataatttcttacagaagaaaaggaaatgttctgtaaaccaaaataagatgggtgagaaaaggaagatttccacgtttgcttcccagatgtggtacttagaaattcttctacagaagatgtcatggtgattaaggtagcaaagagtaggatacctcaggttgatagatgctgccattcaggttgaaacagtggaaataggaaacaggacatcaataggtctagctccaaagcccccataaggggaatcgcttagcagggtcatagcattgtagtgcatctctgtttccagtactgcctgccaaccaacaaaaaaacagtggaagtacttaaatcaatgttgtcatatgaccatcagaacacaagaactaagagattgttacaaaccatttggccgaccagtgggttcgatgtaatgcaaggaatctggaagccatgggatttccatttgaagctacagagcacaaaacatccaagatttcaaggcaacgacttcaagacagtatgcgtttatcaactagagagctgacgatgaaatagtgggagggccagcaagaactagcacacctgtgaagtctatggctaccatgaaattcaattgacacccccctaatgagagagcacaagttagcattagattttgtccttaagaaaaaaagatagaaactcgccaccgctgcgcgcgcacacctaacctg

SEQ ID NO: 11431 - DNA, 669 bp, Oryza sativa
ccattctcgcgaaccttccacacacagactatgagcttagaatttcacccaaggccccgggccgaaccggcaaaggggggcctgcgcggtctcccggtgaggagccccacgctccgtcatctggcgcgccaggtaaggggctctgcgtgtgtttttctaagctctcgcattctttcgtgtgcgccaagcttttcctgttcagcccaatggccgaacaagcaaaggcgcacaacctctctccgagagttagcggtgacgacgggcagccgaacccacgccgtcgagctcgtactccaccgcccccttcacgccaaagtcctaagcgggaggaggcgctcgagaaggtcgaaagatccgcgacttccacatccaccggtgaaggggaaaggcggctagatggggagcgtcgcctcctcgtctacggcgacggcagcacgccccaaggcgcgctccaagctgcgggcgcgctcctacgtcacccggccattgtccctgacccggagtcttcagcccaacgttggctggacgacgtggccaacttggtcatgacggcacggcagcgcctaagtgctggtgggcggtcctccgtcaccaagaacctctgcgctgctaccaccggcttcgtgtcgtcaagcaaaaggcgcggccagcggcggctgttgcttcgca

SEQ ID NO: 11432 - DNA, 2422 bp, Oryza sativa
  unsure (1)..(2422): unsure at all n locations
acgtgaaactggggcgtgtcctcattgatgggggagcagccctcaacatcctttcccccgctgcctttgacgctatcaaggccccggggatggtgctccggccgtcccaaccgattatcggtgtgacgccgggtcacacttggccgctaggtcatatcgacctcccggtcaccttcggtggatccgccaacttccgcacggagcgggtgaactttgatgtggcggacctcagtctgccctacaacgcggtcctagggaggcccgcgttggtgaagttcatggcggcagtccactacgcctacctccagatgaagatgccgggccccggtggccccatctctgtccatggcgacctcaaagtcgcgcttgcttgtacggagtagcgcgcggaccacctcaccgccgcgtccaagcccgaggaaggcgacgagaggcttggcacctccgcccccgccgccccgaggcagcggatagtcacatgcgacgaggtcccggtcaaggaggttgccctgggcgacggcccgtccaagaccacacggatcggtggtcttctggacgttaaataggaagacgcgctcgtctctttcctgcgggcaaacgctgacgtcttcgcatggagaccggcggatatgcccggggtccccagggagctgattgagcaccgtctcgccgtgcggtcgggcgcaaggccggtccggcagggtaaagtacggcggcaggccccggaacgtcaagccttcatccgcgaggaggtggcgcgacttctggaggccggattcatccgcgaggtcatccatccggagtggctggcgaacccggtggtcgttcccaaggcgaacggcaagcttcgaatgtgcatcgactacaccgaccttaacaaggtatgtcttaaggacccttaccccctgcctcgcatagatcagattgtcgactccacagcggggtgcgaccttttgtgttttctagatgcatactctggttaccatcagattcgcatggctagggaggatgaggaaaaaactgcattcattacccccataggaacttattgttatacgacaatgcccttcgggttaaagaatgcaggtcctacttttcaacgtactactcgaatttctttgggtagccaaataggacgtaatgttgaggcttatgtcgatgacttggttgtaaagacgcgcaaccaagagaccttactctcggatctagcggaaacttttgagagtctccgctccgcccgcataaaactgaaccccgataagtgtgtgttcggtgtacctgcgggcaagcttctcgggtttttggtctctgcccgaggcatcgaggccaaccccgagaagatacgagctatagagtggatgcgcccccccagcaagcttagggatgtgcaatgcgtcaccggttgcatggccgccctaagtcggttcatatcgaggctgggagagaaggcgctacccttatttaagctcctcaaacgctccgggccgtttacttggacggaggaagctgaacgtgccctcactcagttgaaggcgtatctcagctctcccccagttctggtcgccccggagccaaatgaacccttgctactctacttagcggcgaccccgcaagtggttagtgcggcgttggttgtggagcgcgatgaggacaatcctcattccgcgcaccctcaccctgtgccggctttggcccggagagagcanggaggagaggcccccgagccgaacggtggcccaagggccccgacgaccggagcaggccctctgcccgcttgtcagacggtgcctggtgaccccgacccccagaatggcccgagggccactgcgggaaggccgcacctatcgccctctgacccggaggctaaccctgtgccgactcgacccgaaagagagcaggagaaaaaggcccccgagccgaacggtggcctaaggcccctgacgaccggagttggccctttgccctgcttgtccgacgacgccaggagcccccgacccccaggacggccccgaggccactgtggaaagcccgcccctatcatcctccgaccccgaggtcgtcggcacagaagacgagtgcactccgcgagcccacttggacaaaaagcgccccagggatgtggcccctagcaaagaggatcggccccaccgaaaggtgcagcggcccgtctactttgttagtgaggccctccgggacgccaagacccgataccctcaggcccagaagatgctttacgctattctgatggcttcgaggaaactgcgccattatttccaggcgcatcgggtcacggtggttacgtcttaccccctcggccaaatcttgcataatcgaaagggtactggacgggtggtgaaatgggcaatcgaactttctgagtttgatttgcactttgaaccacgccacgctatcaagagccagg

SEQ ID NO: 11433 - DNA, 4647 bp, Oryza sativa
gatggctgcacttacaaacttacagaggcagagttccatggaggccaaccttggtcatggcccctccagctttagaaatattgcattattggagtccccaagtctttgatactctaatacttcacaaaatagcacaataaccgttcaaagaagctatcacactgtctctctccaatttattgttcaagctccgccgctgcaagcggagcaagttgctgcgcggtgtttcttttttttttcacgaacacgcagtgtgtgtcagcattagaagaaaagagttttagttatacaacacaataagcctgaccggcccttgccaagtaacaagggagggatagcaggggttgaacaaagagaagggatacaaactaacaaaattgctgctcctagacagaggaagaaaaaaggaaaaggaaccccctatcctcccaataggtcccaaaacgaagcggcactagctaaagactagagcgctgtttctgttaattatcacaaactaaagtacccatgtaactcgccagagatagaagggaagatgaggtcaaatcgtgatatattgcttagttatgagcatttaacaagagatgcaaggaaggtgggaagtctctctttgttttctatctcgatcgtgtgaatgaatctggacaatatttatgaaagacggcacacgaatccaggcagatgtacaagggattggcgtgacaattttacacaaaccaacggctaaaaagggattgcaccacatgtacatcactggagcaagtgaaatttcaccataaaagcagccagctttacgcgagataatagcgaaaggaggagagatttgctccggtccaacaaaaagtacatcgaggtaccagtacctcacggtaccaagtcgtttctgatcgttggatctaaaaatgcccattctatccagctagattcaatgatcggaaataatttagtaccgtgaggtaccggtacctcgagataaccggaacaaatctcaaaagatgaagccctatcgcgaccatgaaattcaggtgaccaaatccactctagaggggcttcatcctgcgaccttgaaggtgcctgccgcaagatacataataaactggttggttgttgctagcattaaaatcaagagctgcatatatgccaaattaaacatgtccactgaattatgaaagtctaaagcttgtttgagaggaagaattgggtcaggcaacagcttaccaataagatgtatgagagctcctgacgtcttccaagcctaccatacaatagcaagccaaccattgggctggctgaactccatgaaatattcttgtttcatctctcttaacatcaagctaaaaaaacatgttgctgctacttcattttatctactcttttatggaattcagcatgtcaactatctagttagtcatgtcaactatcttgagaaatgctgagcaaaaaacttagtagcaggaggctagtttgtaacaggaaagctcccgatgcctcttaggcctaactattatatatggagcaacaagccactggagtggtctatctcccatcaactcttcaatatttgtttttcagtctggtgtcctttctcttgttatatgtggaacaaaatgatacggtcatgtagaaagtgttatagctttgtgcatctttggatgccaggatgtaattattctattatcttaaaaaaataaaaaatatgatcaagtatgatttaaatgctcatcagttactattagctaccacacactgatgcaatagaaggttgcagaacagacacgatttggtttggtggcaaattaatttaagtggtgtttttttgaggaaacctacatttacgtcgaaaaagttagcccattcgataaaccaggtcatatccaaccatttgataggacagatatcagatagctttgtggaagccatggattgttatttttttcaagaagaaacctccttttgtccatatttctagtcatcaaattggcggctttgtactttgttttttcttgatgaaatacagaatacacatttcgccacttccaaaaaaaaaaaaacagagtgggtgaattatgtttttcagaaattcagcatataccattccaaccacagtcatgaagtgtacaggcaggcaacttcgtcgatgggcttctaggcgacgaccaacataagaggcctgagagatgcagtaactcatttttatagaagtttctaagaaaactttcaaggtaaaatggtgatgacgagaacttatgcgtgtgagctgatcatggtacaaagatcacatataaaatggtgaccagttacatataaaatgcaatatgtttccttgatgattgaggaccctgtagctaatcatgtctagttatccgataaatgttgtggtaaagaagttgaaggaatgggctattttgtagtgggaaagctcccggtacctcctaggcctaactttcaacaacaagccactgtagtggcccatcaactcttcatctctttctcaacctggggtcttggatcctgtcttttataatgtcggaaaaaaggataatctgtactccctccatttcattttaggtgtagttataatttttcatgcccaactttgatcgtccgttttatttgaaaattttttaaaaaaatttaaaaacttaagccatgcataaagtactatttgtgttttatcatctcataacaataaaaatactaattataaaaaaattttaaataagacagacgattaaagttgggcacgaaaacttatggttgcacttaaaataggatgatcgaagggagtaataaccgatcatgactttgtgaatcgatcgtcagatgcaacgattgcgatattattattacactatgtttgaaagattgagtgtcatgtttcatacagtcgatttcaatgcagcaaggcaacattcacgcaaggaagagctgcagacaaaattaacgaggcgaggatttggatgggtgcgtcatggattaatacaatggaatacattagcagcatgagatgatccagcaataatcaagagtgatccaaactaaagagttggaatgcttttctttcgtgtatgaggtcctcttttcagtcgaaatactacctccattttttaatatatgacacatttgactttttgacaaacatctaacagttcgagaattacatcgctaactctagcagagtcaactacaactgttcaaccagatcacccgtgcatcagcggaatcagcagttgaactgttgaagttaattaccagcgtctaagaagatccacgagacaacagaaaaggaagaagctgcagtttgctccctagttgaggatatagaccagattgactggacaataaactgttctgcaaccttgaagaagcctacgagatgcagaaacatgtgtcgcatgccaaaacatgtccactgtgccactgcaccagagttctgaaactctgaaacttgcttgagagcagaagtgaaacaacggttatgcaacagtttaccaccggcgtatctgacagctcctgatgcctcccagacctactatacagtagcaactgggcgatgagctccaagaactacttcttttgttcactgatgacttgttgttgttttttcactaccgctgtcaatatatgatcaatgtttactgatgcccatcacttcccaaactaagaaatgatgtcactgaataaagacggccagaaggtgaaaaatgcatttgattggttagttatttggacaaacagaagcacgctaatgcgacagcaggagatgcatcgacagatgcatggtgacctgttacatgttatcgagtctatatagcatctgattgaagtgatcatttaaatacagctatattccagttcaatgcagcacataacttcttttgtactggtggctaaaatgggtttgcacaagcggggacaaccgcctttgagaaaatgtctgtgaaaatgctatatttccataggccgggaagcaaccagctgaggaaatgcatttccacattttaatttttcaggtgaaagaaaggtaaataaattttgtattttagtatgtgtctatacatggtcaatttttcatagctatgcaaaataaatacgaatggtttggtggttatagagagtaaggtgaaaatgcgtgaaactggtaattatgtgaacgaacagaagttcatgcaatttactctgaacttgtgaggacatttgcaaaaacaaaatgaacagagggactgtgaattttgtttttcagaagttcagcgaagcgctttcaaacaacagtgcaattcatgacaatgctgacttcgtcaatgggcttccagatgattgatgatggacatagcactagaaggactgagcgatgcatcaacccatttgtaactatcaatgtttctataaaggggggaaaaaagatgctagaggaaaaatggtgaggttaagaacttaaatgagcctataatgagagaaagatctatataggcaaggtgactagtcacatgtagaatgtaatatgatttcttgatgcaccattcctgtgtggttggtatcttgaaaattcccaagacagttagcaaagaacacactgggaattgacccattgacaggacatttcccggtgtctcccatacctaagtgtcctagaagagatttgctccg

SEQ ID NO: 11434 - DNA, 3449 bp, Oryza sativa
tcatctccctcaatggccgatgatgggggcggcaaaaaccggcgacgacgaggctcgaaggcggcggggtcggcggggttggcgacggcaaggcgcggggttgccgacagcaaggcgcggggtcggcggcggcaacagcgaggcgtggggtcaacggcggtaacggcgagacggcggggtcggcgcggctcccctcccctccctcctagattcggtcgaaggggggaggggggaggagaggtggcggcggcggcggttcccctccctcccagatccggccggagggaggccggggaaaggcagcggcagtggcgacagttctcctccctcctagatccagccggagggaggctgggggagggcggcggcgacagttcccctccctcccaaatctggctggagggtgccccggggagggcggtggcggcggcagtgcccctgcgcagttcccctaaccctagatcggccggaggtgggtaggggcgcgggtgtggtggcggagaatttttcttgttcgtcgagatgattttcacaagcgggtgactgggccatttgcgaaaggcattgacatacaggcggatcgttccccgcctgaaaaaaatcatttgtgtccgcctgaataaaccattttctagtagtgagataccaaattttgtactaaaaatcttggttcctctcgatacctcttaagaactataaaatttcaaataagaaattaaagcactaaataaacatgtttggatcttctcaaaaaaaaattaaagattattgtattccgttgattgtatcgtgggtgctgaatattgtgccttcaagaggccccagtcactcatatatagagatgatgcggggtaggattagaaggtagaaaacttagccatatatggctttagttttctggtctctattttttatttatttgaataggattccataccctatattttgtagtacaagaaatcatactatggcctgatttagttcctaactttttcttcaaaccttcaacttttctatcacatcaaaactttcctacacacacaaactttcaacttttcagtcacatcgttccaatttcaatcaaacttttaattttgacgtgacctaaacacaccctaggctagtttgagtctaccttctatctcctagatcaggcccactctcccttcatagccattaattatgcctgtcgggtgggtacccagatccatgatcgctacagggtcctgtgacttgcgaaattgcagtacaacctactagcaactggatcggttggttgctgtgttcgtttatcgcggtcattgcttcaaaatatcatataggtgtaggcactatataggtgccgaaagtgctaaaaccaaaacctatagtcatttttccatttttacgggttgaaatctcaaaaaaaaaaaaacctttaaacaattataggtgtcggttaaccgacacatattctataggtatcggtttttttttaaaaaaaagacacctttaatatattaatatattataggtgtcagttaattaaaaatcgacacctataatatacggttttaaaaaaaaagatacccgcagaaatcgagctgggccgacaatcgagccaagccagtttttttttattcttgtgacctcaaaggtgccgggcacctttaaatattcacatcagtgccgcctccgtggtgtcgcttgggaaaaccggcacctatgtggggttcccaaccggcactaatgtggttttatgtggcagtgagttgggaacggtttcctatggcatggaaaacggaacagttcattagtgcgattaattaagtataagtctaaaaatagaaaatagattaatataaatttttaaagtaactatctaccatatataaatacatatatgtatatatatatatatataaatacacatatatatatatatatatggtgtgctacctagttacgtaacacctctcacagagtctccttgcgtgtccctactaggcccagcccacccccgcctgcacccaccaaagtaatttttttactatgattagcaccgtctatttatatgtgtttctatccggcagtaaccatccaaccccttatccccgaaatttttggatcatccactcagccggcgaacgcctcaccctgccgtcaagatggccagaccagctgggatgcggtgaagaaggagcggctagtgcagtcagcacagctaggggtcgccaaactccacatcggagtggcgttagaggacctgccgttgagggggagccgccgtcatccgatcagatctggagccaccgtcgccatggctctccaccgcggaggcctaggcagccaaggacacgaggtgactgccaagctcctccaacgcctgccgcagcgccgtccacccctcccgccatcggcgatgttcatgaaggaaacgggatgtaacccgatccgctgggaccagcgccggtggcaccaggagagccgcgacaggtccggggcatcaggcatggcttcctcctccttgctcatcacggaccagcgctgtatcggtgagacctggcggctggaggctggccgtccctgtgctatgcgtggattccaggcagatttggcgctgatggctgacattgcctgcgcagggccacacctgctgctcgtcaatttcttccctatctacaagctgggtcctcaccaacacctgcgacacttctcatgttggtccctagctctgctctcctttatctcctctctttcaattgaaggggtgggtaccagcaaccttcttcttgccagtaaaacaaatagatttttcctcttcgattgtgcggtcttaatttgcaacagtatttttttattttatttttttttgcatttgctcattgattttgttgtagattgccggcacccaaagacagccgaggacttcctgaagctgagccccggccgcaaggttaatttttctctagacgcatcttgattggtatatgtattagtgttaatcctgagtaacatgaccacagaagaaataatctgcagctgtggttggtattcacactccactatgattgatggaactgatggtttgggtgttgctgatttgggagttggtgacattgaaacaaccactgattgcacaaacacatcaaatatatgtataagttttatgagtctattagtatatgttctttaggttatttttttttgtactagtcttgtatctgacattttgaattgctgacaaatacatgtatgaaattttaggttttttgctgtgccaaaggaataagatgaagtttctgaaatttgatatccactgacaccctgctgaaatcaaacatggcactattattatagcagcaaccgctgactgctcactcaaacacatcaaatcctcaaacctcagctgcgatgctagctcatggagcttgagaccgtgtgttctgcatgcagagtactcgagcata

SEQ ID NO: 11435 - DNA, 714 bp, Oryza sativa
aattcctgcagccccgtagtctttcattttagtatctacatgtgtatatatatatctacgtacgtacgtacctgcatatactatacatacatgcgtgtgtatactccaacctagctagtatgagtgtgaagggagtatactatattatattatttgtgtgaataatgaagctctgcaggcatgctgagcatggctttgctggagctagctagcatatgtaaacatgtacctaaacggattgaaatcctctaacttattttcatctgcacttatgctcaaagtcagatagaaataaattagaggttcctcttccgtacctagacgcgatcatgcacatgtctctccctgcctgcaggctgcagcagatcgataggcaaattaaagtggtcagcgtaaacaaatattgtaaatttgtttggtgctccatggtgcccgggcaccattgttgaaattgagtatatacccaattcaaatgagtatgaaactttttcaattacttaggtattaacattaactactttactaactagtttaaagcaagtttgaactgaatttgaacttgtttttgttagattttgattctaggtatatagcatccatacatataattagttaggtatgtaatcatggattgtgaaataaagttaaatttgagttgttttattgataagtataggtatgaatcaaattattataactaggtatatactcata

SEQ ID NO: 11436 - DNA, 624 bp, Oryza sativa
tgcaggtcgactctagaggatcggtgagggaacacaggtcagtgtggggacaggggtcacggtggacacgggggtggctgtctctccacctcctcacattatgccaacaggaacgcagacacattcagacgcctttgcagaaagagatgccagaggctcttgaagtcacaaaggagaggtgtgaagaaatcctgcatctcagtcccacacaggcagctgtctcaggctttacaggtgatgagagactcatcagagccctgggcactgttgctgcacgcggcctgagagcagctccctccttttccacctgagctcttcctcctacacatcatagcggtgaccacagctccaaggacagctaggacaaccaggacagccaggccagcaacgatgcccatgatggggatggtgggctgggaagatggctcccagctcagggtgaggggctcttgcagcccctcgtgctgcatatggcacgtgtatctctgctcttgtccagaaggcaccaccacagctgcccacttctggaaggttccatctcctgctggcctggtctccacaagctcggtgtcctgggtctggtcctccccatcccgctgccaggtcagtgtgatccccgggtac

SEQ ID NO: 11437 - DNA, 14192 bp, Oryza sativa
tatgtttccttcaggtaatcaggtcaacagtaggtgaggaggaaattaattggctattatttgactagtgttctttaattttgtttgattatgtattggccaagttaatgcatatcaaggaaaatgcagtgaagcttgttaaatacgtgatccgaattttgagcccacaatatattcggattaaaagctgatgtttttgtttgcttaaccgccatgaaatgtacatttgtttgtctttttgcccaaactattttttctccatctgctttcaagcaaaacgggtctattaattatttgctcttcttgtaatcggtagaatgtacaacgaagaaaaacatggctaaatcatggcaagcggtgtttatcatcccttggcgtttcttttgataaatcgttcaccttgaagagtactctctccagtaggtaggatgcccagcatcctcaggtacaagaacactcagaagaccaaactgtgcagtctatccaaaattcatccccatttcctagatgaatttgtcgaaaaccgtaccctgtcgaatgtaacatgacaattacaatcaccagggacaggcagaagtagcatgtctgcaaggccagcaataagaatgagctgcagcatgtctagcatttgtttggtcctctaaagtagtaaccgaacaactcccggagcctcccatgcctagcatatagccacccactggcctggtcctcaactctctagtacatcactctttcatttctatctgtcaattagtagcacttgtgcccgttcatatcaccttatatggagcaaaaacagattgctttcaggtcagtagttggtgaggaagaaattaccaggacctgaaaaaaaatatttgttttttttctattctgtaatagcagccaagtttgttgttttcagagtttcagtaatttgttgttcaattggaagagccatatgcagtaatctgcaagggtgtaaataccataaatctgcaggtttcatctctttcgtcatggaccagaagagcgcatatatcttcagtagatttttactgctatatgatcgatgcaattataagtagtccaacaagtaagtatatacggtattgttcaattgggcaccttctaggttaaagttgaaagtgagtcgtattgttgtcaaatctatctatctattatatactaaaagtccattaaacctgctacaaacgctcctaagctgccaagtggcgcttctaaaaacactcttaggttgccacgtggcagtttataatctcacaatcgattttcatttaaattgatgggcccattagattagatctattgcttcgtcttaatattctctgtagatatgggtgaaaccgtttacaccagaaaaacatacgtacgtactatggaaagaaacgatcaaacgaacccttcagcatacgtacgcacgtacgatgcatcgtaccataaatagctattaaaaatgataaaagaaagatactattcacttgaaaaaaaatacttatatatgcacgagtaaaaataataaaagctataagacctaaaaaatatataagactagaaaatatatgtacgtcggtataagaaaataaacgttttttaaaataagactttctatactataaaaaacaaaacttattactccacaaataaggtggtctagcgtttctacaattgccacatgcatggctctctacaattttgctatcaattttcatttaaaatgatggatcattattttagatcattagatttgctcatttcctcttaatttcctcggtatacaaccgaatgttctattgaaaaaaaaaatacaaagacaaatacaaatagacgataataaacctttagatattgttcccttaaaaaagtacgtacggatacacgagtaaaaataaaagccataatactctaaaaatgtatatacgtcggtaggaaaaaatagacggtcttttaaaaatacgattatctatactataaaaataaaatttattactccacaaatattatcatgtggcgtttctgtaagcactcttagaataccacatggcactctataatttcgttgtcaattttcattcaaaatgatggatccattattttatatcattaaattagcctgcttcctattaatcgagagaaaccatttactggatgtttgattgaaaaacaaatataaagaaccatacgtacatacgataagaaagttataaagccaaaaaaatatttatcagagtacgtactacgataaaaaaagctataaaacaaaataaacatttagatatactgttcccttaagataagtatgttataaatggtctttttaaaataggatttgctatactataaaaaatataatttatcactccacaaatatggtcatgtggcgttttagcaagcactcttagaatgccatgtggtactctataattttgttgtcaaatttcattcaaaatagtggacctattattttggattatttgattagcccgcttccttttaatctcatctatacgagcgaaaccatttagtgatgttctattgaaaaaagcaaagaaacatacgaacacatgataataaagctataaagcccaaataatactaatataagttggtagaaccatcgaaaaaatatagacgattttaaaactaggattttctatacgatagaataaaatttattactccaaaaataaaaatgcaagttaaactagatcaatataaaaaaaattaaatgtgtttacacgcaattttttttgattatttttaaattttatagtcaacttataaggtgtattcaaatcttgataacataacatagttatattataactaaatacattggagctgacatataataagtaatatcataatatttttttaaataatttaggcgtcatataatagttaatgtcatgataatcttcgaaataatttcacatcataatttatggtcaaatatcacttaacaattatataacactaactgaaatctacatgcatgaaaaatgaaacaacattatgttttttaattatatctgatttaattttagtttgtgtgagattaagattctcaaagttttttttttatttttcataactattggattggtatgctcaggcaatgatcttgctataatacgaccccttaatctatcacaagaattatggtcatatacgtttttctttgccaaataggtttgataacaaatgaacaatcctataacatgagcatgaaactattcatgatatattttcttatagtagaggaattataatataatggtcataagtgataattgatgaatgtaatgccataaaccacagtgacataactataagtgcacctcaacaaattagttattataaataattttgggaaataaataaaattttagaattagtaaaggtgtctcatgcaattatggacaataggtgatgaaaacaaacaagatgctaaaatatagatctttgtcaaaatataaacaatgaaataatactctgaacattgtcacggtcacgtgtttgtttagctatatatatttttagtgatcaacttcactcatttctaaagatgacattgtatttgtaccataaaaattaagcagctttgattaacaccataaacaaaattgtgtctaaataaaacataaagaaactatattttatgggaataactgaataactatttacatcacatccatcttctctttgtttccctagagggcaccgagcatggataccacaactatagcgtggggcacacatatggttgacttgaggcaggctcagtggaggccaccattgataatagtgctcaacttcctacttactggtgcaatcgtctttaaggatgccgataatgaactaggattaattcaaattgtgctccacactggttgtgagactgtgagaggcacgactatgtcaacccatgcttgaaggaatcttgatggttccccccattagagggacatgtctattttttaacggtgctatcctaataaccaatagaagcattagttttagaatatttatcagtagatttagaaataagtgttggcataaacatttaggtacatagttgaaataatgttttatgtattaatgatgtattagacttattttggtggtttagatggagttccatttattaaaatcatatctatcttttaagaacaatgataataaataatggtgataatagcagagtttacacttacctggacaaaagtgaattttgattaaatctaagagacattcttatcatttatattaaagtctacggtctatttcacaacataattttttgttactacgaggcaaaatctataatttgttatatgtatatggtgagatatgacttaattctcttagcattatttatataaacaataaataagatgcacgcgcatctgcgcgggcttcctttctagttacataaaaaaaatatcatcatcaaacccaaatccttttattttatttttattttgaagactaacccaaatcatgaaaggatttccaaacataccattttcgctcagataattttttcctaaatagtaatatgtcaagtgcaatgcatcagaaaccacattgtgctctaattaatctatcaaaaggatatcacaacgatattgaagtccactccttgcttcggcatcctctccactgtgtacttcttgtgattgtgatgttaaatcgtggtgatggactgacggtcaaattcagtgtcatgctgcatggttggagcggcatcagaatccatgcacggaacaatggtcttcaagatatcacagccctgttttcccacatcaccaggtatctgaacaatgtcattgcagttcaatgcagcaactgctgttgcggtgtttcgccgaagtagaagaactcccgatgtctcctaggcctaccatagcaacccatgatgctcataacaataagcgatcttattcactctctgtcagcttgtagcacttatgcttgttcatcgatatctcattttgtaaggagcaaaaaggggagtgagatatcatatatatgattcgaagttgtattcaatgtgcatctatgaattagtagcacttgtgcagttgtgctcgtgcatatcaccttatatggagaaaaatatattgttttctggtctgtagttggtgaggaagaaatgaccaggacctgaaaaaaaatcttatttctttttctattcttagtaccagccaagtttgttgtcttcagagattctctaattgttgtttaattggaagcgccatatgcagtaatctggaagggtgtttactactgtaattctgcaggttcctttttttttttctcaaacatgaatgttcaattgggcaccttctaggctaagataaaaagtgagtcatattggtttcaaattacataaaaaaccaccatgatcaaacccaaattctttatttatttgaagactaacccaaatcatgaaaagattttcgaacatatcattttcgttcagatattctttttcctaaatagtaatatgtggagtgcagcgcagcagaaacctcgttgtgctcgaatctataaaaaacacatcaccaccatagtgaactccactcctggctgcagtgtctgcaccacttcttgtgtttgtggaaccatgttttcgcaagcacctgctgatatctcagcagtgtctttgcagttcaatgcagcatctaccagtatagaatttgacataagtaacagaactcctgatggctcctaggcctaccatagcaacccacatgatgctcatcacaataagctctttcgctctttaccagcttgtgtagcacttctacttgttctttgttcacctcatcttataaggagcaaaaaatgggagcaagatatcatattatgaatgcataaactgtttccatgcaggtaaaattgtcaaatctgaagaagtaaatgatcacaagaaattttccttaccaaatattaaccactcttattcacaaaaaaataataataattaaccacttgcttagcaacccatgcaagaaatggcatatcatcaacctgaccgtaaacatgcacctggttatataactttacacaatttttgaagaattccttgggccaaaagggagaaaaaaatagttctatattctaagagatttgcttcggtctagcaaaaagtactttggggtactgatacctcacgataccaaatcgtttccgatcgttggatctagctgggtaagatgggcactattagatccaatgatcggaaatgatttggtacctcacagtagctagacatgatggacattgttagatccaacgatcggaaataatttgatatcgtgaggtactagtatctcgaggtactttttattgaaccggagcaaatctcttctaattagaaataagactaaaaacctactccttgcattccaaaatataacaactttagtgccttcaagatttgtcccaaaataaacaacctcttcttcaccaatattcttttaccaaccaatcacaaccctccaccattcaatttttcctaactttacttcttatccaatcacactcttctcccatttaattctaccaactttcttaataactgtgtccgacccctaaatttccttatattctgagacaaagatagtacaagattttacgtgaacacgtgaagctaagtgactggaactggaatttgagtttggaatcgataccatatgcacctgatctcagctgaacaaattaagtgcaaattctgaaaatctgcaacgggtccaagaagagagtgcggaaattgctagcaactcaacagagaccgagactgagacaatccagtatgttgacgctttttcgtgatagtgttgccattgcttatcaaccaaaggaactccagcatggggcacacagtggcagtgaaatgcaggcatccaacttgattgctatgtgagtacatcaagaaatggataacaaccagaaactccgcttaacttttgattgataagtacatgtacatgaagaacttcatcagtacagcatgtcaagaaaaggagtaagtcatgcctttatgcagatgaatatgaggaaggccaaccagaaacaaaaggatgtgacccttcataagttcccgttgtggatggactcacggaattacaactcctgatgcctcctaggccgaccatagctacccattgctttgtcttttgcctccaggaaagggcttatatatttcattctctcttaaacaacatttgttcatttctcagttagggactctgttatccttatatgtgtatctgcgtgtataggtttatgatcctttatctccatgtatatatagtatttgatctgatgcaatcactcaacattattgttccacttcaatgcaaagacaacaatagtgtggagaactgaaggggattcaaattaaatgatcaaatcaacagcttcaggaatagcatgaaggatcagtagataaaggatattacacaaaattgagcataagttcatacattgatataattgaccgtacattaattacaattctttaaaattgtttaacacataaaagtactaactgttcaatagtattgaagcagtgatgcatgatgcaagcgagccatacatgtatgatttagtttagccacttcaattaagttgttgtgaactgaaagcagcgagtcaatccgtatagcctagctaacaatcaatgagagtcatcatgttaaattgtagatctttgatcagattagcttgacaagcaacaattaattgggttagggtacggtggaacacacgccggcaaccacctcgttcgttgaatccatctggcctgctacgtcaggaaatgccctttctcagcttggatgttcctacgaactgcggtattcttgagccagagcagccagctgatggtggaacagaaatggcaccatcacatgctgcgggtctccttgacgaggatcttggtgacaccggcaccgcgtgacatgacaactcctgatgcctcccaaggccagcaaccgacgctatagctgtcttgagtgggcactattccatatatgctccttgaaatgttcctcatcttagaaatgtttctgctagaacttgtttgaagaacttgaagatgacgttcataacatgaagtgagaaagccaagattttctctcctctcgagtaatttaccgtccttgagaaagacggattgtgccattatatcttctcatacatatatatgtttctaattccacatcatcatgtaattaaattaatcatgatatgagctatgattctctcttagtccaaattgccttggcgagggatctcatcgacatgcatgcctgttgtcgttatatttgtaaaacacacctcttccttaataaaactggctagcattcttttttgagggaacaggcaaggagctcctacaatttcagtatagaagaagagagttgatgcaatttataaggaaaaccagacccgaaaaccttaataatggcataggaaaaccggcgaaaaccctgacattgacataccgaacctaagaacaacagtccaacaaggaaaaaaactactaaaacgaagcctgcaagaaggttacgtcgacagaataacgacatcgtccgatccaaacgaatctaaggtttacacttggagaattcccttgaagtacagttgaacgagaactccaatagcaacgccttcaagaaggttaacggtgcccaacggcatcaccgttgctagccccggcaagcagagcaaggttttcaccttagagtccccttctaccatagcaaccacaacagaagccaccaaatgccacctgcacaccgaaggcacttgcactattcaaatcacctgcacaacgaccggactggaccgagcggcgaagcagaactgatggctccaccagacagccacacaggtgacacaaagatgatacaatccaattgtgcccacccctagtctctgcataaaatggacacatccaaaaaagaaccaggtaaaacctcatcccatgcacaaaagtttgacagaaacataaatattagtggctaacaattcgtagactaaaccgtcactcatgctcctgggtaaaagaactcctattccacctggtccaaccatcgtgaagcaccgcaatagtatcccgaagtcctggtgtgagtagataagttgggggctttgatcactagcggttctatcctcgttccatgtggttgtcgttgtcaccgatttgatggatccatctcaatagggattctctcccgctcgttttctgcaattgtgcagccactgtaggttgcaactattgttgtcagtcgcacgacctccatatctgaaccaatttgagcgagaactagtttcaggtgaaatggtgaggcaacaacaacatagctttgaagcaatcagatgatttctcattccgatgcctcctattcctttctttttgttgagctggtcgaaggaggtcaaccaatttcattaagtttagggaaaaacaaggggaagtgatgttggtccccttggggcccaatttgtcggcatccattacaaaaaaataacattttttccaaatgtccaaaacctatttttgcgtgtggttgagccactcgtttgcctgaaagtgtctgcgaaaatttctatttttccatgcaggcgccccgcacgtggaaatccgatttccgcatgcgggtgcttatgtcatatgcatgcaaaaattaaatccaaaaaaaacccaaatatcgaagtcctagctcggtgtggtccgccgccgctggatccgcacggaggagtgccccgtgttcgctcctcgcttcccgctgggctcctcccaccgccgccgccagatccgcgtgggggatagccccgccgctaccaccgtcgcccctggcctcctctgctgggtagtggagggctgtcccccacacgtcgacgggtaaaagaggtccgtctgggaaaatagacttattttcgcatcctttaagaggtctgcttgcgaaaatagattttttgcatgcggggcaaggagacgtatgtgaaaatggaggtcaatttttgctggcgcgaccagttacggtccacctgcaaactataagggtcctcgtacaatatttttttctgtagtaatgatcttattgtagttgtatttgtaaaatgcctcctatatattccaattattctgctggtagcatcatcggaggatggacatggcagacaccacccagttgctggcttgctgctggcctgatgataacaaggaaagaagccaaggggttcggagattaaaacaccggaccgtcgttgtccacagtcagtttacttttggctagcagtggcttccactcctaaaaattggctaggaaatataatgcttccttttttctgatatgtgctggctgaatttatgtgttcaatttatcctaaaatttgaatgagacattggggtgagatggtatcctacaggtcaaattaaagcagtcactggtagtatagcagtcaaattgttgggcatgcagcattcagcatatgatctactagttccaaagacaaactggaaaccaaaacagtaatcatgtctactataactctgaagggaaaattgaatcataagagttctcagggcctcccaggcgtaccatacccacggtaagaactcaattctttccatatatacatggttatactctctgatctttccttgtcaaatgagaaaataaatttgtaagatcgaatcataagaactaagccaaccagaggggggtgaatggttggtatacccaaaaatcaagaacttttagcggaaataaaaattaccctcgaaatcgatggatcgcggtctgaccgaagtagatgcaccggtctgaccgcctaaaaaccaccggtctgaccgcctgatcagctactgtcgcctgaagccgccgccggtctgaccgcccttacgccgccggtcggaccgccgcgatgctgccggtctgaccgccggagagatgccggttagaccgccagaacccggtgaaacacaaatcgaagaactctcaaagtagatgacaactttattgcttttctctgtgtttacaaagtgcaccaacagtactccttacaaaaatctcaactaaaatcgaaaccctaactaaactagcaactcaattgctaagcgataccgggaagcctcacgctccccctctatttatacccgaggtaggcagcctaaaaccacgaaccaaactcatactaagaatcctaaacaccttaggaaaacctctagtacaagaaagaaactttacataaccaatcgtaccaaatttggactccttccaaatccgactccgcatcccatacacacacaatacctccatcgtatgccatatggaatctccatcaaccacgtgcatcaactctaaccttagtatcccgcatgatatctgaccaccacggacatcgtcttaccaccaagccgactcccggtccatcaccacaaatactctcccgaggcatcgagtcacctacacatgaaacaaacaaagaaaccatattacgagaccaagctatctccaacttgactcattagtagcaaacaacagtattacatacatatagtatccatctagaagccataaccatgaaataatcacggatatccaaagaaacaacccgaaaccgaaaccgacacagcgtcagccggtcagaccgcgggccggccggtctgaccgctcacaaagcgccggtctgaccggcaaccaccgcctggtctgaccggtcccgacaaaccagtaaaccctgttcatctcctcaaaattgattatctccaaaaccacttcgacaataatctccaaatatcaaaaccgataatcacagatgccaattgttcatcacataataagaatcaaaacacacgttgatctctcttcaggaattgtacatggcaaacacctgttgctgctgctggtctgacgataagaacgagagaacatgcagcagcagcaggcaaaaggggccgggctttaaaactccgaaccccttgacctcagcaactttgtgacctacatgtgccatcgacctgcagatgattcaacttcaaagggattataatatgcttcatgtctgagatttgaaggtagccactctttaagccagagtttgactgaaactaatccaaattgttgatgcagcagctgacttctgaagaaaccatacgatttttgatgcctcctaggccaaacgttacacccagagaattgatcaaattatatattatagactataagtacagcatactctcctttttatcaattcaggatctgctgatcttgaagaaagttacatctctgaaggtgaagaaactggttgctagcatcataacaagaacaataatatattgtcactgaaacactagaggtaaataaaaaattcctcccggccggcgtatgtaattctccatataactatcccttgcaccaccggagaatacacccgggtgagttttgcaccgtcagataatacttcaacgatccagattgatgtatgcccccacccctgaatgcaggctagtgtccagtgcaaaagctgctcatctctgcccccctgaagcagtgagggggaaaagtattttatggcacctaggtgtatgcttacggttaaaatagttatataaaaattttataaaatttgataagttaggttacaataatataagatactacacaaaacatgcaagtcgaagcagcgtgaaaccagatagcatagtacagcacctgctgcaaccgccttccttgctgcacacagccaccaacagtgattatctcacgcttgtctaaattgatttgcagccactgaagattacaactgttagtgaccatcacacatccaccacggagtgctgcctaagccagattttggctcaaaccaaattgaagtcgctgaggcacaacaacttgaattcaaaacattcgtacatttcccaatgcctcctaggccaagctgctgtgtttgttgtgaagtggcttccctctccttgaggcattgttcatctagatctcactactgttagcatttctttgtgctccatagcttgctcatcagctcatggatagatgcgtatgtagactagaaggatatatatatttatatatgatttgatatttgccacaagaaaaatgtgttagtcctgatgtactcgttgttggggctctagcactctagcacatagagatttctgttgagctctatggactgatagtagtcactaagatccatgtttctgtcaaacttctgtgcttgggagaggtttctagttgtttctatctttttttttaggatgttgcattatatatgtagaggccggggttgggctcagttggcttgtatcattttggtgtaattgactacgtttgaataaagcatccattatctaaaaaaaattaatgttctagcttaattggacaaattcatctgaaaacaattacgatttggttaaggaagttcggtattgttgtataggggctaaatgatgtctgtgaatcggctcagattttcggtttgatgatcatgtttttttcaatataatttgaaaacagtactgttcactttaaattgaacaatgcaacatggagccaggcaactcagtggattaagtttgtcatcagattgtactaaatatctaaattccacacgattatttttttagtagatgcagtcattatcctgttcaattgggcaactagcaggctataactgacaagcaagcatgatgataagaatggaacaaaattgagcaggcagcagtcaagggagtcgaagatcaaaacaccggtcccaattgtccacattcaatttactttttgtctagcagtggcctccactcctaagaattggctaggaaattgatgctttcatttttatgatttgtactggcttaatttatgtgttgatttagtcagaaatctgaatgaatcattggggggtaggatggtattacagtcaactttaaggacttgttcagtagctggtaatagtaggatcagatgtgatttttttcttgggactggcagcaatatagaatagtgtatttggcaaaattctgaaaataaggtacccttagaaaaataaatgaagtgaacatcctgctggtgcatattgtagaagatgcagaaaaaaacatgaatactagtactccctccgtcccaaaaaaaaatccaatcctgggtttg

SEQ ID NO: 11438 - DNA, 1573 bp, Oryza sativa
tatgacaataggtaaacaccccatagtaacattataagacaatgcaatatttgaaggaaaacaatagagcatttgcaatataggatcaacatgttcaagtgacaagcatgacttgccttgctctgctgctggagaacctcggcaactatttcgaagtacaccggagcgtcggaagaaccaaaatctagcgacatacaaggcaaacattgcaaacaggctataagactactgaaacagggaacaaaaccatttttaatggactctacacatttttcttgatttactgagacttgaatgggcttaaacggagttcggatgaattagatatgaattttagaagattcactgtgtttattactataacaaaaagtccttaaatcatttattgcgtaataaatcccagggctagcgtcagcacggggggaggaggcgcggcgccgacatgcggggcccaccggtcagcggctcgggagagggaggaaaggggcgccggcgagcgggcccactcggcagcgactcaagggggggacggttcaccgtggaccgggaccacgcgggtggtccaccgccggtccacgggaccgacggcccagatcgcccccggggttgatcggacgggcggcggcgacccggctcggcttggctcaaggctggcccgccagccaaggcgatggcgacggtgtgcgcgtgcgaacgcgttgccggcgacggcaactggcggcggaggcgacggcgcaaaggcgacgcgaaggcggtggctctaagcgggggctaggaaggagagggaggggaatagatgggggaggaagcctcaccgaaggtgctcggcgcgtacgaagactacggctaactgcgacggcaagccacgggatgacgacggcatccgacggacgggcttcggtgtgccctagggaacggtgagagagagagattatagagagggagatgaacctctgcgaccggcattcatggcggtagaggttgaactcaccggagcgcgagggaatgcgaattccggcgacgaaactcgacggggaaggggcggccggggtggagcttagcctcgcgaacccgacggcagcgacggcgcggtgcggcggcgagcctagcggcggccggagtgacgggaaaggcggcggcgggtggatgcacggtgcgggagtgatggagagctcgggagagttcggcgaaatgggggaaaaagggagagagggggccggacgtggccgggagaggcgggaatcgccggccaacgtggagaagtgggggaggagagagaggcgggattcgaaaatcgaatcccggccatctcgggcgcgggcgcgggcgggagagagaggggagtgggcgcgagggatgcggcgcacgcgcgggcgtggccgacgtggcccggaggaggcggaggcatgggcgtggcgggggttgcgggcgcggcggcgcggcgcgaggtgggagacgggtccgacaggtgggccccacctgtcggtgacctcgggagagaggagggggcacgggctgagctggggcgtggcctccggccggcccagcaaggcgcgaggagagaggaggggaa

SEQ ID NO: 11439 - DNA, 11296 bp, Oryza sativa
cctcacataaaaagagctgatttattttcacctttcaagcaacaaaatctctcacacataaagtagtttacctttagctacatcactgtgttgatactggtaccttttgtgatctaggagtaagtaatataatcatataggctttgactgttcgagctacggttgataagccgtagaaaatgaaaaaaacaataaaaaataatttataaataaaatttttaaatttgtgtcactagcagtttaaaatataatgttacaaaatattaaatttttttaaaatttaaactcttgtgtatgatatgttaataaacagactttttaaagcctaggcttaagtgatgttcaatccaggtaaacagaagggttataaatttggttatttttgtaaaaatgctttgacagttgacaccactaatccattccaaatttccaatacaatgaacactgatgactgaggaggaaccagccaggaaaggagatggtgcagaagaacccacaccaccatgctcacagatgcacagacacagggctcctccccagttttaatgctaggacactctccccatccttggaatctgttgcattcaatacagctctcaaaaaactaaaagaaaaaagaaaacaagatttaatgttgtcctagctagatccatccaaggctccaaaaacactgtttggctcctcccagtagctgaagtgaactgaactcctctcattttcaagagtgcattagtactcactcccccccctcacatgtgttgtgttttgcttgcttgtgtgattagtggagtaatcaagaagaaatagtggggaaagataagtgtgtgtgggtgtggcaataaaggtgaagtcttcaagtttgcaatcttctccctttgctccccacaagattacaaatcttgtgtttgtcttgttgccactgccgctggtgatagactctaccatactagagaaagccatagaaaggagataagaagaaaccaagaaaagggagaaacaaaagttgaagaagactttctgctgatatttttgcacatatatataattttttctcctccatctgcactctctggaaagaagaagaagaagaagcagaagaagcttggagcttgagctttctgaatttgtaagtttattttgctctaattttgggctaccaattgggtttatatttctctagtggtggtgactggtgagtaattttccccttattttattgtgttgatgtgaggccttggggttttctatctctttgcatcgttttcgctttcatttgtttagagatttgttctttgaacaaagcatgcagaaatctctgaggactgaagtgtttctctctgcttgtcactttctccccaattgtggaataactaagaggaatcgacatggggtctagtcttccattccacaagatttgcatcttccccatgaatcttccaagaaaatctgtatctcttacttcctttctttttctctaggtcttgtcttgcaaactaggataaagatacaagttagtagtacaagaaacagtaaaggtgaaagtcttgtgttcttttccctgcgatttcttctgaaaaaggtcgccattaagaaaaagctttgcaatctttggagtgttcttctcacccagtggtttctctgcttgttctcttctgattaataacagtagtagctgctcattaaattgcatctttttttaatttatttaatttctgttgatgtgaaacgcatccaatctcttgcaatcaatgtgaggctttcattggcgtatgagcataaaaaggggggaaagaaaggtgggagtctttaggtttctactcctaaaaattgtttctttcttatgtgcagcagtcggtgtaactaatgggggagatgaaccagccgccgccgccgccggtggccgtgccgccgccgatggtgatgcagccaatcatgcatccgcccgtcggcaccggcgccgtcttcccgccgcacgagcagttccaccatctcgcctactgcgtccactccaacccttcctggggtaaggaaaccccaaccccttcattcctcctcttttttatctttccttgtgtgtttttgtgttggttggtgaatggattggatatgatgaatattccctttcatccctaaaaatttgggagatttgatttttaggagtatctgctggttggggtttttttgactcaagatattttttgcctttggagtgggggagcttctgtgttgtgttgtttttgtatgattcttgaattggggggtgtccagagatatttgatgtgtgttttgatttgaagatttttttttagcataactcctgtttcactcccctgctaatatttgaagagattatggtgtctactggtgcacactattgatgttttccagagagttgtagctactattattttttatagactagtaaaaggaattggtggtggtgatgatttgctttacaccccactacttcatcagatctttagtgaatggatctatgtagacatagctattgtttgtactactacatgcttatgtatgtagatgttgaattctttgtagtacatacgtatatgcagttgctggttgacctagtgtgaatattttaattgtgaaggtaagtataactgtatttgtgtaaccatggaacttttgacatgttcatttgagatcccctgcaatatagaggcaaacacactagttctgtcaaaagaatcttagaagagtagtaggatgttcaggcaaaaacgctatgaagtgctatcttgatttttttaaattatcaaatgtacttctggaaattaaattactcatgtcgattgcagaaatgattaagacatataaagcttgtgctcactaaattactattgttgatattacgttcagttcaggtggccgcacttgcattcctccactatcttgtgatgctgggttctactgtcatgcttgcatcaactattgttcctgcaatgggtggtaccccagtaagtacattgtttattttgttataaagagtttattacgtaccattatagttctcttctaaagaattggtactgaccttttcccgcttgttgctaatagggggataaggctcgtgttattcaatccttcctatttatgagtggcatcaatactctcctccaaacacttgttggaacgcggctccctacagttatgaatgcttcctttgcatttgtcgtcccagtactgtcaatagccaaagactttgaacaaaataactatgcgagcagtcaccaggtagagtaccgttcatatttgttcaatcatagaaaattgtctggatcatgatcaatttatttgcattgattgatcaaattattattgattacttataacctattagggattttgcagagatttactcacacaatgagagcaactcaaggggctctgattgttgcttctatcctcaacatgattcttgggttcagcacaatttggggggcattcgccaggtacatatcttataatatttgttcttagactacaatagtcattttgtgctagattttttcaaggtattgacatttgaattgatttctttccaggaaatttagtcctgtaataatgacccctgttgtttgcgttgttggtcttgggctatttgcacttggctttccccaggtacgatctctatattatttttacaggaaaatctagcagttcgcaaataaaggaagcatgttctctttggtttcccatggtaggttggaaagtgtgtggagatcgggctaccaatgctaatccttgcagttgttgtgcaacaggtaatgaattaatctccttatagggcggtttcttttaataacactctaaccggtgatatactacgaaacttactatttactatgctgtgtatgcagtatgtgccatattacttccatcattaccatgagcgaatcaccttcttgtttgagaggtattcgttgcttctttgtattgggattgtgtgggcctttgcagctatccttactgctgctggtgcatacaaccatgtttcactcaagacccagcagcactgccgcactgacaagtcctatctcatatcatcggcaccatggtatcgttctcaagtatattgattatgaactgattttaaaaggctgtaggttcttcagatagccatttctaatcgaccctttacatacatgctctactaggatcaaaatcccataccccttccaatggggtacaccaatcttcactgcaggtcattcatttggaatgatgggtgctgtacttgtttctgcttttgaggtaagaccaaggcccaaaaatgtaatcagatctcttttgttatgttttatcttttgttgtttctaatgtgtgttatctcatgtagtccactggtgcacactttgcaactgcacgtctagctggtgcgacaccacctccagctagtgtccttagtaggagtgttggtttgcaggtgagttttgttcaatataagattttatattcttacaccacatctcagtctacattaccgacaccaataaaatgtcttgtctgtatctaacttgcatttgaaaacaagtccccagctcattaatctctaacaagtaatagcgagacatcaaatatggttgtttgtacatactatgcatgactttcctttgctactaaaaatattgatttaatcggatggatctgtgggagagctgttagttcaagtccttgatttactaatgctattacctattatttattttgccatccttgcttttacttgtgaaattttcttgtgccatccttgacgactttacaattttactcgtgtgaaatgcagggcattggaatgttcctagaaggtatctttggcgctccagctggttcatctgtatcagtgtaaggggatctcaacttttatgccctttctatgagtttgttattcgagaagactagaacagttccatgcaaatagatgttaaatatatatgcttcaaacaataaatgctcaaaataagatgtagtgttggtgttaacagagtatctagtcctacattctagctatagttgtacatcgttctggttaggtaaagctttttgtggtattcagtttattactctggggtaggagctgattaggaaccatagtacacatgatgaaatgtaaagttcacatatttttatgggtaggccatggtatgaaattattctgttattatgtacagaacatgtaattattctgtacaactaaccataggcaacttgacggtccctgcttacacacttaaaaaagatacggagtacttgctttgcaaacccttttgtggttaggaatagtggaatactatactggtgggctttgatcacattgcatgagagtaagatttagtttctttatatttgtgttcatttgtgaactgaaaggacccttgcctttaatataatgcagtgaaaacattgggcttcttggactaacaaaagttggaagcaggagagtgatccagatatcaactggatttatgattttcttctccatatttggtaatcttttggtctcatcttcagttgccaaaggggaaagatagttttgtctgaaatttgtatacttctattcatgcagggaagtttggtgctttctttgcatctattccattgccaatcttcgcagcaattttctgtatcttatttggtattgttggtgagtccgaattttctttcttaagagtccttgcatcgatgaatatatatggccgcaacatgattgtgttcattttatgttctaatctgttttttttggcatatcagctgcggtgggagtctcgtacatgcaatttgtaaacaaaaattcgatgaggaacatatacatcattggactttcgctgttcctaggcatctcggttcctcaatacttccatgagtatgtgcttctgctagcactggacctgcccgaacaaatgctggatgggtatattccttgcccccctcgcatgctatttacacagcattatgttctgaccatctgtgatctgactgtggtgatacattctggaattatatttttggtctttgctcctgcactctttaaaaaagtttatacctcggtgtatattattttaattagacacctttgggctttaattgtcttaggtctgtgtcttgaactcttggtacatgagttctggtttctaaacaaatcttttttgtttcgtattgcagttcaatgacatcataaacacagtcttcgcctctggcccgacagtgtcactgattgtcgcatcgatcctggacaacacactggagtttagaggctacgaaaacgaccgggggcttccatggttcatgccgttcctgcaccgtcggaaaggttactcagatcctagaaacgacgagttctacagcttcccgatcagggtgcatgacgtcatcccaagccgattcctctgacgggcgagggtagcgcccgttacctgcgcttccgcgcatgtaaatctctttgttcttgttagcccttccttactcctgtgacatgtagcaattggcaccgccaagattaaaaagtctcaacttagtggggatatggtacaaatggttaggacttttggttttcttttctttttcctcccctttgggccaaccatttggttaattacatgatggtgtagagttggttaaatgattttgggatggatctttaaagaatatcagccacctcaatttgttgattgctcagccagtgatgtagatgtgcttccaggacatgcattgatttcgtcataactctgtaatcacaccatcttttcactgcatttgattgagaaaacttcagaatcagacctgatgcacattgaactcaaagagtctggtctttggatgaccgcatataatcaatcaggcagtaaattccagcatgatgccactgccatctccttcaccctataaaaagagcaggtgaagtatcagcagcttgtttttgttttccttgcctgaagttcagagagatgatcaataagagttcattcagctcagttgtagccttgtaggccttggaggcgtcaggaactgagagataactcggagttaagctgttgcctgatgacgcttcttattacgtgctgatatgatgctagaaaccagtttctaatctgtaatctctgatgacactgtcgcacattggcctgaatcctgatcgataccttgtatctgctaaactggagttgaatgcgataaattggtgcctaatctctaatcagttttctgtttgcttcgtacggcccatctaatagtgtactaaatcagctgtactgaaactctgaaagcaaacactcaattttcagatatgataatgtccttgaggaaagtagaaagacactcaatttttcaatttatagtattagatcaaattagagtgaacaaaatgaacacaaaaataaaatatttagagcagagttaaactactgtacttataagtacaaatttctaatggattgcctcattgtaacagattttctttcctctgctcctgctttgctccaatcttgcatttcgtttatagaacttatttattacctgctcaccccgtagcttctactctaaaagattcgattggttcgtcacaacgatgaaatggtggtgtagactgtagagttggtgaattaggctctgtttgttgctgcctgtttgcaactctcccatctcgatttccgtgcgcacgcttttcaaactactatttcggtatgtttttttttcaaaaaagtttccattttgaaaaaaaaattagctaatacttaattaatcacgcgctaatagatcgcttcgttttccgtgctggaggccacagttccgaacatgcagtctcgaacacagccttgttattatttggataatttctctattaatgatatggattttttataacaaaaatgatttaaatctccagcttctacttcaacaaataaaaaagaaacttcgggtgatgggacaaacctctaactctctcttattattaattagcattaaatcacatagattaatgcatcaattctaatggaccacgcaacccataatgaaataagaaaccatttgctatcgattcgaagggtacaatactattgtgcatagtattctgcttcttctgtggtagcatcacaaattaaaagtggagccaatataaagacatgaaaataaattgcagcatgttagacaattgtttaccattaaaatctgtcattgcggtaatgggtctgttcggttcagttggactgtggctgtatagccacagcgctgcaagcctcccggcataaattgtttgctgagtcctgtagatacagcggtgctgctatcacaaccagctattccgaatgcacccaatgctaaattaaccaacataaagaacaagcttcaattactatgttctttttcatggacctaagtacttctctagccaattatcaaaaatatttttggtataggtggagggatattaaaagcaaaaaacacatatatccaaacaactcgagtaatatgactctaaaagaaaagacgctagattgtctcttttgcataatagaaattaacaacaatatttatctcccctaaagctaggttatcctttgttaggactactttgttatgaagaaacgaagtttctaatagaacctttaaatcccatagtatcctctcgcagattccaatattggagttcatatagtctcaatatatatagatctaaccgaaaattagccattccagtacatccattgatccatcgtaactctatgactgcagtactgcacccttcttttacccttcatttgatgagaaatcatcagatcaaagcaattgcacattgaagcaagctgcaagtgaaatgaagtagcagcaacttgtttttgtagcttgatattttgagagatgaacaagaggataagctcatggagttggtaggcctgagaggcgtcaggaactctcatattagctgataggaatcaagttgttccccgtccactgtgcttcagactctctggcttctccacacatgtttggcatacatattgcaactcttggtttggtgctagcaacctgtttcctttttgaggaaaagctagccaaccagtttctgcatcttgcaggctcagggtttcagagttcagaccagcgaaatggcgagtggatatgaatatgatccctcaatgtcgagaatgcgaaatgcagcttctttcttcacagttgtcgactcatgaagctcgcaaaatcatggtgaactccccaaagatcagttcgtaatggctttgtgttatcatcttgtacaatctttgtctggatcagtatggttctgaatcaagacaggaaacacaagtagccctccagtcccttctccgatcttgtctactatttgttaaatgatgtgagaaagctatatatcatgttaattgttagtttgacgtcatcttcccaaccgtctccggcgagtttcatgaatgtgttgtgatcactcatcatgcatgagttcggtctcaatcttcagtcacccaaaacacaatactgaaatacgtacaagataatcaagattgagtaatttggtctcggtcaagaccgaaatacaataattttagagttggaaagaaatcacataaattattaaaaaaaatataataaaaaaatccacaataataataaaaaaaaatcatgtgtcactggtagtgggtgccctccagtcgacctcctccgcctgtcgccgcgccctcctctaggacaccaccaccactagatcttctgaggaggacgggttgctgacccctaggcaccagtgattcagagtggcgggacaatgacatggcggaatggtgtgatgaccaaaatgactgaataaaatacggttagttgaaccctaagaccgaagtgatctgatgatcgaatttgtcggtcttcattttccgatctcagtcacggtcttttcgattcagtctatttttgctatccctagctgtactgaacaaaacactcgattctcatatatatatgatcatgtcctgtttgctctacatttataaaagataagaccaatgagcacaggttgagaagatgaagaagactcgatggatgatcgacctcttgttcttgccatgatagctaggcttgggaggaaccgggagctgtctttttacacataaccatcttcctaccatattctccgcggttcatttgtcaagttagtagatctcattaaccactcttattctcaacggatcatattacattttatatgtaactggtcaccatgcatctactttccttggtaaggctatagattagatcaaagcaaaaaaagaacaaataaacaaaaaacgcttcgagcaaattcaaagtgctctattgcttaccaactggtttagtctatgtcactttaaatgatctcccataaattcttcttgctccgggttcggtctaaagattcgattgcttttttacacgatgttctagagttgtatgattgggtgaaatgattttgggatggacgttaaagaatatcagctactatatttctgattactctgtcagtaatgtgtgaatttacttccagttccagcacaagcattcattcatcccatcaaacatcataatcaaacccagctgcacattgaactcggatacaggtcctgaatgactgaatttttatttagacagtaaattaaattcctgtgtaaaataccatatgatctcctatgctccataaaagagcagacgaaatgaagaagcatcaacttgtttttctttcctgacattcatagagatgaagaagaggagctcatgtagttaggcctgggaggcgtcaggatatatcagataagctaattgtaagatgctgaaaccattcttcctctcaagcatcaaacaagtttcagactccaatggacttgtttggcatgcaaccccttgatcatttgatgctagctagcagccagttttcgcatcttgcagagttcttcagtgttgcaggagatgatttctcagtccggattatctcagtgttgagggtttgtgataacaaagaaacaattcagcatttgttcttcgagtgccccatgacaagattcacttggaatgtgatggcttgtgtctttaacataaaacctgtcaatgacttacatttcactttaggatcctggattaattcaagcatgtgacaaaacaacaaaacagctgctgctagttggaatagctgcagtgatttgggctgtgtggaaagttaggaataaatcctgttttgatcaaattctcccacatgatcctactgatattttatattatgctgcttgctccctaatga

SEQ ID NO: 11440 - DNA, 1375 bp, Oryza sativa
ggggcacttccccgtcgactacttcgtctacaccgccggcggcggcgccgccgcctcgccgccgtcgctcacgcggctgccaccttgcttcatcggcgggcttctccgacccggccgaggacgagtactacaagccgtaccgagtccagcggcagcggatcatgctgggcgagaacatcggcttcctctccggcgacgtcgccggcgagttcacggtggcggacatcagaaactacgacggtaattccctcgagctctgcatcttcaaccaccatgccaccttgccgtcgccgtcgccggagcagtcgccggagcaatggaggatccagcgtgtacccaagattggcgacgacgacgagctccccaaatgggtgaacgacctcgtcctccccctgcacggccactacctctgctgcgtcgacttctacaacggcatactgctcatcgacgccgataacctgcagcaattcagctacatcccgctgccggaggaggccatgaatggtagccgccgcgtcgacgacgacgaggacgaccccgacccagctcgccgcgtctccgtcaccggcgccggcctcgtcacgctcgtctgcgtagacaagatcgccacacgcggcaagatcacgagagatttcaccatcaaatcatgggtcctgaccaacatccaccaccaccacaacaacaagagcagacgacgatggcggcgcagtttcgccatgggatccgacgagttctggcgcatctgagccgagaaccaccgccgcctcccgcgacggggcgcggcggcggcgcctgcctttccggtggtgagcctcgccgatccgcatgccgtctccttcctcctcaaggacgatggcagggactggattgttgagatcgacatggtgaagagggccatgcgttcaccggtcgccctctacatccacgaggaagaggaaggagaaggagaaggagaaggagaagagagggaatgcggcggtggcagttgcatgctctggaaggccttctttggccattacttcatccccagctggttcccctcttatttgcatgaggatcccatccaaaggtttgattatgcatgtcttgtgtttatttgtgcctatatatgcttttgctctagccactgtttaggaactactccctccgtttctaaatatttgacatcattgacttttttaaatatgtttgattgttcgtcttattcaaaaacttttgtgaaatatgtaaaactatatgtatacataaaaagtatatttaacaatgaattaaataggaaaagaattaataattacttaattttttttgaattagacgaacggtcaaacctgtttagaaaagtcaacgacgtcaaatatttaggaacgaaggggac

SEQ ID NO: 11441 - DNA, 3617 bp, Oryza sativa
ctgcagcccgtttttaggtgaatgtgacacattctagtacaacaaatttggatataaagcatatccaaattcgttatactaggatgtgtcacatccacccaaaatcccttatattttgggacggagggagtagatatctataaccgggggtgtagttcaaaggtttcgagcttcttggatcatgtgccatgttactctatctgatcataaatatttcacaaatatttgacgtttatgacagattttgtcaaatttggaagtttcttaaaagtttgatcaaatcttggtctaaacgtcaaatatctataaccggaggggagtagttcaaaaattttgatcttttcgaagcatgtgtcatgtcgtcaatgggggggatgtggtgaaacataccttgagatacatgtcgatggcgcggtatagcccgtcgtgcacgggccgagttgcgaggggaaccatctcagtgagggcgatgaacttcgagagtgggaggttggggtccttcgcaatctcagccagatacccatcaaccagcttcgcgatcgcgagcttcgagctgcgggagacaccattcaggttgtcatcatcaccatccatggcttcctgatcatcatcctcttgtagcttggcgccatcatcgtcctcgcggtgctgcgccatgaactcctccagcatcgccgagatcatgtccacattgtacatggcggcctcgtcggagttagcggggataaggaggtccgagaccgaagcctcatccagcttcgcgccgatcctcttcgtaagattgtcgcggcacgcctcatctgatcccaacaagcatgaggctctgagaagcttaaggaggaaagagcatgggactgaaccttcctcagatggaagcagggagatgatggtctcaagagctgcagagtgccttgtgcagtcaagcccattgctgacagcactttccagtgagctgaacagcctcctgtgagcataagccctcagtgcctcaccaatcacctcactgctgattctccccttggccttgatggccatgatgaccttcttgtacaggcacatctcaaggtcacagagatcctctacccaccagtctctgggcaccatctgctgcttccttacgccgttccagtgcgagtcgaggccgttctccgacggtagcttcctcctgttgtaggtgtatgaccactcaacctctgacggatcgatggaggccttcgtcgcgatcgaatcgacgcagtggttgatcaccttgaggttctccgaccatggcagcagtgacttggttgtctgaagaacgatgatggagtccttccaggttctgaatatgcttgaggacaggaacacatcgatcttgtagatgaggttccccttgtcgatcgtctcgaacatctcaagatactcggctgcgcagcgggctgcgaggacgttgtacgcgttgagggtgacgatcatgccatagcagaacttggcacagatctcgaatgctgcaggtccccccgggatgtcggagatgtctatttcgtcgttgctctcttcgtttgtcgatgccaccaatgtttgcaatcgcgaactcttcgacaaaagagggaactgcatttgatttcagcaagagtatgagtaatcattatattagtcacaagaaaactgctgataagctaaattaaatatatttaatcatgggaagaactgcactgaatatggatcagctatcactaactccattaaccatatgccaatagaggactgaaacaaaatattttattttaaatagaatgttatggcatcaagaggagtacatgataaaagaaaatagtatcagagatacagaagttttgaatcagttccaaaattcaagtggaattgtatttgtgttcaagaggttaaaatagtggaggggagagctcaaagaagtaacaaaaacgttcagtcaaagggacttgagttcagataaatgaaaaatcatgtatgctcaacagttcaaggctgtacttggccatttgctaaaacacagagtgttaagacttaaagacagtaaacttgtaagatagtagagttggtgtgtaccttgtgaagataaaacttcacttcccctacaatgattacgatgtccgttgccaactcagttgcgacaaacctgaaaaatacattttcatcaaggacacattcaacattagcatcacagagatgcattacaagcagagttaggacaaaataaataggtgtaaagcaccaaagataagcaaataagtatcatttttttttctttttgaaaaaaagaagtgatcagtagttaaagcaccgattttctgaagattgttttgttatgttttttaggggcatgtttgcggtctcacagctgcttaattgctatatatgaatatcttgaagatcatttttgagagagaaatggctgttgattattttgtggagtaattgagagactaataatcatgttgcacaatgaggactcccacaaaactacattagaaatggcaatggaggaaataatagtgaatagctgataaattgtgtgcttttatttatatgactgactacaatgattgcaggggcaaatggtcacacaacagtggatggtgaaaaggttgtcttggaaaaaaaagaacattgaaacaaaaggtccctggaatctaaacaatctaataatgcatcttcatgataaagatgaaatgacatatgaaatcaaatctccagccccactgaaaccgctaagtgtaacaaaaggagagacagagtgttagcctagaaaaagtgccatgggcaaaatgataaagcaaagaaagcagcaaattcatagaaattaactctatgcatgacagatataactaatcaaactgctcagtggtccaaggaaaatgatgacaacaaattcattgtacaaaaggttagggaattgtagaagtttcattttcaaaatggaccacagctccacctaccaaaccctatgtctgctagatgaacattaaacaggctagtggaaaagatgcaatgaaaatggcacatgctccgaagcacacaaatcgctcaagaagagatgccattggcaaagaatcaacgatgatgcatcctataaagatgatcaattgtatagatagccttttgcaagctatcatgagaaccactgctaacaccacaagtgctcactttcacaaaggtcttttgggtgccaatcattgtcaaatgaaaaaataatgtgaacttcactacaattttcctttttagattcagcctagttactagatataccatcaccagaaactacaaaagagggtgttatagtctagcttttaattaaggtcacattcattcaaatttctctgatataaatagtgtgaaaaccctcccaaacaaaaaccagaaccatagtttcttgggagacaaatacaacagtctatctttcagtggatcatttaaaaaagctcacaagcatttccctactcaagattacagggaaacaacatgaattcagtaccttcacttatttaactacactaacataactgcacagttaggcatcactttgcgcccacatagctaaaggccatgcttccatgtgaccagctaacgatacggttggcccctcctactgactacattaa

SEQ ID NO: 11442 - DNA, 22038 bp, Oryza sativa
gtgaatttttattccattatctgaaacttaagagcacttcaattcatggactactgatccacaaaataaaagctagagctcaagtgtatcaattcaaaagtcaaaagttactaattgtgaagtgaaaaaaaaatcatctttataacctgaaaaaattatggacagaactagttaaggactatctcacctgatattgtttccctctgtctgaaacacatctggctttgatccaagcttcatatacttcatcttgacacactaagaacaacctcaatctgtcacctttttttcttcttatttcccttctttttttcaccctttactttactcctccaagtctccaacaatcaccagaaaatcagaaccacaagaccaagatgaagcaagagaccactggcacacaactatttactcctcagtccagagggcaagagcaactattaactacaaagatctatgccctggtgtcccccttgccaagaaaccaagtattctctctctctctctagattggcaaactattgacccaatcttgtcaagctctgggtccaagaaagcacaatgccaggaaaccaagaactcctccaagttggaaattggatcacacaaacacagaggaggaggcagcacctgcaaagcacaagagcagcatcttggggtgaggagacagtgagaataattgggtgagacaatgggggatgggttgtagggagaccatgggtacaagcactagtgaggctggaatcttatcaggttgcagtggggaggaaaaaccacatgaaggggtgcaaataaaaatccaatcttgagctctttttttaaggaatttgcacatgtaaggcagtcaaacagtgagtaaacaaagaactgcatgctgcagaccacaggtttgagcaaacagttgctttccttggaccaagatgagattggagtgtactgaaaaaaaaggaggtggttctgattaactgatttccaaccagattttttagtggagaaaaaaagggagattttttttaccctcaagactaacctaattcaagaaaaggaacagaactaggaaattaatgttcatagagatgaacttggaataaagtgtgtatacaaaaactggaaatggctgcactgcagaaccatcaatccaagaaaaaaaatccagtagactggtaagattttttttcctctcaagataagtagtgaaccaaccaaacaaaaatgtacagactgatgaatccctaaacaccaatcccacacactgctccaaagctagataacaccatctctctgaattgagtcacatttccaatggaagaacaacttcatgagatgaggtctgaacaacttcaacacaacctaacagagaaaacataaaggaaagatgaacttacaagaaactgaagctcaggcaagatccttttctctccctttgaagatcaaaagatccttagccacaggcaagaactgatgctgatgcaggagagctagggagaaaaatacaagaagattgcagagaggagagggagaaggaagagaagcagtgaagtgaagcaggaggcaatcaagcagacatcttgcacctcagctcctgtgtgtttttcccgggagggacagcttgttcagcttgctttgctgctactccaatgcaagaagggagggaggtggtaatggagttagtttggcttaaaagatagtgcccgtagggtggggggcaagtggatggacttctctgtcctcacaaataaaatctctcattttttcccctctttaccttaatttttttaaaagaaaatggcaataatattttccgttggatggaagacgcatacatcgtacgtacatatttcctccgtctcataaaagacaaacctagtaaataatacgtctgttcagattcataatattatgatgtatcaaatctcgtattagttctgtttttcatgggacagaagaagcaaacaactatgcatgcatttcctatacatacacaaccatggatacacccctaacatatgctaaagagacccacaccttaagcatactcgcaatttcgtaaatgcagagtctcctaacatatgttcaagttgtcgaaatctctagcctttttaaatttatgttgaaaacccataaatatcgcacacatatagataggatataattatgtacccacgacgtaatacgacaccatattactggtgctttctagatgataaattattatcctcttaagaaaggaagaaaaagaagaataaatgtcctataatgtctcagacaatggaatggagaggggaaaaaaatgtagcaaaatatacacgcacatatcgcatcagttcctttcagacaaaatcaaggcccatgctgtgacctctgaggttccatgtcggggatgagcagcatctctcaccttcaattgacagtgaaggttaggagccgtgacactgcatccataattgcgtattttgcatgagagatgtgagattatattccacagtgtcatataatgaaagccgtccattctctgtcaggagttaatgcccaagagtgacagcattgtatacatggtccctctaattatcaattttgggaccccaaattaggccaatttggtacacgcgttgctgatcaatcatcaacttgtgcaattatggagataagcagagagcaaatggagagctttcattgatgacgatcttgatatgaaatccaaacacctcgcctcttaaaatatggctatttccagtgtttaaattttatgctgaaatataactactttgaagtactaagtactaattaaggggtcttcatagggatgaaatgtccaaaatacccaccatcccacacctatctggctacctccatcaactgacatttagtgaagggcaatctaatctttttacctccctttttattttgggaaaatttataatggcatggttccaatttacctttttatttttcatgagaaacttcaaaagtagctactatatttttatatggatggagtatttgatttcagagagagggaagctgtgaagggaggattaacagtggaaatgaagtatagaatatcagtcaaagtacctgatgtaatgttcaagaattttctttcaaaagatcatgttgggtcagttctgttctctcttttgaccaaacttcatttgtttacatcttcagtacgttgctttggtcttctccatggccatctgaagcaccggcctttccttcttttgacccaaatttgtgtcagtgtgcaggtttgactacaaacttcactaacttaaacttctgaagtaaaagtattaagcaaaatctaatgtaaacagagtgcatacaaatatatagataacttgaatgtatatacttatattaacatcctagcatcatggatgatccttaattgtgatgtcaggtaggatcacactacttgacctcagaaaaatagatgaaaaataacccccaactgtgcttaagaaggtctcatcatatccatcgtctccttaaacgtttcccaatgatggcgctccccttttcaaagtatattaacaacacttgtggtctactcttgcctgaaggcaagctaatctcacttcatctttcttggccccctccccaaaatctaatatacttttctctcttgctttctttgcatgattaattttcaagtcatatgcattgttgcacctgaagttttacaatatcatggtagcatacaaatgagaggtgacatacatgatacattggaaatcagcacttacaatcttattttagtccatgtttataatgtaggattttttttctttaacaatattaggagcttctcctacattagaaaattgtttactacctctttagtttttttttacttgatgatttgggcattgaaacggtttagaaattttggttgtgtacgtccgatttggatgcagaggccgagttttaatccactttctaacaattgtttttaaggaaattctactgcattggaaaactgtttatatttggatatttccgacaaattatactccacatcaccttgaaaatgtactagcaaatatgcacactgaggcctgcagctacatggtgcagtgccaaatagaaatagtgaaaacgtgaggtggctatggtgaaatggaacaaaacacaaagtacaagctttgctctttctctttatactatttatgttaggcttcaaactttttatctgtcacactggtgagccttgacacatggtgctgactccccacattgtgatcaggaatctgctcattgttatgagggcatgcctgtactacccttcttttctcctacacatctgcccctatctctctctctctctctcctttcattaaattttttgttgcaagatttgggggatcaattgtgcaggtattaatagttaagtacttaagtccattgcattggtgtaatagtgctgtgatctaggatcctggcatgggatttggattggctcacaagtcccaatggccaatattttgtctgccctacatatcagctcatagatctgaagatccatcagcatattttttgcaggttagctggcctgcattgcatcccctaccgaccaaagcaagggattcacatcccctgtcattactccaaacatttgctcccttttagacactgttactattaatcattccagtacaacatctcaattacataactgtttgctcgtgcacataatttgtatgatgagggaaaaaaattaataatgaaaacggtttacatcttcagcttttgacataagacacttaaccacaagttttgttcaagagagcaaaacgaaacatgagaaaaaaaagtttactaccttttttgttttgtccttgaaagatatcatgagttacaacagcaaaattgttccatgacaaatgtggcttgataacttatgtggcaacaaaatttagtgataagagaaattgtttagcttggcaaagctagcttcaaaataaacaagtaaacaaaccatatgaccaagagtgacatcttcagagagtatatgtatacatttcagtcagcttcaagaatctccatcctctgcctcatcagttgtaatcttcttctagaggacatgaatctccagcaaaagagggtgtcctatgatcctatgagggagaaagcataagctatggcctacactatcactgactactgatgtgagctgatttaccaccctaattcatcatagtgctgcacagaggatgtgtccatgttcagcatggcaaccattccctacccactttcttgtgtccatccaaccatggctccatcagattaatttgtcctccaaaagaaagactgatatcatctaagcaaaagctggttaacacaaaaaccatccttttgtcaattaatgactccatcagagagagattgagatgatggcaagaaagagactggagaactgatgatcatagtagtagtagtacagtacatacagtgtgtggttaggtgacaggacattggcatgcatggattggcagctttttaagtcaaagtgagatttggatccctctgtgtgtcattgtgtttcattgggaccctgtgttaggcaactaataaagctgtgattgtgctttgtgcatgctcttgtttggccaagaacatgatgacttggcaaaagaccctactagtagcatcatcactgattaactcttttgtggttgtttgcagtcagatgcaaaattgaactgtgcaaactctttctgaaatcctctaaagaaaacttttctgaaatcatttttttttggttgaataggagtactactatctagttgtcacaggttcacatgcccatatgcctgatgcttggaagttagaactcagagagaacaatcaactgaactgatcaccatgcccatgacttgccaagttggcatgtgttatatattctttctctcatccatgcttgctaggttcatgcatgggcatggatgtaatcattttcatcagtaattcatcatccacaaccatataagcatgcattgaactctcttgagaagtgagaaaaaaatattatgatctgattctctctcatattttcttgtcaacccattcaaagatgcatggcactaattaagttcatggctacctaattactcagagcatgaacctaataccaccaataactactgctacagcagagcttatgcaataactttgatctatgtagtaatgaacaccacatggcatatctagctagggacattaggaaagattcacatcaaatcttccatcatgaattcatgatatatatatcctcttgcaattgcaagggtctggtgtttcatttgccttcagcctggcccctactctgctgagtctgaacaggcacactactgtgcaagcatgttaatagtatggaaaaagtccagtgagaacagtgcccagattggattttgctggggctctccttgaagcaattaattaatcaagatttgattagtattccaagagtaaaacataaataaataaactttgatcttagctagaatctagatacatgcatgcatgtgtggctgaattggtccttggccctacatagagagaggtgaacatcgatcatgtcacacatccaacacttattcccctcctcttttatctttttcagctaaccaatccacatgcatttcagattctaacaagacattaggcccatttcttcatgtgcatctcaaactaggattattggatgattccacaaccttttttactttattgcccatgaaccatcagctactttgtttctctttccctttccttctctttaatttcggttgtcacactacttaattatccagatatgttgaagagtccatttcaaggattttaattggagagaataaagaaaatggatttttgaatggatagatatggagagattatcaatgtggtgaccctcttttgatgcaactattgctttcactgatccagtccaaatagtagtcaatgtactctatatgtggtccatatatatatcatatatatttgaagctttctaaactaatctgacatgttaaccgacaggttaagcatcaggccaaaagaaagtgttataccctgttagatactttaatttgcaaatatttgacataatgtgatcctttcattggttgagtttttcaaatcttaacatttgtataagtaactactgtccattatatatgtttcaacatcaaccaaagactatagtgtctaccaagtttgacatgtggtgtgatttgtctagctatattcccctgcaaattacgtgtctatgtacactattataagattctttattaaatatttccttaaccacacatttttttttggtttttgaaattaaatatggtcaaaaggaaatgtttttagttcctcggaaaagcaatgatttgctgaaaaagaaaccataggcaagctggcatgtttttttttttttgcaaaagaaaattgtttagcagccctccttctatatgttaaaagagagagaataatttgttttgttaattaacttgctgaccatacagttaacacagtacctgttactcataactacctttcaattagcaaaagaaggagcatccaaagagcacccaagatcacccctttgaaatggttccacataggatgccaatgccagtgccactaggcaattaattacaaaattaatcacatttaagaccaacaaaagccatctctctgtacttgggattccataattataattgatagttaacatgaccatcaggggagatgggtttagtttaggctagttgacatcatgtgatagaaggcaatgtggtgtactattcaagtgtacaatatgtagttgattaattaaactaatgagggtttgctccctgttaagtagtggcctgcaacaaggccgttggtaaaggtgacccatggaacgtgcatgccggtgtactgcctctcatgcaggccaccattaagtggtttccaagggttttatgtctctagaagttggactaagtcaagttataggttagcatcatcttaatccgtcttcaacgtctcgtgaagaatctcgtcatcgaaccataacaggtaaaatataggaggtgagaaattgaagatgccatatatgtaccacgagaaaatataaacaccgaaatattatgataaatagaatatgatatttgtactagaagaaaatataaacaagaaaacctacataagagagatgggggctgggtgcatgggtttgagggatgaaaacatagagggtccttagtgcaacccttatgtgttacaagcttcatcgattagatgatgccatagacatcataaggaagaggagttatattcacattaagtttgacttgcatatataattaaccttttaaaaactctacgtaatgagttcatgttatcctttactatggtcgtcaccgctctaggtgtttgtgtgttggtatagtgaagatggccacttcaaggaggcattcctactaatcaccatcatcatcatcatcattattgttgtaattattttccatttacatctcaatatatttgaccggcattttgtcgaaaaataaaaaatctatctaactaaattgagcataggtatacctaacggacggattgagatcctctgacttacttccctatgacgtgggtcactgacatatggaccctctactcaatgggcccatatatcagtgactcaaagttagaggattctcttcccaaacggacaaaaacatttttgttagcaattttggattagtgtggtgtgcgtccatcgtagcaacaaaatcactcagaagtgagagaatttttttcatttttaattttttttcttttaatatttacagaaataatctatcggcgcaaaaaattataaaaatagaccctgccaccctagtggagggcggcaagctgacgtggcagacggcggctcgacggcgccgtctgccgtcgtctacgaaaattgcatttagcccctttgccgcctaaatgcaattttcgcggccctaaagagcatttggctggtactttttacatcggcggcaagggacccagatgcaaaaagtaccagccaaaaagtactaggcctgggctggcttttttgcatgaaggccccttgccgcggcaagggttttcgtgcaaaaaaaaaccctccctctcccgtctgccgtcaccgcccgtccctcccccgtttgccacgtcagcttgccgccctagtagagggcggcagggtctatttttgtaattttttgcgccgatggattatttctgtaaatattaaaagaaaaaaattgaaaaatgaaaaaaattcgaagtgagaagccagcacaaatgcaggcccattgaaattaggcctgcagaacaagcccctgtccgactagtggcccagtccacccagagaggatccgcgaattcggcccggcccataaacccaacagtgttactggatcggatatcttacctctgttgggccaagcgggcccacagcgttaacgccattgtttttgccgggttaggattatgagcagaaacgaaaagaaaaaaaatatttttttactccgtttaatattacaatagagtagtccgtactaattacagcgatgaaaagtcgcctcggacgtccgatcggagcgctaacatcggacgcgtaattagccgtaagatatccatccaataactgatagcaaatcaacaaattcagggggaaatgggaaaacaattctccatgtgttgagaatgtacagtacatgttcgggttggagatgtagcagactgatcgaactatttgatgcaagtgcaaggctagactgattaattagctagactgattgcaaggctagtatattaattagttagttagttaattaattatgctggccaagaaacgcaggccatgcatttctgcaggctgttctaattaattagccagtgcaacagcccaatcattccaaatgacgaccaatagttaatcaaatccaatcccaacttaatcaacgaattgatttcatacaagtgcctacccgtccatccacatccacaccatgttatgtagtattgaagtattctagtattttagataagcctatctatgagcatattaaagtcacataagttctttttttaataatatatcgaaatggtttatatatgtgacctatgccgttaagcggacaaccaataaattctaacagaaaagaaagcataaggtgttaggatatccatcttcctctaaattataacccagttaaaataacaataaaaagactacatagatttatttaagccacacttgattttatctcgtttttcgttaacacgtttttaaattgctaaacggtgtatttcgtgtaaaaaaattatatagaagttgctttaaactactatataactctatttaatttcataccctaattaaaactcaattaaaattaattagttatatgttaatggtttttgttttccgtactttgattctatctttatattggtagaaactagcacgcgttgattaagggtgtgtttggatggaggatatgcatgggtggatagaacatggcggcccattttctgtgggtgtttggttgctgggcaggggtgggatagggcggcccagagaggaatattccccccagatgctggagcggctgggcgagctgggtgagcgagtcgtgtcaccccgggcgagcgagcgagggaggcggtcgcctgggcccgacgacgacgacgacgacggtgcgggcggcgtcggcgggaggaggcggcggcgcctacagccggcgggaggcggcggctggcaggaggaggcggtggccggcgggaggaggcggccgccggcgacgcctgccggtgacaacgacgatgcggactcgacgatgacgcggactcgacgacgacgacggtgcgggcggcgtcggcgggaggaggcggcggtgcctacagccggcgggaggcggcggctggcaggaggaggcggcggccggcaggaggaggcggctggcgggaggaggcggccgccggcgacgcctgccggtgccaacgacgatgcggactcgacgatgacgcggactcgatgacgacgacggtgcgggcggcgtcggcgggaggaggcggcggcggcagtgagccctagatctattgctttttttctttttttatatgtgtatttataatatggagaggaagtggtgtaaaattgctacagaatttataaaatgcatgcattatgcattaatttgatgggggtatattcactatctcaagtgagaggtgtccacacctacaaatccaacctactccctccaaccaaacaaaaaattggatcaccaaatccaccttcatccctacaaccaaacaaaaaactggatcgccatattcattctaccaaacaaaaaactggatcgccatatccaacaaaatatagaccgccatatcccatccaacattgaccgtgaaccaaacacaccctaattgattcaccaatcgatctagataactatagtagctggaataataagtttcagttaatcgatctagataactgattcaccaatcgatcatcagtacggcatgtgtgtgtacgtgtacctgcatatatcttctagatggatcaacgttcagttcgaaagaaagaagaaacttcctgaaaaagatacgtgttccatgaccaaaccaaagctagctagaagcctagaagcaactgatcatcgagcaagatcagatatctgatatgatgagaagtaagaacacgtaaaacttaattttacccaaaaaaaaactacgtagattggttttcaattacttaaaatctaaaaaatagattcatatgatatattaaagcaatttctgtatgaaaagtattcatgtactagcaaacataaaagaacagtataattcatacacgtacgttaattattactcggaggtgtgaacaggagtgaagacacgcgtgcacaccagggacttccatgcatgcatggagaattatatttgagtggattttgaccttaattttagacctgattaactagtgctaattcatgacttcgttcatccacattgccggatccagaaaattaatttgtcggtgtcataacgtgtttattgatatcatattatgattaatattatgattagatcatagtgttactccctccttccctaaatttgacgccattgacttttttaaatatgtttgaccattcttcttattcaaaaacttttttaaaatgtgtaaaactatatgtatacataaaagtatatttaacaataaatcaaatgataaaaaaattaataattatttaaatttttttaataagacgaacggtcaaatatttttaaaaaagtcaacggcgtcaaacattttaggatggagaaagtataatatatggataaatagttttgctataggttttgtcaaaaattaccggtgtcaggtgacaccggtcgtagatccgcccctgttcatctagcattccagctcatgagcaatatgagtagtagctagctagctagctagccttttaaatttcatgagaagtttagcagagtactagcaagcttcgtagattgttccttgtttaaatttgttcatattatcacgagacttccatgcacgtacgcacggagaatcccttagctatccagtgctcaactgctcatgtttgagtggattttgacttaattttagacagattactgctgacttaattacgtgttttgactcgccaccgatccacagattgagcaagctaagcccagctaattaactagtggctttttactactgctaatttctttacgagagcaggtacaataagtagactattggccagctgtaaacatattttagcgagataaaagatgagagagaaaagcagcagactacagatctatatagccagctacagcgcgggctccaagacacaatgtgtgtatgacaggtgggaccatatataatagtatagtaagcaactattgtatgaattaactattagattgtctataaatgaattggagctggtagtgggctatactattaaacttgctctgagagccatgctagcaagcttcccagagtgttcctagagtctttaatttttcttcagttaattcaggtgttgaccacgttacctaggagaagtaatttaattagtgccataacttactaaccaagcatatgcttatagataatgtctttttcaactcgtgacagttgttagttacctagagttttcctgcaacctagccaacaggttggtcaaacaacaaccacgttttgatcaactaaattctcctccacgtcacacccaaattctacatgataaaaagtgtatagtaaagcacatgtacacataacatgcattatcccgctaattataaagtataactttattctataggtgataaaaacgtgcacactaactgtacagcaattaattagtattgtgacaacagtattaattcagtacttgatcatcgatcgacttaattagaacaaatatcataattctgttgctgtactgacacgtacacggcctctgaatttaatcatctcaagcaagcaacctagccagccagctattaatcgtttccttccaagttacagtatctcaagaggttgtaggtaattaagctacgaaaccagttaacctataatgactagtattatcaagacactttgtatatcgatcataaaacatacacgtgctaaaaatgatttggtcagtcttagagtagataagatgtgcacacaagctagctaagtgatcactgattggtagtagcatcacacggcaagcaacagctatctctgatcgatctcttaactccaactactacctatcacagaattaactatagctatttaattatttagctatagctgagcaaccaagaattaattaacaaaaaaattaaatacatatgcgtatttttcttatacatgtattttacatattgtatatatatacataaattaaaccaattcaaccaatgaaagaattgatctgtaactcctatatccaattaaaccaaatctagctaacaggggattaattacaagatacaaatgatagatgaacaaacaatggctatatacacaaactaatcatcattcctaagactaatcaccaaattaagaaagtaattaacagaaaaaactatgggtttaatttaatggaattttatggctaaaattaaacaaatcttgtgggcttggctagctatgccgggatcatgagcctgggcttcttgaaggcgagagggctgagcacctcgtcgtcctccgccgcgcaccgctggtcggcggcggcggcgacgtccggcagcgccggcaggttgaggtcgaagccccggctcgccgccaccgccacggtcgtcttcgccgccggcttggacgcgccggcgccggcggcgctgccgatcgtgccgtcgtagtggcatcgcttgtggccgcccagcgcctgccccgtcgggaacgccttgccgcacacgttgcactcgtgcgccctcccgccgccgccgccggagacgcccgacgccgacgaggacggcgtcgcgatagccgccggtttcgtctccaccaccacctcgtcgtcgtcgaccatggcgggcggcggcggcttccggtggctggccttgtggccgccgagagcctggtaggacgcgaacgccttgccgcagacggagcaccggtgctccaccgccgccgccgccgccgacgccgacgccgccacgtcgtcgccgtcgcgtcgcccgcgcgccagcatgaggaggcagagcgcgaggtactcctcctcggagggcggcagctgcggtcgccgccgccgcgaccgcttccgcttcccccacccctccacctgtcctcctcctcctccgccgccgccgccgccgccgtgcgtgacgatcacctccgcctcctcctcactactacttctcgacgcctcaagaaccgcctccaccgccatggccactagtagcttaattagctaagcttggagatgatcacaactatcttaattaattgggtttcttgagcttgcaagggaaagagaagtgcacaagaaaaatggaaggagaagagagaaatggagaagaggagtggtgagtagaattgaagagtaggggaagagtgtggggtttatatgaggaggacaagtactcctactagaaacatatactcctacatggagagagatggagtggagtcttggggtcaaacaccgagaaaaatatatggatcaacatggatgaattagagatttataatcaagtctgtggatgattgattatgtgttgctaaataccctactaagctagcttgcttagtactacatgcatggttgggattcattagttattgattattctactagcaagattattctagaagagaagagagtgtagtactgtagtgtgtgcatggtgcaaaatactcccccgtctttaatatagtaatctagtaccggatggaacacttcatagtacaatgaatctggataggaagcatgtctaaattcgttgtactatgaaatgtctcgtcctgtattagattgctatattataggaccggatggagtatttattacttgttgtattaattaattaattaattgtgttggtgtagaggagctaattgagctagtccacaggatggaaaattaagcgtggaatgatccaatggaatggtctgggcagcagaggcggcgaccggtgccaactgccaaactgtattgtacttgtgctactgtactagtgtgatccatgtagtagtagtagcttccaaatggatatggctgtcaggctggagtgacgtgtacactacgtgcatgctgatccatcagaaattctattttcacaaggcaattttcctaccttagttttggttcttgttttccatgcttacgtcacacttcaaaactgctaaacgatacgttttcttaaaaaaaaattataggaaaagttgttttaaaaatcgtaatattttattttctatataaaattagctaatacttaattaatatcctaataaatcactttgttttacgtgcgagagattagtttcaactcatcggaccaaacacagccttaattttgcgtaccaccggtgtgcatgtgttaaataaaggtgattaactagttatgctatgagattgaataaaaattattatactaactaatctactttctccgtcataaaatattctatctagacgatggccaaaacatcttacgacgaaggtagatactacctccgtcccgatataagtgcagttgtaggtttctatatccaacgtttgatcgttcgtcttattttaaataatataatttttttaaaaaagtcacacataaagtactattcagttttatcatctaataacaataaaaatattaaccacacatactccctctgtcaaaaaaaaattaaatataggatttgatgtggcatattatagtacaatgaatttagacagatgtatgttcagattcattatactagaatgtgtcacatccagtattagttggttttttatggacggagggagtaaagtagtgcatatcactgcagtacacattgaccatagtgtccacgtggagggtaacgatcgataagccaggcgccacggcagcatgcaacgtcagcaaagtggccagctcacacctaacagctgacgtcagcaagaatgcccggccggcgccttctccggtctccacctgcggcctccgctagccgccacctggagtcaacctgtgccagccacctcagcatttcatggctgggtaatatacaggactccctctgtcccaaaaaaacgaatctagtgctagatgtaatatattccattataataaatctgaacaaaggtatatctaaatttgttgtattaggatgtgtcatatctagtactaaaataattttttataggacggagggagtagggcatagctacacgcctaagtaaaaatagaattataactactcccttctcttcaaattagtcatagttctagatttatcctaagtcaaattatgattatctttaaacaaaatatgaattatatattatagaagtattttttcctataaatcctacgaggtagttaagctatatgaatttatgaaaattgataatcaaagattacctaaaacgatagctaatttgaaacggagggagtaacatgtatgatatactagtttctctattttttctcctcctctctctctaaactatgtagtatatttagtgtacttatcttagagtactatgtgtagatctagctttgtatatttttcctctctctctaaactagctagtactctatccgtttctaaatatttgataccgttgactttttagcacatgtttgaccattcctcttattcgaaaacttttgtgaaatatctaaaactatatgtatacatataagtatatttaacaatgaatcaaatgataggaaaagaattaataattacttaaattttttgaataatacgaacggtcaaacaaaattaaaaaaagtcaatagtgtcaaatatttagaaacggatggagtatgtatttagtatatttagcttgggggatgtgtaaatctagctattgtacgaaaaccaacaattcttttacttggtctcttctccaaatatgcttgcagccctggaatatgtgcatcgtttaaatgctatatacacacaacaaactatataaaaagtatagaaaatgaaaaaattggtgtagcaactgatgagtacatgtccacacgtatacgcgtacatgtacttattattcttcgcggccaagcaactgagctcacttgagtatacgtacacatgacgaagctcgctagaattgtctacatctcagtacgtaaaagtcatgaaaaatatttctcgaatacgagtctaatggataagcaactctcttaattcaattgtcaatgaaaagttgcaaagtttaatcttaaaccccatcattggtgtggtcgttgtagatttgtaatcttaaacccgaaagaaaggtctaaattaatcatgatctcccataaatatgctttgtttgcgtttttaattagtgacacatgctttgtagctaataaataaacataatgcgcgagttgaacctagcttagcttacatccacttcaagttttgaacctaaaacgagttttcacattacgattaattgttttttaatggtaggcaacgatgtatcaacgagatgtacatctatcacagatatatgtctatgatgattttattaagtttaagatatgtcggtttagttttcggaagatattcataagttagcgttggatgagtgcgcttatacaagtaccgtgtttcgaagaaaaagatgcgcttaatcagcgtcagttcttgcctcggtgcaaaatgtaggtagcggataaccgtggcccatttctaaagaaaaaagagagaaaactgtggcccaggaacagattgtaaaggaacttaacaagcccaaaccgttagagaaaacccaatgggccggatcagataccaatcaggcctccactagatcacggcccatcagtccagcccaaatttccgggctttataaattgggataagttcattctaggcccctcaatttgtcacccagtctgattttcatccttagtccgaaaaaccggatgcaacgcatccctcagcttataaagccatgcaaacagtattgacccggttttggccgacttgattaggtcttcgtcccatgtggcattaacgtggtgcttacgttgttagagtgcgcagcccgacccaccaaccgtgggccacctaggtcacattgggcctgctccaccacaggcccaaccggagccacaactttaggtcctgggcctacacaaccaaaaagactagtctgatgggtgagaaccgcctccaccttttaagtcgtgctcccccatcaccaattaccgatgtgggactaaacccaacatatgtggcaattctatccggaaaaataataacccgtggggcccatatgtcagttacacacacaaaataataaaaaaatggtggggcccatttagccccacatgccatccctcttctctctatcctatctctctcacttgggcagagcatggtggagcggggcggccaaagcacacgacgggcaagccggagcggccgactggcggagcaaagcggcagcacccggagcaagccggcataggcgagggtcaaggcggcggaggatgacgacaacaacgcaagcgccgcagacaacgtcgacccagacagagtggagaaggtgaccctatcgccgtcactgccagagtcaagggcgtgccaggtaaggtcgtcgtccgttgtacacctcttgtgtcgtcgtcgccgcctagggaggagtccttggccatgtggtcctcctcgccacacttgtagcacgcacagcagcctccttgccgtcgtaccagcctccgcctccatagccgcagtcaccccaaccgtagctgtggtccccgccgttgctgggacggaatccgccgatgacgtcgaaccacatcaccatccctttcaccctctccgacgccatctcacgctctccacctgttggccatggagcgcgcgagctcagcggtgaagatgagcgttgcgtgtgggagaggagcagcgcgaggcgtggccacgggagagaaatgagaggagtggtgcacgatgtagcggcggaagagagaggagcatgcgcgcggcggtggcgggggagagagcgtcgtgcggcagcaagcgggagagaggagaggagcgtgggtggcgcggcggcgggggagagagcgccgtgagggttgccagcctccccacttctccctctctgccatccggtggagagaaggagataaggtagatgtggggtccactattttattttattttatttgactgacatgtgggtcccctatattttgtttaactttttagtttttcaattttgcttttttatttttttcccggatcacattgccacgtaagcgccatgtcaatgccacatgggacgaagaccaagtcaaaaggagacacgtaggcgccacttcatccaaaaccggtgacaataccgtcgagggattttgtttgcaccagttttgtaagttacaggatgagttgtatctggtttttggttaaaggatgaaaatcagactgggcgacaactttaagggacctacactgaacttattcctttttaatttcactagctgcttaaatcaggcccaaaatcaacatattagtcatcaaataaatccactccactagagtcaggctttaattggagtatttcccaaacaggagagaaaaaaggaagtaggaaaggcagattaggccttactattagtttccaaggtacgaaaatgacattttgcgatttgccaacatcaacagattcaacactagaaagaaaatttaaaaaggtgatgctgattggatccctgaaactaaagtttcgtccctgaccatcactaccctgtcacaaggtgattagtgacgactccccaattgtctcaatcgatgcttcttcactctccttttgcttagaccttatccctgagctatcacacattttcacacacacagacacctaccttgtccaaagacaagagtcgtcatcatcatccacatcataatcactttcttaatccttctctgatgagtcaccaatgatttgcacagtagctgtagtgctgtttggtgacgattaatactccctccatactaataaagaaagtcgtttaggataatgtttaagtcaaaccttgggaatataaatcatgaataactcttaagttattgagtttgaaaatgtaaaaattatatatatagatttgtcttgaaaaatacttttataaaagtatacatatatcacttttgaataaatatttttatagaaataagaaaatcaaagttgtgttttggagaccgtgtcgctgtcctaaatgactttctttatgagtatggagggagtaaatatatacaggtgcttaattaatttcatgtatttattttcttaatcttttttcctgtgaagtcgccatcagatggtccattacggtaaccgtgtgtatatatgggtataattgcatcaaaagagtcatgtcatgctttgagcgagcttgatgtgaatgtgatgtgttgctgtacatttgtgccattaattaataaattaaagccagtccaataatctggtcaagagtgtaataaactattggattagtactaattgctgttctccgatgcaataaacaacactaattacttgcccggaatccgatatgcacagtttcatatcactccccagtagtaccaggtcggtgccgactttgccatcctgcaaattgtatcagtattttatcattaaaatttagcactactaatttgttagtagtatatgcttttctgcatattaataattgttcagttgccacagaaaaagaacattttctgaggcagaaaatgcactatttcagaattgaatcatgcttagaaggaacatgccatggtctgtctgctgtgctagcagctgtaccttttgcctcttcatctgcttcattccatagcacataggccaaattttcacaactcatgtgatctgtccaccacaaggttaggtctccctaatcattaaccaaagtgtgacattaattattaaagaaggcagttcataatcaaagtgatttgtgagcaaatgtagtgccaggatcatgggatcctgacaaacacagttttttttttcatcagtctataacggtgtcattatttttttgtgtgtcaatcaagcaaaaaccttttctctgaacagtaaagtatgcagcaagtcgtcaacggagtatagtactagtagtagtgacagtagtactacctgaaagctcatgcttaagttgccagggaagaatagtaaacagcaatctccccatgtgatgatccttctacaacaaaaaaattctttttttctgcatgatgctatgatgatctttgaaaagattggagtagtagtgtcatgcactacacagggattacattacaagttgaggggg

SEQ ID NO: 11443 - DNA, 2167 bp, Oryza sativa
tagagatgctgtaacctcagtgtgcagttatctctgtttctttcaaaatgtatccattattaaaataaacataatagcctagatttagattatgatattacatataattacaaaatcccccaatacatcatgctgtatctgatacgtgcagcacagattagaaagtgcataagcactaaatagagcaattttagaatcttaattgtaaagcaatttgcttatccatgggacaagctgagcgtgatgaatgtattcactctcttaactgagatttacaatataaaactggactgccagctatgcatttatccataccgacctctaaaattgcactcacacttgcgttatacacaaaggaagtatcatcctaggaacagaccataggattgtatggacttgtctacatattacatgctagcaggattaaaataggtaaaattttcacatgcaaagaagatatcctttcgagcaaaatcaaagacacaagaacacaccaaagccatcataatacctttggattatattctgcattgcgtgcttgcaaagctatagctttgaggtctaatttgcaatccaaattgaccgtcgacacgatgtttctgccatcaaaatagatgagaacacataatgaggacttcaatttccttggtgagagtatccaaaggaagcatgataagccaaaacagagtggaacacatgcagtctaccagctatgatcccaacgctgaaacataaacaacccagaaaggcagcaaaacaggcatgcgcacttgtgagaacacatggaagcaggtacactatgacaagcagcaatataagcatgctcgactttttctgcaatgcacaccagcatgcaaaatatacatgcctggtagcaatgtaggcaaaccccaaaaacgtttcgatgcacaccagcaagtacagcatgctaataaacagccaggtttgggcatattggcccgtacaaacaagtataaaacttagtggggttatacatggatcaagcctaaatatgtggttcacttgttcagagcttgatgctgtctaaaaacatgcattgacccattgtcaactgtatgtatcacatgagcaccataaactctccacagacacaatacctccctctaaggttgaaatacgtgatgaggggaaagaattaaatcctacaatttagatgcatgattgattgattgattatttatttatttataaaccttaatttttttttaaaaaaaagaacagctgacaagctgattctccaagactccaaccatatgaattcattcatgagaaaacaaacatctgtccagctaaaaagagttgttatgaagaccggacaatggatccgtcacagcacaagcacatcggctgcctctatttcttctcgtaccggactcgcggatctcagatcgcccccctttttcatcaatcaagcaaatcagaacctcaaacatgtagtaaccccccaagctaaacctaccaccaatcacatcatttgcaacaacaaataatatccccggcccccaaaacaaaaccaaatcaacagcgcgcgacgagttaaccgctccacctcaaactcaaccagctcgatgaacccgcacatacagatccgggcgggggcgggggggacttactggagcgtggggatgatgccggaggggtgcttgaccaggtccacgggctcgctcccctccagcgccgccgccgcctccgccgccgcctccgccgccgccatacacacccccaaaaaccagatccgcaccccacgaatcaatcccaccggtgaagaagaaggaaaaaaaaagggcgggaagagagcgcgcgcgcgaagggggagggggagggaaaaatttcgaaatcctaggtcttttatatagcgatcggaaatcggaagcgggagagggggggagagctagggttatcgcgaggagaggatgaggaggggaggggaggggagaaggtcgcggcgagatgtggatgcggatgggtggggtggggtggggcccagcggatgggtggacggggtgcggccggtcggcggtcgaggtcacctgctgcagccggtggccgtgtggcattttgtttttttttggtttctttttaaacctctttttatttttaggttttcttttcaaacctggaaaaaaaatgatagtagtatatttct

SEQ ID NO: 11444 - DNA, 9311 bp, Oryza sativa
ccacctgagcccgcggaacacgcacccaccctctcgatggttcgtgggcccaccatacactcgccattacgatgacacgtggagcccacccagaggccaaatacgtagttttttctctggttcatttatactattcattccaaaatataataaaatataagtcatttttttaatgcttgctttctctattaaagtattatttattgaatcatctactcaagatatttaattctattagatacgtgcattatactatactcctcccaaaacataacaattttcggtgatatggccgttcactcgaaaattattatatttttagttggagaagtatttattagtgtgatcaataattatgtttttttaggttttagtatattttgtaatgtagggacgtactgtacttttttattttacgcggctgatttattgcatgcagtattattatgagactgatttattacagtaataataataattgcttgcgctctctctgactgaaacgtgggcccccatttgtgcagagcgacgcggcgcgagggtacagcgcggtgggaggaggcgcggccctgctgctgatgctgctgctgtggctgacggtgggcccggccttcgtctgagccggtgggggccacctgtcagagagccactgccgctgttactgtcacagtgtcactaccgatcattgcttctgtagagagagagagagagaggtgtagagtttgagagagacgctttgatagtgtcagtattattagtgcaactgctgcggctacttttgcctgagcttgtatgctagtagtattaatacttgctacagtagtattgtgttttggagtattacctgcattgatctgcagcacattgtttacctatccatatgatgatgattagtagtaccactattgcttatcaatgatccacattctgctgcaattgctgtaaaccttcttttcatgaggggttgtcactgacaagtggggcccgctcgaactaacagtaattgtcggtgacctctggttgactcctccatgtgagtgttcagggatgctgctctcctttgcttctcatttttgatactgtaaaatggagtgaacactgcccaagacttttatttaggcaaggattaggtgaaattacagtagctttgttcaatgaagaacaagtgagagtacagtagggagtagtggtgttaccaaaacagcctctggatttgcacttgcagacaggggtatttaatttcttttgtcctctgcaacagtggaagaagaggggtgttaatgtgattgattacagttggcaattttgttttcttgcagtaggagtaagctatagatgttgctgctgtagcatctgtggaggactggaccatgaaaagttgaaaactactacacacatgatatatgcaatgccttgtgagagttcttgttggaatgtttggaaggaatttctacatggacaaatgcataaggatctctaggatgctgacaatactggaaccagataatgacacccccaagtcacaatcacactctgcttggctcctgattgtagttagtggtgaccactgacctgtcctattatatggaaactggaaacattatgataaacctgttattccaatattttgagctagatgtatatgcatatgtttacatggaacatgagaacctgagtactgatgatcttcagaaaataatgttgctcttgtctgatcatgtctagtagatacaaccgttgggtcttcgaacttcacagaagattacaatatcggcagtgctctcctgtctactctagcattatagcaggagtagctgcctagcaagcagtgaaacaagaagaaaacaccaagcctgataaaagagaaagtcacaaaggctggaaaagcgcttcttttggtgacaactgacaagccccatgctactgctactgctgtactgcacacacacaaaagccaagcaatctcaggttgtatttatatatttttggaatcttgaatccattcacagtgttctacacatcttcaggatcaaagaaaaaacaatccttagcttgttagatatgcaaaggatccatgaggatttaggaacaatctttagattttcctttttctgttttgaggatcagtctttgatgattgatcccccacaaggccacaataatctccaaaaggaatgagactctttctccagaaacatcaacttgcttggagaagagacattcgtttggagtctaggacaactttatacaaacccactatgtaaaaaatgaaaagcaaaacctcaaacctctaaatgcatcccatattttgatatcttggtgaaagttgtgtttggctcaatctatgtgacagaaaagagaattcaccctttttgtcacttttcttttgactatatttggttttttatgcaaaaacacaaacctaacccacagcaccatccattgcaagattcagcctgagagggtggtgatccacctcttctgagctgccggagaagatgtcaaccggcgcattggtgaaccggaaactgtttctgttacccaaattaggccgcacaccatgcttgtgatggtcaagatagaccacaacgactgtgatatcgtcgtggaaattccgcctgctgcctctctctatatgtttgatatcagtgtatctcatctctcgtttcctcgccgcttcagtcagcgctgctcgcaccaatcgcttcgctatcccctatcaaacacaagttcacacaaatgcatcagattttgtatatacagttagtcgtgagattggagtaaaccatagcttactgctctgggattcttgaagacgatatcaaccgctgctttatcagttagctgctcccacagaccatccgatgcaaatatcaagaataagtcttgctgcctcaactgatgttctttgatcgatggttcagccgtcatgacaggtcgcttcaatggaatggaacaaacatattgccggaatatagggtctctagcaaattcaggcttcttcaggtatacatctccaattgatctggaaacctgagaatgaaacaaacagtgtccatatgttaaacagcatctcacatctcagatgcaagaaagcagatagtgagtgtaactgttgaaagttttgggaaacgtggtaaagcatactgatgattatggatgcaagtagccagtgtcattctttttatgtaatctaatattccgcaagatcgattaccgtgaggcttaagaaaatacaaaaaggagaaactttacacgagcatggcttagcataagggttagccacactgcacaagcaatcctacttactggctttttagaacaggatatattcctatgtttttatcggatgcaagaagtgctttacaaaagaatattagaacctaagtcacgatttcgagaacagatgcatcaatgtacattgaacatgaaatgaaagtgatgtccgaattttatctaggaaagaggaatattgcctttatccgagtaacaaattctgcacatcacggtataaagccagcaaatgagatgcaaggacataaatatgtaactttgctagaactttggattgcccatcaatttcagggtgtatttaaaagcagccattatgagttgcgatgataaacagctaaatcaaatttcattatattcccttaaaactactatctggtctcacttatgttttgcttgttcataatcatctgaaataacaggaggtaaatttgaattactatgtttctgaaacttaacgtcagaaacctgcaacatgtttgttgcgccttagcttctgcatgaagcttaatagtacaatccagatcacttggcggtgctacacatgactccaaatagtatgccacatacgacaaatataccgactaacagggttgaacggtacatacctgaatgatgcccttaatcctccaaactcctcgggtatagatgactatacgtgaatcatcaggatgctgctcagtgagctcctttctgacctcctcctctgcaacattgtggtcattggatagtctctcagccactacctcccgaccatcaggccccctacggccaaggacggccctcgagtcccctaaattggcgacatatagaacgttatcggtgattgctccgacgaggcagcatgaaccaaccgaggcaatctgtggctgcttgagccaggatcgcttgaccatgtgcaagaactcctcctccgtggcatggaatgccctcttgattgcatcggtggacatgccaccttgctcagatgcaaaccctgatccaattaattcagagcatggcatcgttagtacatcttaagttaatggtgagcacataacttgattgaattatgatgacatctttggtcagaataagtagtaaaccacaaaattcatctcatcaataatagacaacacaatctagagtctaccaagtaccagctggagctatcaaaagataaagcatatgcaaagttctaaatgagcaagtggtatatcaagcaaaaatatataatcatcacaatagaacactatccaggtatcaatagaactggacaaaacaaaggattgttatttcgacaaacaggttattaaattgcaactacacaaagaggagtataaactacattaattaagtaatcaacaaatccaccgaattctacgctaaacctgactaaaaagacgcagaaaactgaacggtcaagttaagcaaactcatataaggaaagaaaaaataaatattacgccaaacaaaaagaacgcattgttttttttgtcagaaatgaaaaatcttaaacctaccaagacattattacgaactgattggttctattctagatcaaatccacacgctaacaagcgaaaataatctcgttatcgaggcactaaactgtggaggtgggggaagaggcgggaggagatgaagcgggacgcctcggggccaccgtggccgtcgtagacgccgacgaaggtcgccgccggcgaggtcaccacctgcccctggtcctccagctccgcgttcgcctgcgccaccgcgatggagtactccccgctcgcgtgcggcttcagctccgcgtgccacagcaacccatcccctcctccccctccgccgccgccgccgcctcgccccaggcacctctccgccggccgcgccagccaccgcagcagcatcgtcgtcgccgcaaagatcgccgcgttccctctcttcctccacctcccgaaaattcccaccgaatttcctccgaaattcgcaccaaaactgcgctgtcgttgctgtctcttttgctcctattgttaggagctcgaaagcttcgctttttttttccccgtttttttctgtttttttaatgaaaaggcgcccaattaagaggcttgagacgacgattgaccgtccgattggctctcgatgggacacgtggacggcccacgttgtcgtatcgcgacgacagtgtggatggtggggccctgggagactgacaggtcaacgcaccggccatgcggtggtggggcccacgtggagtggggagacgagtcgccgtggcggtcgggttggcggcgaccgccggtcaagctagccagcaagtacagtgtactacacgtacccagctctctactacgcggctacgcccgagaaaatattaaaaaatatttcctctatttcaaattgatctacatatttcatagatatactctctcatactatatttactctagcaacaaactcaatacatgcaccatccccactattttctagccaatagcaaatcaagatattgcatgtgggttataaatgcttgtatgcatgtatcaatatccatttactccaatgcaaaaataacgaatagacctaatgaatgaacacaaatatgtagatcatttagaaataacctcaaaaaaaaactatatgtagatcaatttggaatggagggagtagatatataagatttagccatgccattctgagtgaatttttttttactttcggatttgaccatgagtaaaagttttatacaaataaactttcaacttttccgtcatatcattccaatttcaatcaaacttccaattttagcgtgaactaaacacacccaaaagtaaaagttttactacctttatgttataagctattttgacttttttagtcaaatttacttaaatttgatccaatttataaaaatattagcaatatctataatattaaattagtttcattaacaattaatatttaatctattttcaaaatatatttgttttatgtcgaaagggttattatatatttttttctataaacttagtcaaacgtttaacttgaaaaaaaaatcatataatatgagacagaagggtgcttagggggaagtttttagaatatatgaaacgtttaactgtatgtgtccaatttttttttattttctacgatatttgctagttggtgtgtacaaggtgtgcacggaaaaattgtgtgcataggatatgttcatgtactaagaatgacgtggataaatgttagacattcattttttttattattgtacagtagttttcatgtttacactaaggtttgcattatatatatttttctgtattctacgtgaatactgtcttgtatgtactatgtatttatacttatctacggaatctggtcttgtatgtacgtatttatacttatctacagaatctggagacaagtacgggtgatagagatgtcgaataggttatatagaaagttcgttgagaatgtgacttgtgtgatcaggacagagatctttgctcactgaatttcgtcaagtatcgattctgcctctgaaagtctgaagtctgaattccaattttccagatgacgaacaacatacttgcagaaggaacaaaaacgaatgaacgcgacacataacaaactgcaatgctcagctggattggcatcagcaagacgagagcaaaagcaatcactcactttcagattgcacaacatggaagagcaaacaaaagcttccatggaaaaacaggtagcagctcagctctcactctatatgcatggagagagcatgatccagttgcaaacaacccagtcaggttcaagacacattcatggtacagtaagatgctaactttctgaagcctcacacagtgacaaaagtatcacagatttcacagcctcatcagcaaaggggggaaaaaacttggtactggaagaagagcatgtgagcagtgacaaagttaagggcttaaagagaggttctacagagctgggtttagtttcatcctcaaattctcatccttctgctgttaggagcacgctggccctgcagtaggggcagtcgctgcgagagcgcagccatcgctcgaggcaggccgagtggaagatgtgcttgcaccgcagctcgaggagcccatctgcatccccacatctctccaggcatatagagcactccgttgaaggtcccgcgagttcgtcatcatctgttactctgcagcttgctacttcttgtgtaggagccggttcagaacaatgcgcgatgaacgtatgcttatctgcggtgttgaaggtttcagctgtgctctcttggagtttgcagggagcgatcgatacgtcagtgtggaagcaactggttagactgctgaatatgctatctgcggtggtggagacgcccggggctactccaccatgaatggtttctgatgacaacgatgtattttgcctgcaacaatgggatggaatttgtaaatgtagattctctgtagcttaagttctaagctggaggagggagtgcgaaaaagttgatgcggaccttcttcctgataagtccacgctgttaagcctctgaagtagccgttccctagcctgctgaacggaatcaggaagccggccatgatctgatacgctgcggtttagccttgagctggagcccgtgctgcctgcttgtcctgttatgtttccagcagatgcgacaccctttgaggtatctcttttgcttcctggaacatgttcctgaccctagtttcatcaatgacaaatgttagaaacagtggataattgctgaagaagatttcacaacaatcatcaatacatgaagaaacatggaaaaccatacttatttctgccgtgaaaatgatattgttgcatactaagaaagagtgcagataagcaaggggcacatgaaagcaatagtgttcagtaaaaagagatagtgtccatatgattatttggtgcatgagcacacttcacagttgtctgcacaccacaaaactagaacactggttcagcaggctactacgagggctgatacttaacctgctaaaacactagaactatgttctgactgtatatgtttagtaatgggaaatctagtccataattttggcgcgaagacaagcattagttagtcagaaacgattgctactaaacaatgggaatttccataaaaggttttgaaatagcagtttaccagcaattaacatctaattagtactagtatgaatgtaaagtactacaggcttaattgggctactaaatttgagataccaaccaaagaactgtctttgtcatttaaccataaatctacattgaaattagttgaacctctcagaaaaagatttcggtatatgctactagtattccacgagtaccttcttatcatggttgtagtaaatacccttcacgagttacagcacatgtacagatgtactctacctagtttgaaaaggattgtcaaactttctactagtaccactgtaccagctgatgaattccccagaacaccagcaaacacattaatgtttcttgaagaacaaaagatcaccgaacccatcatttacactcataatcatagatctcatcaacgaccaaatttactaacacataacttagattttgcgagaaccagacttgacatttttttttttgagaaaattcgatctatagcacagaagagaaagcggtaccaaaaaatagcacataaatttttcgctttcggcgagaagcacaggccaccgtttttccttcgacccgtagcacttccgtcacattatgaggtaacggcgttagatcgaagtggagaaaaatatcgttggactcatttgcccttcgtctcttctcccttattccccatttcctccctctttccaagtccctatacgaagtcccaccctctgctaccgccgctgcagccatgcgggcaagcgccactgcacgctccctgaagggcttccccttgtcgccgaccacggcggcgatcgccttcgccatctgcccagagtcaggcacggcgtccgcgccctccgccaggtgcatcgccacgccggcctccaccagcaaaatcttgttca

SEQ ID NO: 11445 - DNA, 2228 bp, Oryza sativa
tctgttgcacgactcactacaactgacactgacattgtgtagacttcttggtctattctaaatcctctcaacaaccaactataaattgactgaaatgttctctccgcaggcctatcgatgcccttagatgtcattacaaaatctgacagatcacaccatctggaccaaatctaatatttccttcaccgtgaactatctgaaatgtgaccttacttgacattgtgcctgatgaaaacaataactgcgttaacctcgcatttctgtactacgccctaagttacattctctacaatattgttctctaaatttctaaaattacgttacattctccagatcaaactaaactacatcttacaattaacactactgtctatgtctcaattcatactattatattctatgctctggatctacacatatgtgctgtgtgctacagatgtgctaaaatatatggaactaaaactaaaacgcaacatatatactcaaacataacatattagtacaaatgcaaaagatgtatgggagcatacctgtgatgaattgagcgaaccagcagggcttcgccgctccccttctgctgccctcccctctctctctttcgttttttttggatttttagtgaatataatgaaatttcacagaggagggactgggctttataggggggaggcaaaaatcgccctcccccagggcggcaagggggccgcctgcaaaattccatgccccctcgccgcccatttgcaagcgcccccccccacagtacaaaatcgccctagcggagggcggcaagggggccgcctgcaaaattccatgcccccctcgccgcccatttgcaggcggccccccgcacagtataaaatcgccctagcggagggcggcaagggggccgcctgcaaatttcgttgacggccgtcgcccgagagtgaacggccgtctgccacgtcattttcgccgccctctgagagggcgattttcccagagggcggtaggcgactacttccgtcaattttcaaaatggaaaattatttttgtaaaacttttaataaaaaaaattataaataaaaaaaaattccccttttcaccgacttcacctcacctccaacattccttgcctcctcggcacttaagtgttaccatcaacttaaacaagaacaaagtaactaaaggaaaaaaaggttaaagccaaagcaagccgttaatagcatcatctcaatctagtgctaaacaatctagatttcaccttttttgatcgagtgctagatttcgtacccagtggtgtaagtgtataacatttttcgctaatctttttatcaaagcttactgtttcaaattcgaattctcaaaaaccatttgaaatttcacttagaatctactctcctgtaaaaaattagtctcacatctacagtaaaaaaattcgcagttctgaatgggctttcgtcgaaaatataaaccctgaataaaatctcccttctctcctggccacctgcattcttttctagcagaagaaaaaattaatttcaccagacaatgaactgcaaagccactgtaaggaaaaaaaaaaaaggaagtgagagactcagccttggtgtggcccacacacagtgagccagcgagtggctgacacagaggctagctgctgctgccagtgggccccactggtcagtgtgcttcttctctctcagttctccaccactcactagccagtgtttttattgctctccttcacttcttcacttcagctcagctttgctctctcctccttcactcctccacactgaaatctcactgccattgccaatggcggctcgccacctcctcctcccggtgctcctcctcgccgccgcctccgcggtgacctcccagtcgtctccggccggcgcgcccagctccggcgcggcgcactcaccggccgcctccgcaccttcgtcttcttccaagaaccgccaccgccacatctccacctcccccgccgcgtccccgtcccactccggcaacaagctcacctccccggcgacctccccggcgccgacgacgtcgcctccgcccgccgcggccacctccccgtcgcccgcattgccgcctcccgccgccgcgccggcgccgacgacggtgtcgccgtctcccccggcgccggccccggtgctcggcgcgccgccgcccacattgcccccgccggtggccgcgccgccggtagcgctcgccccggcgccggcattgtcgtcgtcgcc

SEQ ID NO: 11446 - DNA, 19843 bp, Oryza sativa
ttgcctgctccttactactctcctttgaaacttctttgcaaatgcttccacaatttctgaacataccttgcaatttctccctttaaagaattcttttgtttgcctctgatgacttgcttttgcaaagatggatgaatctatttccataaagaaagacaaatgaatccagatatgtatccagtacaggtcaactattttaattttatcctcttgtccacagcttccaaagatatcttggtcttgaattactgaagccaaagcaacaacgtgtgacaacagcttcattttatccatttgcatcttctgaaactttttttttttggtgttgttttttagttgcaatgatccccttttcttgcctgaaactctatcttgttggcatgcagaatgttcccttcaagagtcaatcatcatagataaaaaaaaggaatatccttttttcctaatggtgccatttgttctacttctcttaattcttctttttttaaaaaaaaaaatcattgatatttaaattctgaactgatctgaacttctggggacagcatgcctactggccatcagctgcaaccttttgcactgcaaagaatgcaacctcttttcacttcaatttccatgtagtagctacctatgctttctttctactactccctcagtttcactgcctgattatttaccttttcactgcaactccctttttccaggttacctttgcattcattcattcatccatgcatgcatgcaactgtgcaatcaataatgctccaatattgcattgcaaatcatgaacatgccatgatctagtaggaatagacacaaatcaatcagcatgcactcattaattagccaagatcgatcaaatgatgatcaatggacactttgggatcaggaattcaggattaggacttaatcccccctgcccaaactgcactgatcacctagctagaacaaataattgattaattaacagtgggagaggaaatgattaagctagtggctagcttcttcttgttcttcttctcttcttcttctacaaacacaagataattaagctagagtagtagtagcacagtgtgatcatggacagcttgagcttgagcttgagcttgctcttgctgttcatgtcatcctgaggctgagatactggcactgaaccagccatggcgactgctgctgcttcatggcgtcgcccatggcgaggtcgaacgccattgcacgctggcacggcggcggcatgggcggcggcgcgtggaggaacatggcggcgccgtcggagtactcggccgacgacggcgacgacgagaggccgctgccggagcagtcggaggcgaagggggaggagccacctgcggcggcggcggcggcggcaatggcggcgttgcacttgcgggagctgcggccgccgccgacggcgagagtgaggtccagctcggccgtgtcgtcgttgtcgtcggcggcgtcggcgctgacgatgtactcgtcggcggggagctgcaggttcagcgcgcggcgaggttgcttgctgctccggcgaggctgccggcggcggtggccggagctcagctcggccatggtcaggtcgctcatcagctgcctctgaattcggtacaggcgatgcagctcatgaacctgattaataattaattgaaacttaattagaagtagttcatatgtaggattcaagaaatttgcaatggccagtaattaactactagtagtaagtagttgataggattaatttcagtgagatttacctgctgcctgaaggtctcctcatgcttgagcatggccatcttcatcacctccatgtcacattgcctcacaagcttgtccatcctcatcatctgcttcagctaagcctcttggaattgattgattgatcctagtgattccctcaactttgattcaggattcagatcaccaattcttgcacttgcaccctgctgaaatgtgaagcaaagataccattaagtactttaaaaaaaacttcattttcattgatcctaatggttcagacttcagaaatgataaattacatcaaaagagctagtagcaagatgaacaaaaaactgaactttgagagcaggagctcagatcaagaaacatgatgatgtcatcagaacaatctctgagtgacacaaacaacatttcagacaaggatgctaattctaccacaaagaacaagtaactaaccaactaactaaccttgtatatgtatccaaaacaaccaccaagatgcttgcttgtttctgttgtctgttcctctcttcctctactcaacttccagaggacaaacaagataggttcagaaggaggagtatgagttgtgagagtgaggctggtgaatgtgtgaagctggaaatgggagttacaggggaggtggtgatttataaacactggcaatggtcactagacactaggtagagggtatatttttaccttggaccctcctcctttttggcatgccaagcaagaggcccagaggcctggggcaatggcactagtcagtttgcatgaggtgcccctcccagagcagacaaccctgcaggactctagtttaatcttcttctctattctctcttgtgtgggcccccacaaggaggagtagtcgtacatttcaaaggttttttttttaagtacatttcaaagttgaagcagtggcactttgtgtgtgatggatgcaatgcttaacacactaaacaagttagggcccctttgaaatggaggattagcaaaggaattttggaggattcattttcctaaggattttttcctatagagccctttgattcataggaagaggataggaaaactttcataggattgcattcctatgatcaattccataggaaaataagcaagaggttagacctcttgtgaaactttcctttgttgagtgtatcctgtggtataatcaaagggctcttctctccatttcctgtgttttcaattcctgtaggattggaaaaaaatacaacttcaattcctacgtttttcctattcctgtgttttttctatcctgcgtttcaaaggggcccttagcatgcatgatcattgcacaaatgcaggcaaatgcattgcacacatgtaggagtagtaccatctaccaatgccttgtgcagttgtgcaattctttactgaatgaatcagtttagttcttttttttttcttctgaaatgtatgcgcaagtcaggttgcaactaactggagcagtagtacctagtaagatggagctgtcagtgttgtcactgaaaacaagcaaaggtgcatttccatgtgtgaaatgtacctgatgatgatgaggggagagatgagatgagatgagatgagatgagatgagtgtcctcctgtacaatgaattattgccacagcattgcaacatatgctaatttccctttgcaatgcctgcatatatgcatatggatgcagggatctaatatctatccaaatggatgcatccaagagcacaacatatctttgaggagggagataagaagggcaggttcttgtctcattgttggcccatcctgacaaatcagagcactgttgtttgttgttaacagcagttgctgtggtatatgtttgcattgcaggaaaaccaagcaagcagagaaaagaggagaagcaaaggctgatgatgcagacacatccctttgagaggaagcatcagctaagcatgcatgtctgaactctgatcctgacacaagcacaaactatgtggggtctgcatagtttaatcaccggtgcttaattaattttgcttcactgaccaaattactcaacactgatgctactagtgtgccattgcagcaaacagctgactataagacgtaatacctattagtgataaaaaaaaaactgttcataaaacctttatgtatacgttcttcgcaacttaaaaatgaatgctgaaacttaaaaatcaattctgaaaaataaactacgatgaaaaaaatcatcaaaatcaacctaaaatcaagttttcaaatttaaattttagttgcggctgataagctgaaaagccttaatatacataggtcggtattctttgccgtcccagcgaaaaaaaaaagttgaaaagcaaacgatggagctaagtccacagcttcaagagctgaggaagagagctgtattgtgcagggacgaattgcttacaataatggagacttgaaaagaagaagagatcattttttaagtgattagtgcactaataagaaagcctaagcaaagggtgatggatgatagtccaagggacaagacaatggcgcacgctttgccggcgcagggaggcgcatccgtacggcgaggtgggccccacatctagagagagagaagcactcctgctttctcggctttcttttctttctttctttcagtcttcttcctactgcaatggctttttgcaaggatgattattattaatttattattatcatcactattttaccattaacaattactactactctactcactattgttatgattgttactagtgcctttagaattaacaagtacactcactgattagtactagctcaatgcaaacctaaaatttagctctagcagtagtagtaaattagtaatagtaatgtagtgtgcatcttttgtggataaaagattagtaaaaggtgaggaattggaacagtagaagctttgtagatagaggagaaagtgctaaagagagagggagcaagctctcacccatggtgagaaaagacacttttgtcaggaggttttagcctctcttcttccaattactccatgattttcaggacagctcatcgattgttttcttcaggaaaagcaaattgatctgtggtgacacacacaatgcagtataatcagtagtcagagtagcagagagtgttcttgtgcatctcaaaagcatactctgtactgaaaaaagaagggggttctgttgatctgttctattctgtttctagattcatggttataactagatgattcttgttcagaaaagtttcaagtttccaatctggttttatccatttcaagctctcgtcagaaattttccaggattagatgatgcttgctgttaataagtgatagtaacagacagcaattgtcatctctgatgtctgatggctgcctgacaaaacctgttcatgctgttactctaaagttgatgccattttggcctgaatgatttgtcagggtagctctcaaattttaaccaacagcagcatgcatgcaggagcatcgactgatcagtgaagtttttttttataaaaaaagctacttactagcaccgagcagataaacaaacacaagaattaacctgatagctattgcaatgataaagtaatcaggggagtaagcaaagcatgcagatgaactcgcacggggctagctaaaattcagtgctgaacttttcagaggggggaggaaaagtacattacatcggtgtctgtaaaaattcaggtcgcagcctccattctgtctccccacacacactgcatcctcaaagttgcagccttgctcatcatttcggctacctggaaccctgtgcagtgcagctctaacagctagttaatcgtaggatgtaaaagaaattggaggaggaacagaagaatgtccactaacctgaaagaaaaattcagaaaagagagctttgctgatgccaccaccaccatcatcatgatgatcacataagggtggtcagtgtgagccctcacctatttgtcaacacctaaaagaagatgatgaacaatgcactgatctagtctagtccactacaaagtgaagtaattttttgtggatggtgatgatgagtgcttgtgtgagccttttcccatctctgaattagatggtgtgggcatgagtttgttctgcataaaatggttttgttatgcttgtttgactatgtatatatgtaacctgaccaattaacatcatgctaatttcaatgacatatttaatcagctgcagatcaaactgaacaagatggtgtgtgtctgtgtgtgagagtttgttctgaattttctttttgttatgcctgttgaccttctctgcatatacaacctgactaattaacatcatgctaatccacaaactaataccataataaaatcagctgcagatcagactgaatatttaactgaacaagatgatgtgtgcttaaaatcttcctgttatgccatgttgaccttctctgcatatacatcctgaataatcaaacaccatactaatccataaaccataaactaacaccataattaatcagctccatacatcacatgagcacatgactaattacacatcacactgaaaccatgaaaaagctcatgcatatactacatcaaaactaatcaaaactgaagaacaggattagataatgagactaggataggacctgaacttttttgtgctcggctttcctcgaggccggagccagccggagccgacagcgccccgccatgcacgctcgccggccgttgccggccggcgagccgagacgagcaccgaaaggagaagtgatcagtggacacaggacagacagtggctgctgctactttgcaattgcatggtggaaatcttttcttcttcctcctcctcttcttctcaaaaggcgaggcgtggtgatgacctcacacacgcacacacagtcactaaccctaagcttctgtagcttcgaaggatgcgcctcatcatccaggcctcttgttcttgtctgaatttttgttactgttctgaatttatcagagcctctgggtatgaggttttgtttaaagaagggaaatgtcttctgaacccgagttttgtttgaagaaaaaacaaaagcatagagcctctgaattttttctgagtttctgactcatcagagcctctgaatctgagctcttttcagaagaaaatgcaactgaagccgagttttcttttcagaaaattttgcctctgaatctgagtttttctttaattaaaaaaattgatattgaatcttaattttttttcttgtcgttctgattcatcagagcctctgaatctgagtattttctgacaaagaaatgcatatgatctgagttttcttctcaagaaaaataggtgcatttgaatcttcttctaactagtaagcaaaaaagattgcctgtgattccgagtttttccatacaggaaattttggttttgaatcttagctgaacttcaatttttggatgtgcatggaagcagcatggacaggtctttgcgtgtctgatggaggacccatggacgtacgtgtgataaagtgctttgtttcagtgttatttttgcaacaagaagtacactacgcagctttgtcatcgtcgtttttctcagggcctagtatttatcatgtcttttcatggagctgaataaaagcgcttttaactgaaaaaaaaaaaaaagttagctgccatgctcatcgttgatgaaagaaatgcgtgtaagtttgaaaaagaaagactgatactatactcctgtagtcctgttggtactacatgtcgtttggacatgattgcctgcaaacaaacgaacagttcaggtcaaattcgtatcgagaagaactgatgaattgttgactgaaaaaaaaagaaggatttacatcaggttgtttcttccaaattttccctcaaagagtttcattccatgtcacaatctttcagggttctgactttgcatttcaattttgcatgcaaccaacccagcatggattgtgaatttgtgattgacagaaagtgagccctgttcttcagagatatcagataagatacatgtatgacagtatgagatcatataatataatcctccaattcttcagaggtttctgaatctcggcagtctgtaccaaccttaccagcgaaaaatttcagcaattcttctttgacctggagagaaggccagtcttgaagatgcgcttgaactcttatgatctaccccattcttgataagagggataactgactgtatcaggtaatatgtgctgttgtaccagattaaatcagacagcaccagaatacatatatattcagaagaacacagaaggagctgcataaaaaatgtgaatccccatggaacatagagatgtcagacactgaagatgcagaacaccaaatcttgttgggagatatgctgcattgctgggtgacatagatcatgtaaaaagttcagataccaaaccaaactctgaaggatcaacacaataaaccgggaacaagaacgatgctctgcgggcagagcagtgacaaatcaaagattatggcaacacatggtaaaacagttgagaagaaatatgccttcggtagaggaacaacaacaaatccaggcaacacaaccgaattctccatacaggtaaaggtaaactgtaacattgaccagtaaaatccagacaacaaaaccaaattctccatacaggtaaaggtaaactgtaacattgaccagtaaaatccaggcaacaagaccgaattctccatacaggtaaaggtaaactgtagcatttacctgtaagcgacgacaggatcaaaggcattgccagaatttttcattattgttgtgattaatcacaagtaatggaagttcactatcatgtaccctaagatgtatcatcctgaccaccaaaagccatgggtgtaccacccagccctatgacactaactctccctccgcctgaacctaactaaactgtagctttctacagcagaatgaatggcaatgcaacactgcgacaggttgcctacactggtcaacataagattcactaaaagaatccgagataactagccaccctcattcatccgtttaacagatgagcagaaatcttgtcacgtacccgagaggagttacctcccagtaactggggattacacactacagctgtctcaagatctagcaatgaagcttggtaggaatagtcagctgaacctgtagagcgttgatactgcacgccatttataacagcaacagtagtcacatttggatagttcatcatcactctctttccccttgatttcgccacgcccatacaagacttcagcagccgacttaagtatgcattcagcccagagttgagcacatcagcacactcctgagtcaagctaagaccttcagcttgcagcttattctcaagtagcttcaacaagcgctgagcttctggcaattcaccatttttgtagcatatcaacgaaggatgaggaatcgaaggccgagaattctgagccttcggatctccaaacgaaacacccaaaggagccctaatcgggcttctgctctgcgcatacactggactgcccccggcctggttaacctcctcgccatcctccacagacacaacctccaacggcgccttgctcccagccgacacaaactccccggtgccctgatgaccaagcggcgacttcccgagcgggctcggcctctcgaacctcgcctcccgggtagccaacgccggccctctcatcacacccgccatcacgccatggttggccacggccccgttggacacggacacggtgctcgtctgcgagttcccggtggttgcctgcctgctcggcggcggaggcgggggcggcgcggtcgccaagtaggcattgctgaggatcgacctgatgagaaaattgtgatacttgatgttatccctccccattgtagccacgcagatcttgtcgaactcctccttcccaagctgcccacccaggaacttcttcaggctatggaagtagtgctcggagcgctcggcgcccagcttcttcgcaatctgcgacttgatctccatcgtgtccacgcgagcagccaccttcttcgccaccggcggctgcatcttggagaccaaatgcagcagctcaccggcgaccaaaaccctagccgccgcggcgcgcggcgagattcgaagcggcaacctgcgaaaaccagatcaaaaaaaagaaaagaaaagaaagcaagcaatcaatctttagcagggatcaagaactccacaatccagcacaagaacacacgcatcccccaagctgctgatccaggagctcaccgaatagttggaacaaatctaaccctaaccccatctctgaagcagacctaaacagtaataacctaatcggaaaccggaagcaaaccaagctcgaattttagacaaaccccagccaaatccgggatgaacaccacccagaaaaaaaaagcccccgaatttcacggggtatagaactagattacgaaacacggaatggatttgggggaagaagaacagcaagatggagactaacctcgattgggaagagcgtgatgattccggatgtcaagaactcagaattagggtgaaaagaaaagaaaaaaatggatcttttttttttcggattgcggccgccgcaatcgcagtttatatttcccccaaattttggtttttttttcttttttttttctgggccgcgaggacgaactcgacctcacaaggcagtgtttgtcacggtggctcgtgcgctaatgtctctctgacaggtgggccccacgcacacgcgtcaggtgtgtgtgagacaggcaggagaggagataggcaggtttgcctctgcccctgacacgcacgtgccgaaatgcaaaactgacttattaaggctaatgatgagtacttgtggtctaatgcaagtgttaagtgtggtctctccgttttgtttgggtgtaaaagatggttaaatgaacaagatatggtagatttggttctttactctctatctctctctctataagtgtgatttctccttttatttgagttggagatagtaaaatgtagaagaactaaggtagtgtttggtttcgggactaagtgggatgggatggaaccatccctgatttttgggttgggatgattccactcacatgtttggtttgtaagatgggacgatcctaattttttgtttggttgaagggatgagagagggaagggatggacgccgtttgcaatcaccgtcaaccgatcgccagatctgccgccacattcctccccatcgctggaggaagagcaagaggatgagccggcggcgagcaagagcaagaggaaaagccgccgccgctccttcccatcgccggatccgccgccgtccctcgacttcctcctcgcacgccgccgccgctcctcccctgcgagctcctcgttgcaagccgccgcagctcctccccatcgccgaatccgccgccgcaccatcgccagatccgccgccgcccctagacctcctcctcgcacgccaccgccgctcctcccccgcgagctcctcctcgcaaccgccacagtccccatcgccggatttgctgccgcccctcgacctcctcctcgcatgccgccgccgctcctccccgtcgccgaatccgccgccgcagtcctccccatcgccggatccaccgccgccgccctccccaccactggatccgccgtcgccgtcgctgagccccccgccgccgtggtcgtcgtcgccgagccctgcatggtcgccgtcgccgagcctgcagctgtcgccatcgcacgagccgtatgctgctgctcccgagggcgagcagtgcgagcgcggtaggaaggcgtcgtcacgccgttcgctcgtcccaggtgggacgagttcgtcagccacatttttccggatcggttggtcccggatctaagaattcctctccagggaccaacccatcccactcacccctcaaccaaacacccctaaaagtgggttcgtctcatctcatcccatcccatcccttcaactaaacactacctaacagattggttctttactcctaaagagatgaggagagagatagtgagagatagagagattgagtggacaaagtaattggtagggagaaagtctatttttttaatagccattgtgagatgattgaactgtaaaatgagatttcataatgtgattctaaaacatagggatatttcccatttgtttgtgtcggaatagaacactagctaaattatagtcattagttttcacatggaaattctattgtattaacttgtggctttccacgctaaaatgaattaacatgcagtttcccgcgcaaaaataaaaagttgatgtgtaccattcccacgtaaaattaggtctacgtgtcacttcccatgctaaaatgaattaacatgtagtttcccgtgcaaaaataaaaagttggtgtacccttcccacgtaaaattaggtctacgtgtcgcttcctacgctaaaataaattaatatgcagcttcccgcgcaaaactaacgtgcagcttaaggtaagtttagggtttccttgtttaaatgctatataaggaaaaaaaaaagtgctatatatacttaggctgtgtttgagaagaagaaaatagataagattagaaagatacgtaaaacgaggtgagccattagtgcatgattaattgagtattaactattttaaactttaaaaatggattaatatgattttttttaaaataactttcctatagaaattttttacgaaaaacacaccatttaatagtttgaaaaacgtacgcgcgaaaaacgagggacaatctctcctatctcccctgaaagaacgcagccttatatgagtgcaaactttgtcgtatatggtcacgcttcagctcttggtgcatataggatgacgttgggttgtccgcctcttttctccaatccaatcaccgtcttgaatgcactacccccaacagaagatattgtctatctagaaattctcacaacaaaattcatacaacgataataaatttatcaaaaattaataaaaaataaactgagttcaactcagtaagagatgtcgatgtacatccccgctacccaaaaatcaaattttggtggaattatttatatgttggaaacaaagactctcccttcgtaaaagttgaggtagcatcattttcaattgttaggggagtgattaagttgaaaacaaaaatagtatcaaactgcaatattgtgcaaatcaagtgaccaaataagctaatatgcccaaccctttttttcgttcatatgttgcatctttttttagggatatttttaaggtacccttagaataatactggccgtccactcttatcgatctaatggacctgatcttcttctactgtcagtagtagtatgtgcagtagaaaccacgtggagggcaaaaccgtaaagaaaaaaacacagtaatattacgctttatcggtgattagatggaatgggcgcgaaatgtgcggtgagaaggcggcggcgaaggcaggatgtgatgagatcggcatctatgtcgccgtatggtggccgtcgctcttccggccaccatgagtgatggagttctattatggagtaccagttaattcgtctccgcgatggccaaaaattatcagacggcagctggaccagtcttcgatgcggcagtaattcgccggcagagcacacacaagaaatgtggccagcatcctcggcgatgccgacgccgtccaacgggccgcacaaatgggaggttgacccttccgggtttctcggcggctacaccggcgatataactttctctaatagataaatggtcagaaatacccttacaatttacaggataaagtaaaaattatcgtataaatcaacggtcagttttgatttatactaccctactgccatcgctcgtaaaggtactgtaaaatgacccttttttagtttaatcacttcaagcaatttatttatttcttaattaaactaagtacacgatctctttacagtaacagaaatagagagcaagttggaggctccatcttacccacgtccggcgtttacttcccaaatccgaaagcaattcggcaacatcgttttcagatgcaccaataagtcgcagatgacacttttctgaatatcacatctttctgattgagtagacaattaactttcttgtctaatcacctgatgtatttggcatcattaagctctgaaacctcagaaaaatccttttttaagtagctaatgttcacctctgatgcatgaattaaagaagaatcaagaaacagctactgaagaaggtgagaacaataatttacggataaaacttctacattatgtatctatgttagtgatttaaaaactaacgctgcaaaataaactacaataaaaacgtctaaaattaagttttaaaatttaaattttgacagcaatgtatgggtcagcaagcgtgcagtgtaaatttggctgcaatcggatttttagtgtagggtgtactttactgaaagatgaagtagtccgcaaaatctacaacaaaattgatgctctttgatgaaacggccataacatctagtagagtacttgttactacttcatttcttattgctctgatagtctgcatcacaggaggaatcttgcattatttctgtagtttactaactaggtttcactttggtcaaattaagatttcaaaagacaagatttgctcccatgtttcagggttcagaacttcagatataacaataatctactagtactgattagaacacatgacaagttcagaaactgacagcatattgactaaaacctgtaaacaacagatgcaaataattgtgcattttgcataattaactgcactgggagtttgatggggccttggggctacattgattagaggaatcagcagtttggctacagctaactcgaaaaaggatggatcattaacgcataactaataacatattaaatattataaattaaaaaaagatttatttatttatttattaaaaatatttttttcataaacacattattaacgtagttttagaaatgtgctaacaaataaacgagaagttgtgtttcaaactgctgaaaagaatgcccatggtaaaaaagacaaaaaaaagaggggcctttgcctcgccaattgtttgctctcttcatggtatgatcaagatcctctgtagtcaaagtctgacatgtgcgcccgataatttctgagtccacatgtcaacgataaaggtatcgtacatttgactgcagaggatctcaatcggtcgtggtgggggatggaatgggaagggtgagagtgtgatataaacaagtggaccccacttctctccaccaacgctatctaggaccgtgtatttgtgtgatccaacggcacgaaatacctcagggggttccagttttttccccccgacccccgaggggcgctcgaaataggcttgaaaatgagggctctttttggaaatttttgcgaacctcccgccgccgcctcaccgtcgccaccggcgatcgacggcggcggccggccagctgggtgatgcacatcatgaacttctctgttattttgcggcgtgagcttgctactgatgaagtgattaaccgcttgctgctatcttgagtcggttttcagaaatgtgttggatcaaaaagtgtctgcgttgtactatgtaattctataaaaaaaactatcagttttttttttgatgaactggatcgaaagagcaggaattgcactgcaagataaatgtaacattagctccgttttgcgctttgaagatgaatttgagttgcactgcaagattgatggtgtcattgggctttctagctacttgctgcagatgaacatgaaaaaggaagaaactatttttcaagctgaaagaccaagcttcttgatttgaatgtgatgagattaattgcaattgtaaaaagaatcagcttctcagctctgaaagctgaagctgttacactttactgaaagatgaatttgtgatgtaactctgcaacagaattggttgatgttcttcgctaaattgccacaatttctcctcaactaatttctgattgatctgccagtttgcatgacacagaggaatatctctgtacttaattaactaacctgtatttttcactttgacatatttgcaaaatgtgttcccaatgtttcagaacacaacaatctcctgacaagaacacatgatcatcaggagttcagaaaactcactgtactcttctgcatttctgttgatatttccagatgtgaatcactgtacactaattctccttgctgacactgaaaattctgcaacaaaacccatgtctctcaattcatttctgattgatctgctactctgcaattctgcatcacacaaacaggaatatctctgtacttaataaactaaactgtatttatcactttgggggcaaattaatctttgacatgtgcaagatttgctcccatgttttcaggattcagatcacataagacaacagttttttttcctgacaaaagctcatcaggagttcagaaaactaaactgtattcttctgcattttctgtagatatttactcaaactgaagagaagccactgtaataaattccaatcactgtacactaataattctccttgctgacactgacgccttctccggcgtgctcgccggcggcgaggaggagggcgcagacgtcctcgacgtcgtcgtcgccgccgttgtcggacgctgccgatgaggatgatgatgatgatgatccacggaggctgtcaggcggcaccggcgtcaagaactcgacgcagccggtggccttcatgtgctcgacgccgtagtacatggcgacgccggcgacggccacggcggcgctgacgacgagcgtcctggcggaggcgaggcacatgacggtggtgatgaggacgacgggcgggacgcacatggcggcggcgcccgcggcgccgacggggatccggtacgggcgggggaggtcggggtccttgacgcggagcttgacgaaggcggcgaacacggcgagcatcccgaggccgtagaggaagttgaggaactcgacgatctcctggaagctcatgaaggagaggatgacgacgccggtggccgagcagaggatgctgtacgtcggcgtgccgtggcgcgacctgcgcgcgaagatcgccgggatcatgcccatctccgccatgccgaggagctggaacgagtcgccgctcatctcggcctcgaagagccccatgttggacatggccgcggcggcctggatccacacgcgcagccacggcccgccgatccggtcgccgaccacggagaagaacccgtccgtccactcccccgccgtctccgacggcagcgcgcccgtcccggcgaggagcgggatgaggtacgcgcccacgacgagccccaccgcgccgaacaccgccttcgggaacgtcttcctcggctcctccacctcgccggcaagcgtgctcgccttgtcccagtagttgaggttccagaacatggagttgaagtaggcgcgcggctcaacggcggccacgttcacggcgagccaccgcgacgggcggatcttgggggcggcgagcacggcgagcgcgacgaacggggagagcgagaacgcggtgagcgccagcgcggagaggccgacgaggtggagcccccggaagttgaggtaggtgagcgcggcggtgagcgcgagcacggcgagggagcgggccggcggggagagcacgagccccccgccggagcggaggtagtcgaggaagagcaccgggtagagcgcgttgtcgagcgtccccgacgcccacttggagaacccgacgaggaacgccgcggcggggccgaacgcggcggagacccaggcgacgtagccggcgttggtggggaacgcggaggcgagctcggcggtgacgagcgcctcggggagggaccagagcacggggaggacgaggaaccccaggatcgggaggagcgcgccgccgccggcgcggaccgagtcctcgatgccgaaggggccccccgacacgtcgtagaagatgagcgcgacgagggggagcaccgtcagcccccgccgccgcgccggcgccgcctcgcaggctccggtcataggcgccgccgccgcccgcgcggggggttgggggttggtggggcgccggtgaggcgacggcgacggcgacggcgacaaggtgttcgacgaggtcgcgtgggcgtgggtgaggaggaggggaagatattgtggggggtgggtgggtgagtgaatgacaggtggggcccacggggtttctggtcccgcgggaatgggaggaatcgcgcggggtaatcgcgtcgggtcggtgggcccacgtggcagtgtcggatgctttaaattaatttttgccaataggccttctaattgtttcttttatggttgataaattaaagtttttatggttgacaaaaggcagcacatggcgcggctctgtcgctggttggttgcaggaattgtactccttcccaaataaaataaacaatgtctgactataagcaattttttttaagagtaaagtgtacgggcggtccttaaacttgtagcggtatgtcatctaggtccctaaactcttaaaatgcaaatccaagtctccgaacttgtcatagtgtgtcatctagatcccaaatcaccacaaccccttcaggatcctacgtggcgtgtatgtggcatgccacacggacatgacatggcattattttgactgacaaatgggacccatttaatttttttcctttttcttttttttcttatctttttcccctttcttctcctttctctgtgatccgtgcaagaaaaaaaggaaaaaaaagaagaatgagaagaaaacgaaaaagaaaaaaagagagaaggacacgtcacgtccatgtggcattgccacatcagcacaacgtaacatcctagaggggatgtgtcaatttaggacctagatgatacactttgacaagttctgggacctagatatgcattttgagagtttaaggacctacatgacacaaccttacaactttaaggaccgccaatgcactttactctttttttttaacgaatcgatatttatagtatgtcaatttcatagaatttagtaggagtaaaagttgtgcaaatacgaaaagaaaagaagtgtagagaaaaattaagctaagggatgagttcggatagccgtttcgttcctgctagggctcatgttttttgacctcctcgattttcgccactagggctaccgtcgaaagttcgttgtgttggaacactatttggtttctctccttccaaaattcctacgccgtaagtacgatgaggggtgcggataccttgttttggtagtacctcgctagtggccaatatcgtccatcattcatggaccgtcgtagttgtgcaccacattaccgatttgatttgcttgagcgaggtatatgttgatagcatgtcccatatatctattcgtgtatctatattccattaggaggtggaatgacattgtgggttgtgccagcaaagtgagcagtaggtaatatctaaactttaatcataagttaatttattttgtgatggagcgcataacaaggggcttagctattaatttttggttttatattgatacaaaccaaacaagagctagctaattttgcactactggtaggatagagtcatagagaaccaaacgagtctaaaagattcgagtaaaaattggtcaatgataatcccacgtcatatccacccttttgcaataatgtacacctaacgtttgtcacgttgttagttggaaaaacgcacaagatacattaaaatgtgtgacgtttgggatttagcatcaacatcagcgagacgtccgtgcgtgtgcccgatgggagaatcgatgctcgcttcttcatttcttcgcttccgtttttttttttccttttgcttgattcgattggtgattctttcatatctgtttttcttttcctcgattggattggtgattcctttggttgtttacagctgaagcacgctatagtattgcataatcaagcgtactaataattcttttaaagcaaaatggatcaaacaaaattgcttgtaactccatccatggcgattttatgataaaaaagaggatgggattgtaagtaatctttgtttccaaga

SEQ ID NO: 11447 - DNA, 965 bp, Oryza sativa
tcggggtatctttctcgtatttatcttgacatactcacgttcgcattcctcttgatttatcgaaacttggtcctcgattcacaggtttgagcagtagggccgtggagcgccaagtcgggcagttaatgatcagtggaccgacaacggcgagtgacgtccccgtgcccctttgtgaaaagggggcgacggagcgtgatgccgctattaacgtaagtatactcgatggacatcccgcctttcctcttgagatcatcttatgacttgattaagcgtaggctcttcctctgactgacatcatcgggccgctcgcggaccatcaggtggcggcgtctctaaaagagaaggttgtcaaggaggcgtctgatgctgctgcggccactactagtggtggcaatgctccgacaaaggggaggaagttctcctctgtaagcggacatcgtcgcaaagcgccgaccccctcggtaagttatcctatcgccagatcgcgcagccagagggattttgccttacttcgcgttggttgtctttcaggctttggacgcatctcccccgcctccgcgacgacaacgtcttgtgacgatcggcgagaagtaagtagttgggtttttaagttcccatgattctgttcaagcgttgtatgatccgtggtcgtcccatagggaagcgtgggcaaaggccgcgcagagcaagtcaggaggggcttccagcgcctcgcctaccgcggcctcgacggatgtcgtactcgcagctgggagccgggaggtgacgcctagtggcccagtcagcgatcccgcggcaggtcgtggtccgcccactgctatcctcgcctgggaggagctccaagtcgaaatggggcgcctcctagaagctggtgcccgcagcattggccacgaggttgcagaggcaagctcagaagcggcgttggcgaacgcgcgtgctgaccggttggtgcgcgagttggcgga

SEQ ID NO: 11448 - DNA, 723 bp, Oryza sativa
  unsure (1)..(723): unsure at all n locations
tcgccccatgaattcgaatagcgaatgcacnngcncnnnccnnnntnggnccctncacaaaacacaggagcagggtattacgcttttcagcggcccgaacctgtatacatcgcccgtgtcttgtgctttttccattctcgcgaaccttccacacacagactaggagcttagaatctcacccagggcccccggccgaaccggcaaaggggggcctgcgcggtctcccggtgaggagccccacgctccgtcatattcaattactgatttgatgaaactaatttagttttattaatgtaactatatttacctataaacttagttaaactttaaaattgaaactttgatcaaaatcaaaacgttttaaacagtactaagcatgtggtgccgtgacactctggtcacgtcgacacgtccgtaccgtacgtacgtattgcttgcgtgtggttgccacttgccagctcgatcgatcgggacacgagtagaatggagtaatggtaagtgcatgcgccacacgtacttagcccatataacgtaatctgttctgccatgcatgatactcccttcgtccttaaaaaaacaaaccatagttttcatgtataacttttgactgttcgttttatataaattttttttataattagtatttttattattattagatgataaaacatgattaatactttatgcgtgacttatctttttaaattttttcatattttttta

SEQ ID NO: 11449 - DNA, 3641 bp, Oryza sativa
aattcctgcagccctagcacttgtgctcggtcacaatgctaactttccaataatcattccatttacccttatatgcatggacacgccacggacaatcttccttcatgcacctcacttcatacacataatttgttgacttgaccaccctaaactctctctgcaaggaaactgcccaatgcttcaccgcctccttcatctcatccttatgagcataccttgcaccctgtcacaccccgaagttttcctcccaagccaaaattgtaatttttataaatgaccctaagaaaatgcaggtgaaatcaggagaaaaccctaagaaagtaatgcaaataataatcggatttgacatgtggaattttttcttgagttctacatgtcgaaattcattaacaggatttttagtggaattttcagagctctagaaataattttaaccaattaaaattgagcaagcaatattttaattccagggaaaatcctttttcctttttccttttctttttcctctctttttcctcctttttttcgaatgggccgccggcccattccctccttcctcccctcctccttgctgggccggccgcaggccgaggcccagccaggccgccccgccgcctcctctctcggggtcgccgacaggtggggcccacctgtcgggtccttcccccacctcccgccgatctcgcccgcgccgccgcgccctcgtctccgcctcctccgggccacgtcgaccacgcccgcgcgtgcgccgcgtctcccgcgcccactcctctccctctcctgctcgcgcccgcgcccgagatggccgggattcgattttcgaatcccgcctctctctcctcccccactccccacgtcggccggcgattcccgcctctcccggccacgtccggttccctctccccctatttaagcatcgccgtcgtcccctctcactttttccccatttcgccgcactctctcgagcctcccatcgctcccgcgccgtgcaaccccttgccgccgccttttccgctactccggccgccgctagccgccgttagggtcgccgccaggccgcgccgtcgccgccgtcgggttcgcgtggccgagatccaccccgtccacccctcctccgtcgaggttcgtcgccggagccctcgttccctcgcattcgggtgagcaccacctccaccgccgccttcggccatggtttccggtcgccgtggtccatctccctctctctaatccctctcttctccttccttagggcaccccgaagctcgtccgcccgccgacgtcgtcctcccgtggcttgccgtcgccgttcgccatcgtcttcctccgcgccagccaccctcggtgaggcactccctccccacttatcccctccctctccctcctagccgccgctttagcgccgtcgcccgttagtcgtcgctttagcatcaccgcccttcggcgccgccgtctccgccggcggttgccgtcgtcggcaacgcgcgtgcgcgtgcgcgcgccgtcgccgtgaccggtcggccggttttgtgccgagccgagcctagcctggccgccgccgcaccgtccgatcggccccgggccgatccgggccgtcgatcccgtggaccggcggtggatcacccgcgtggtcccggtccacggtagaccggccacccgtgcgccgctgacatgcgggcccctcttgtcggcgccgcacccccccccccctccgtgctgacgtcagccctggaatatattgcgcaataaatgatttaaggtttttcttttatagtaataaacacagtgaatcttctaaaattcataactaattcatccgagctccgtttaagcccattcaagtctcagtaaatcaagaaaaatgtgtagaatacattaaaaatggttttgttccctgtttcagtagtcttatagcctgtttgcaatgtttgctttgtatgtcgctagattccgattcctccgacgctccggtgtactttgagatagtcgccgaggttcctccagcagcagagcaaggcaagtcatgcttgtcacttgaacatgttgatcctatagtgcaaatgctctattgttttctttcaaatattgcattgttttataatattactatgggatggttacctattgttacagccatgtttttggatatcatgctcctttgttagcttggggttataacatgattagagtttggactaggaattgcttagccatgcttagttcaactagttcacaatggggaaaatcatattaatgtttagactgttggttctaatgataatgttggattagtaccaccgctctggtgttggttaattaaaatgaatcacatggtgggctgtgggtgcatggttttgctggtcgcacccatggcagttaaggaccggttcgtgggatgccctggaagaacttatcgtacttaccacaagccagcgtgggcaacggctgggcttgtagtgtagctttcctctagccgacgcatccaggcaagggtgggcgtgatggagtttggatgggccctgcgacggcctatgcggcttccggattcacctaggcacgagaggggactgcccgctgccttgcgaggagtgggggtgaaacctgaggtgtggtgtgcttggttagagggggttatgcgaatggtcctgtcacggcctctttccggtatgtcgtggtgacatgtcggcgcacggaaacgtgtcgtggggctgtgtcttgtgggtacagttgtacacctctgatcagagtaaaactattcgaatagccgtacccgcggttatgggcggtcaaccagattcaccgtgattagtttcaccttagtgtaatcctttaatttggatagtttaggtggatggttgggcctgtcgcaacgtgggttagcgttggacagtggatagttaatattaattaattgttacaactgtttaaatctttcaatctctgtttataaatgctcgctttatgcaaatgaaccacttcagctcttctttgatgatttccctgcatcatacccctattccggtatgacttgctgagtacagtgggtagtactcagtcttgctctacttttcccaaccccagagttcgagttcgggtcagatgaaggtttctctgaggagtaggcttcgtccgtgccgtcgaggatgcctgtggagtggtgttcccgctgcagtttagtcaaagtttagtcaaggcttagctcctgttgtctttcttttcttccgctgcatttatgtaagactttatgatgtttgtaagacgtggatttgtatgtcaacattgtcgtttgtgtaccccggctggtcctggacggggattttaatgcacattctgcttggaattctattcgggaatttctgggcgtgacacaccctcaattacctcgttctccttatactcccagggtacatgatcaccctctgatataacaagtccagagaagtcctcatttgcccaatcagtggccattacatcaccttcctcatcggatgatgcgtcgttgtccgcttcctcattatccgaatcttccctctccatttcatcaacaattataccgactctatccccctcatccgccatgcccatagcctgctcctaccttggttgattttcctcatgttgcatcgatggtccaacaacatccc

SEQ ID NO: 11450 - DNA, 9556 bp, Oryza sativa
tcccagagggcggtaggcgaccacttccgtcaattttcaaaatggaaaattatttttgtaaaacttttaataaaaaaaattaaaaataaaaaaaattccagaagcgcacactccctagcatatccctaacacccaattcaaatatcagaatccttttgatggtcgaacattttctgtgcaaggctgcaagctgtgcaaaattttgaaccattttgatggatattccttttgtttgcaaggtattaaaaacagggtgccttcaggtggtcaggtttatagttggtgtggaagaaatcttcagctgatcacaagtgctctttagttttctctctctctttttttttatcatgtcctggacaactttatataagtcttagtctgaaggaaaatacagtgaagattcttctgaaatattgatgtttttggatagcttaacagccctgaaaggatatgtctctatacttgtgtttgacattgccgaaatattggcttctccttttgctgtggaatgaaacagggctatgactctttcttcgtgttgttgttgtaatcagtagaaccaagaaaaaacactatcaaattatatcagttgtgtgcctgtactttgtcttgcctagaatttctgctgaagtattgttcacctggaagcttgatatgtagcaagagcaattttaccgtacttaagaaggtaccatgaggtatcactttttctactgtaaatttggtacctcttggtacctagttaccatgagataccaaattttacactaaatttttagtacctcatgatatctactcaatgaccgtaaaattgcttatgcagaagaacaactgaagtcctgatgcctcctaagctcaccatagcaatccgacaggctacccttcatgacccttacatctctctctctctctctctctctctctcacagtttgtagcatctgtgttcatctgtctatttttatattttaggatggaaggagtaagtgttttgccttagctttaatttcagctagttatcctttcagaggagttggggaattgtcccatagcttgacgtttcttttctttgttcgcactgaaaccttttggagctgtgtgcttgtcagcagatactggagatgcaaatcatttccattatccaaaaaatactaggacctgctagcaaccctgtcctacttctagctctactggtgtgtgcacaagcacaatgaacataatttcagacattccatagttaaatgcattgaattatcctcgccaaaaaaaataaagacagtacatccttacatgatacagtgatctgctatggcccataaaagagaaggcaaaggagcacaagtgttgcaagctactagtaagacactgacagttagtcatggggcctggtcgaatgtcatttgctatggtaggcatcagaggcatcaggagctctgttcatctttcaacaagctgggctcttacataatgaaccaggagctctgttcttttttaacaagctgagctctagatcgatcatcaaccaggagcccagttcttttttttaacaagacgagtttttacaggatggccagcttgttttgttttgttctcttttttttttcaaaagaagaaaacgggtggccaccttttgtatattataagcacgcactgcagttataatatgtaactaaaaaactaaataaataattattaaaaaatcatgaccgtcaaggccttgagctgatagtgtgccatcaattcatacaaaagtagatgaaaatatggaataaaaagatcagttcatgataatgaaaataaaactattgatttaacatgcaatggtgtataggtgagtattcattatccaaaatagtatgggtaagtattgaaattgaactccactttaattgttttttgtagatggaaggctagccttgacagcatacggagtttactaggattgccaattagtaacctctgaacttgctagttgacaaaagaaacacaaattcagaacaaaagaaataaaaacaaggatcctttgattcgaggtctttgagacagaactcatcgatggccattgccggtggatgaaggtggacaccttgggtggccatgcaatcttccttggtttagagtgcttcaagttttcaggttgcgtgtgtagtgtgccttcaggttatagttgaccaaaaggcctggggctcaatgacccggcccatggcacgaggttttggcccggcccaagcacagcttgcccgattggtgtcaggtctgtactggtccggctcgacctttgggccgtgcctgggcctctagctcggcacggcggaggcaaatagatgagggagccaaaatagacttactccagccatataaggcatgaccaaagacacgagggatgcatagggatacaaaatagactttttttaaggagcacagtgaactttcatgccttcaggctgacccaatacggcccgagtcttattgggccatgcctgagctattggtgcagcacgttggcgggcatggcctaacccagtgtgtaggtcgggccatgctggcccgattgatatcgggcctgtgcctagtcgtgcctgggctaggcgggccatttggccatctatacttcaggtggttaggtcaataattggtccggaagaaatggctagtatctgacaagtgtgctttacttttgttttattatggcatgcatttagtctgaaggtaaatgcagtgaacatcctgctgaaatactgatgtattttggacagcttaacagccctgaaaggatctgtctctataccacctgtgttttacatttcctaaatcttgcttctccttttgctatgcaataaaacagggatatggttctttcttctttttgttgtaatcagtatagccaacaaaaacatgatcagatcatacagttgtgtgccagtactgatgttcatctggaagctccgcatgcagtgaactgtccagaactgcaggatgaaagcatatctgcaactgctgatgattccatgacattactactccatcaaatgcatgcagtattgttcaattgggcacctactgggctagaaaagaaactgaatcatagtgttgtcaaattacatcgaaaaccatgatcgtcaaacccaaaaaaaaaaattgcaaacatcatttaggccatatacaacaatattgagcttcctaaccaaaattcttttaattttttttccaaaatgaaattgttatcgaaagacaactgcgtcatgtcgaaagatgtggttcactcagtgagttgatagaatagtaaaagcaatatattaattggtaattttttttgggatccccccattacatggccctagggggctatttatagtcttagtacaggctcataccctctagagttttagttagtataggagaatttacagggaaacccttatgaaagggacattagtgtgggtacacagtgtcttttgtatttatgggccaccaggcgatctccttgggccggcccactgatggcgaaaggccccaatgggccatagggcctcccaagcccatagtcgaaggcacctccaacccgggtgaggacctctcactttgccttatggccttcgcccttagtggtgacttggtcgaatggcgagcttgggggcgaacccatcggtcttcgtcgcttggcttcgcccaagcgcttcaccctattgcttcgccccgagcgcactcctttggactcagtcgacgcctagtggattcggtggtttcagcaggtccggtcgaagggcctcgtgacatgccaacaatagagatatatctagcgggtaaagggtagtactcctactatcgaagcattattatcggcgaagactgttgtcccatgtcctagggcagtcccactagttgcaaccgctcctcggcatgcttgtggtctctgcagaaggataggggcgacgccgagtgggtgacatggaaactcctggctactctgtagcaacacactgcatggctggaatggcttcagcatccatgtatggaagattacatctcacagacaattctttgccattcagctggcatgtcaacactgccattgccgttcaatccagggcctgccacagcgatgttctgttgaagtaacagaagaactcctgatgcctcctaagctcaccatagcaatctcctgtgccagctctcatcacccttacatctctctctctctctctctctctctctctctctctctctctcagtttctagcatctgagttcagttgtctattcttatatggagcagagaggggagaagtgtatcgtatatgaatgcacaaattgtttctatggatgtagttattcaggcttgcagctgatcgaatttaatgtgcatgtacaagtgcatttgctcgatcaaccatacccaactcttcagttaaacacccatgatgcaagtgaacgaagtaaatagattgctcatgatgaccatgatgcaagtttaagtatgtcttagtctgaatgaaaatgcattgaacatcctgctgaagtgttgatgttttgaacgtcctgaaaggatgatcagtttctgtacatgtatttgtcattgcctaaaccttgcttctccttttgctttggaataaaaatgggttatggctctttttccttcatgtaattagtagtacaaccatgaaaaatcatgatcaaatcatagctagttgtgtccatatacgttgtcttccccggagtttcttttgaagtatatttcttcagctggaagcaccctattccgtaatctgtccagcaggaaggctaattaaggaccaaaagagaatgcatatctgcaactccaagcagtattgttcaattcaaagcgagtcatattatcgtcaaattacatcgagaaaccatgaccatcaaacaaagattgtgaacggattggcaaaacatcatttagctcaacgcaacaataccgagctctctcaactaaaatctttttctttttccccaagataagttctgaaaccactatgttggaagttgataccaggatgccatttcctagatggtgtagcatgtgcgagaacgagatgaagcgtgagcctccacaaagacaagtagtcctgccaactgtaataacagttcttcagccatgtcagcactgccattggaggtcagttcagcacttggcactgaagaactgtacaactgtaacagaagaactcctgatgcctcctaagcataccatagaaacccacatgctcttgttcgtatgtccttagttggcctagtgagctaggtgtggtgacaactccatttggttggctaatcttggagatatgttcagcaattgttgccagtttgatctcttgctctgatggtatccaaaggcatgaacatctacatcctactttccctgtctcaaccataaactgaactaagttcatcaaatgattattcagttataagctttgatcgaatggagacctactctcaactctatgcagtggcaattgcttaactgcccatatagcactctgaactctgttcctgaaagccagagtttataacgccttgcatccaaagaaatacaactcattttctttcactaactcaactacacttcaaaaacagagaacagaccagtgaattatgcttgaccattccaaacaacgacagaccatttgcaggtaaataccttgatcatttggtatgatcagcatttctaccagattagatataatcccggctttccatggctcgatcctacggctacccaaagtcatggccatatctagctacctcctactccctgtctcaacttctacactgaactgagcttcagatgattaatcaaccattcatagcatcgactgaatggagatatatatatcctttgcatacatacacgttcaaggtagtttcccaatgaattactttgctactggactatagacgcacaatatataattacagaatcaaatgatacatcctttatataatagcaaggtctctcgggctctcttttggtctatatgtatacatgttagctgatagctagcatgcagtaacaaacgaacagttagataaggagaccacttctgtgaccctgctatcgtaggcctaggaggcattgggagctctcgtcttaggaacatatcactcataagagccccactgcgatgctctctactggtaatagaaaacaatctgaaccattaatcttatttcatcgaatggtctatatctatttgtactattaccccagttggtggtagtagaaacatgtatgggcattattatccaaagatgtgtcgaggggtataatcatcatttagcagtgattaaaccttttttttctccgttttcttgttctgatggaatatgagtgatgctagtggaatggatgaccagatcgatctagacgaaaaaaaatgtaaatgataaaattactcctaatcactgaattagtaaattattaacttacccttaataacaaacggttcagagccctggagcatcactccagaggtagaaggacaggcctcaaccagatatctgttagatttaattgggtaattgatacatttaaatcaattaaatcaaataaattccaaggctcattatgctaggaattcatgtgaattcattctcttatgggatatcaatgggatgaagagttttgagaattaatccatttgattagggaattggtaacttatatcaattagtcctaattgatggatggttgatggttgtgtagtggatgatggttcatggctagttgatgacaattagttgctctattcctcttcctattacattggtgatggttgtgtagtggaggatggttgatggctaattgatgagaattagttactctattcatcttcctattccatgactcttactcttcatcttccattcctcttataaaatgagaatggatttgatctcccgcgtaagaggaagacacacttttatccattttccaaagctgttgctgctacggtaatcccattccaacgagtgtgtgcacacgcgttgggagagtaggcctccgaaaccacgcgttgctgtgacgtttgcacagacgggcgggcgatcaggtttttgggagctcaaggcgcgactactcactgttcgtcaacatctacttcaccttcaccaacatgtcgaacactggagacaaggagaaggagactcccgtcaacaccaacggaggcaatactgcctcaaactccagcggaggaccattcttggggtataaccttattacattatttcaattagaagttttactgttaatgttcatcgcaatgtcaacattgtgttattatgtgattgttgatgcttattctacgttaagcatgctcatgttgattacattcaccactatcactggatcaaatcctattgtaaatatcatgtttattatcttgttattttggattaaaatatgccgaattatgaccaaatttccaacaatatcaacatgtgcaagtcccttcctttgtcattttgaatgattgttcataattcaggtggatttgaggaagaactagagtgactcattggctatggtaggccttggaggcatctggagttgttgggttcctttgaaacaagtagaaatatgtacggtacggacagacggagttatcatcgtcattggtactttcatggatatggaaatcttgttttacctggttggagttcatcttagtttccatatgaccaaatgataaagctagctacttgtagctgacagaagagccgcatctggtagaattccctgttttcatccctctctaagaaaaaaaatcaattcctactatgtctatggagaataaccaagattggaagttattatgaatcacattcagttatatccttataataaatttgactagagttgtctatgagtcatgttaagaaaatgagagtaattgtagaatattgggtctccatccgatgatccagatctgcccatctatttgcttcaactctaaactgaactgatcagctgactagaaacatttctagctagggtagaagtgaaagtagatatatgtacaaatccaagcaatgcatggtaggttcgtagcaaaccgggcttacttcaattgggttctgaataattgcttgaaaccaaccaagcagtacatcttatgcgatattgcaatctcctacggctaattggcccataaaagagcaggcgaagaatcagacaaagagatgcaatctgatcaagttggatcgatggaccttatggtgcagattagctagtgccttcgcaatcgttaggattggaaagcatcatgaactctcatattgaaacgctagctagctagctatcggcctagctagttgaaaggagcctacgttttttagtctgactcctatgtggctaagttactgttcctcggttggtcaatcagaaccatagtcacaggaaacaggatcggtggcagtattcctcaaactgggaatacggaggcatcttcgtccccaccttataacaacgtctcgtaagtagcgtgtcacattcctcgacccgataactttgtgactatgatctaatcatctgaactgattgctgacaacctgggtgtgctaataggtattcttctctcatttcattatgtagcaatttacaattaatcaggaaatacaagtaaatgtttatccagcatatctgcaattgatctgtaccacttgtccagctacttcttgcagtgttgttcaattaaaagtgagtcatactattttcaaattacatcgagaaaccatgatcatgaaaccaaaattttgaacggactggcaaaaaaacatcattgagctcaacacaacaatactgtctctcttagccgaaatccttgaattcagaaaccactatgctggtaaaaacccttcaaagctgacatcacgatgccattcccgatttcggagtagcatgtgtgagaacaggaggaagcatgagcctcagcaaacaccactactcctaccgactgtaacaactctttaccactcaacagccatgtcaacactgccattgcaacctactgcagcacttgccaccatagaaccgtccttgtgtaacagaacaactcttgattcctcctaagcctaccatagcaacccactggcctcatgcctcttcggttggcttcagcaattgctgccacattttgatctctggctctgatggtacccaaaggcttggacatgtctatgtcctactttcccggtttcaatcataaactgaactgttgatcagcaattattcagtcatagctttgatcgaacggagacttgcataaaactctatgcaatgccaattgctcaataaattgaaacatagatgctaaataattaggaggaatcaattactactccctccgttttataatgtaaatcattctaacattatctaaattcatgttgatgttaatggatctagacatatatatccatctagattcattaccatccatatgaatatgaaaaatgctagaaagacttacattgtgaaacggaggatgtacatcctagcaaaatatcactagaatatatatagcaatggcct

SEQ ID NO: 11451 - DNA, 5728 bp, Oryza sativa
caatgaacaagctttcgaagaaatgcgtccattcaataagatgatttttttttctctacagctaattcaggccgacaacaatgttgaaatgatttttgtaagcaggaaatcaatgtcagcaagctgaattgacagcccgctcctcccgtttacagaactcaccaacaagtaagagtattcataattctttcttctatgtttaaattggagtttcgctctctctcttatatatgtaacacatgaaaatttgaaactattcctatgctgaatgaaaaagatatcaatgttatacatgatgccattgtatccttatatttactttttctatgtgctcggaaaaatgatctgtcaattttatattgttgcgcattgttgaggcacgaagcctaaaacaattttaaagtcattgttgttggcaggcttgccaggtaaaaaagatagaaaccacacgtcatgacttcaatttagtttgtataggcagtaataagtcccataaaagacaatactaagaatttttttgggtaaaaatgcatgttttttccacataaagttccctgtaatagtaatatgatcgaatttgatatggattttcacttgcaacttttcttctttttgcagcaaacttatttgcaaagcactcaattcactactttgcaattgcttcacaagttaaattcgtgctttgaaatttatacaactcattcataaatagcccaccatccagctgcaatagtttcgatgttgaaatgcttcaatataacattggaacactggggaaactttgattggaggttggaaagtgtgaggaaaaaatttttatggcatcaacatttaatcctacatgtgctaatgacggattaattaggcttaaaaattcgtctcgcggtttccatgcaagctataaaattagttttttcattcatgtccgaaaacatcttccgacatccggtcaaatatccgatgtgacatccataaattttcttttcacgaactaaacatgcccctaatcaggaaaaggttagcgcaaaaggtatgcgtgttgtgaaacaaatatgtaggagataagtcacggacgaacgacatcacagatccgcatggtgacctcggcctgatgagacgatcgacgacgacttttgatgatggtggcgcaacaacggcgtgcgggcaccgggcagcggcgctccgactggcaatctcctctagcggcttgacgatgagcgtgataaaagtagcaaagccgacaggggcgagcggtagggcgtcgccgacgagatgatctcccagttgatagtggcttctctccatcgggacggcgccatcttgcttcgtgttgagatatcgaccgacgcgggcgccgggcagaaaggggagaatatgcatggcaggcatcacggacggatggtctgcatacgcaggcgcgatcccaggccgtccggctcatatgcacgtacatctgttgatctcttgttaattggtttagcaccggtctacttctgctggtcttgctagctagtgaagcatgcatatatatatgcgtacgcatacatggccgaattcacatcacacatctaccctcccaaatgtcaggccacctctgtacgcacatgcatgcctgaatcatttaattagcttgctaattaacctgtttcctgctgcaatcaaccattaacacacaatatacaagtgattatattttataaatatgtacaaaataccatcaaacatatgcattgtgatattaaattgtagtgctgtaagagcaaaaagaaagatggagatattgcatctcctttttcgaaaacacacaacaaaggagaatgcttctaaattgccttctttcccgtcgtgattgaggagcacactcaacaataaaatgttgaagaagatgtctcgccaccaccagtgcctcagctttaaaaagttaagttgtatggtaatctttttaaacttttataaccatataagcttcttcgctagttttatatgttttaagaagctatatattaatatatcatgatacacttttgatgatttggtatattatattatttacatttgcattgtatatattaccgtcactgcgtatgcccgccgtgacgccatctgcaagaacgccggcattgcatgtactcaggaccgttgcatgtacacccgtgcatggatggaattgaatctccatcagctagaagtagcacaaggcggtggcggccagccggacgcggcagagagatccattgcgtgccctcaacttcatcagctcgggctaatcatggtaattagtaagcttagtttgtaaactaatttactaattcatagatacatcccggcacgtatctattaaggtacgcggtctatatatgtttttatagattgattatattttctcgtttttatcatattatctagatgctttgcatgcagtagatgtgatcctgctattgatctggtggtaaattaatttcctgcttttatctacatgcgtctattttatttgatgaaaattagagaaaatcgtgtgagagaaatcactaaaattgatgggaaaccctggactagagacgtatctaattcggttgggccgaatcggtcgtctcgcccaccctcccatctctctatttctgatgacgccacgccaggaacacagcgacatattctcagttcatatagtcggacttggagacatgtccatcgttcgccgtcatcactgttgggtgcgccgtctcagaaaaagccctgttgggtgaagattgacgatgacgggaggagcagtagggccacgctggagatcaaaacgcggcggcgagctcggtattcacggcgacgaaggtcttcccggggtcttcggtttcggcgagatggctgccgggctttctcttgtccttgcagagccgagggaggtggtggcgcggagcggcgacgaccgaggcggcagctaggggcggctggagcggctaccggcgacggagagagggcgctcgcggggaaaaggtttccggcgacggcggagagagggagaggtggcgcccgaaagaggagagggagggggctctatatatagccatgggagggagagatcgggcccaagacgaacatggcgacgccgggaaaagctaaggttttcgccgggaaaaaaaaaaggaatgacttgatccgcgaaattggaaaggatttccatagaaacttttggggatttattggggaaattgtagaggggattgagaggattccattcccgcaactaatttgggatgaggagcaacgaggaggccggatttggtgagaggtggtggcggcagtgcacgcgcacgggctctggacggctggctggaggttgaagatgcactgtagtgaaagggagaagaaacagacttccggctgggcttctattcctcggcccgattgaaggaggactcaggctagactttggaaagaaaaggccgaccagacagaggaaggaaggacagccaaggactgaaagagaacttttcctatttcggcccgaaaaggaaaagaggatttgatttatttttccaattaaattaatcaccgaaatgatatttgaattgttaaaaataattccaatgctctaataatttcaataaaaattctaaaaataattagacactcaaaatatataaaaataattaaaaccagatcatttaatgattaatttattatttaaataattacttaaatgtttcctaatttattaaaattagtaattgagctctgaaaaatccgagaaaattccagagagtataattgatcatggagaatttaataaaaattaaatccaaccattctttacacttagaaaattttatttcccatatttaacttcacttgtaaattaataaacatttaatataaaatttattaataatttattaaataatttataaatcctgaaacggaaattcaggttgtgacaaattccccacaatgtgtgtatgtatagagtgaggaaaggaataaatttaccgcaggtccctcaacttaacagcgcgattttttgagatcccttaaccataaaatcagaaatgtatacccctaatctcactcaaaccgttcaaagaaggtcccatgctagtatatatgggtggtttcgctgatgtggcatcctagtctgcaaaataaaaaataaaaagttatgagacccacatgtaagtgagaagggaaaaaatgtgggacccacatatcttctttctctctttttttttctcctctcttctcctttctttcctctctcatcttttggttcttctgtttgccacagaagaggggggagcggcagcgagcgaggacgagcgaccagagcaggcgggcgagcgcgtggcgaccggcggagtggagtggggtgacagcggtagcgggcgagcgcgcatccagagcagtgtggcagcagcgagcaggagctggcgagtgagcgcggggaggggggtcggcaggctcagcgtctcccccggtggtgaaacaccaaaaactgtcgcggctgccattgatgccatgtcgagctccaccccgttgatctctttctagggtaagtttctcgcataacctaccgcgtcacaacgtgttccccgtggttagtagtctttactctcaacaatggtggtgattccctttcacttccatagtggtcttctttggtcggcccactcatttcactctcaagctctctgagaagattcaagatgtttcatatgtgtccggatagcccaaagtctcgatagttagctctaggtcttccagtcaataggcagttcaaaatgttgacctatttgggaatctccggatctatgattattttcaactccccaaagcatttcgtctcttgctacgtccttcctcgtctctgggtacctaggtatccaccgcaagcctttcctctataagggacaggcttactgaaactagcactagcaacgcgtcttgtccttagtcaaatccaattcaataaagaacaagaaaatgtaggtgaacaaagaaagaaggcaactgcatttgtcgggaacacgagcttcttttcgtgtagtgtgttgacctttgaccatcgcgttccgcgccaaccagagcaccttcgtcgtcatcgatttctttgttggattcgcacaaccgcgatctacttacaggacattgtgccctcgctggattccatcgagttgccgtcatgccatacgcctgccttacgagctgacctccggcctaccttaggcacagcggtgtcaggcaccggagtcgcgcgccaagttcctcggcaactctgccgctccagcgcccacccgccagccggccacctcacgccgtcgtcgctactcgaggccccgccccgccggcaccggatgaagataagagaaaggggagagagagataagggaggcagagagaggaggaagaaggaaaggagagagagcatgacatgtgggccccataaattattgaccctacattttttttctcacttacacgtgggtcctatatatttatttattttattttatttgttgactaggatgccacgttaacaaaatcgggcgaaaatatagtcaatactaccatgtgacctcctttgaacggtttaagtaagtttaggggtacacatttctagttttgtggttaagagacaaaaaattatcgtgttaagctaacgaacctcggtgaacttatttcgtgaggaaatatggtgaaactcatctaaaaaaaagactaaccgttgtataacgtgaac

SEQ ID NO: 11452 - DNA, 1288 bp, Oryza sativa
ttacacttgagaaagcaccatgagaatatgcaagtccctccagcctgattggaaattaacatcacaagaaccaacaatgttctgaatcttgaagtcctggtatagtgcaaatgagttaaacatttaggtacaatcttacagaatgaaaatggtaggcatttgcacagatgaaaattaatcaagcctgaaatagttaccttaaacttagcagcaaagccaagcttttggataatacgagcatactggcaataaaaaagtgttagacttcacgtagcaaaataaaatgaaataaaataaatactccccatacctttcttgctgcaagctttgattgttgttcgctctttgccccagtacatacctggtaaaggacaacaaaagatttataaacatgcttttaattccaccacaaatgctagcaggtcatggtgcccacagagaaattttggttaacaagcaaatttgatttttataaaaaagaagcaaagacgcagcaaatcggtgcatcaaacccaagacaaccccttcttaagtccactgcctaatagtcaggccccatacagcgtactagtaagcctaggctgtgaactccttcgttctcatgcttaaaatgtgaatttattatcagaaaaatgtattactttaagtctgtaacacagatattatccctcctgatgagaaccagcaaagcaacttttaatgaagattttatcccaaaaatgctgaccaccaattatccttcaacaagctattcggatcaagacattgatccaaaaggaaaatcaagtgaattttcataaacaagccttttaaaattaagatattgacgcgacatgaagtccatgtgatgtgtcattgctgattatccatcaacaaataaatatgacaggttcaatttattgtcaattctgattatgctttaagacaataaaaaagttaacaaggacaaactatacatttacagaaagagcactacttatctgttattatgtaacagcaatgcaacagcaaacatgtcagaaaatcagagcaaacttaaatttacagattcagcattgaactacaggctgcatggatcaggtatggatgtgatagctgttaaaaaaacaaagaaaaactaaaaagatagtaggctaatagaaagcagttacacatcagcaaaaagagttcatcaatcaatatgcgttataatagctacaagagcaacaaagacaggtgataaagcaattcacaagtcaataagaagatgaacaaacagaatatttgcagtcttagctatacaaagagg

SEQ ID NO: 11453 - DNA, 1227 bp, Oryza sativa
tcggcgtggccccctccgggcgcctgctgctggcacgcgccgccccgcccccttggggaggagatgggggaggggttccttcctgcttcctcttcccccgggcgtcggcagggcggtcgctccccgggcccccgtcgcggggcccagaagcacgaccccctcccggggtagattgttcccccctgcggctcccacccgcgccatcgtggcctcgaggagcccgctccttcaacgccccgactacctgcatgatggtcaggatggaggcgcggtctggatcgctgcagagggggaggactccttgaggaatgagggatgcctccacggagctgagattcagcacccgttggaccactatcttgaagtcctcaggagcccagtcccatctgaccccctggtgggtcctcatacagtcctcggacccggtgtactcccaggcgccccgggcgcgccgctggagcggcgcaatccggcgacgaaggtagtcgccgaacaccatggcccctgtgagcccctgggatcgcaggcccaccaagcggtcgaggacggcgtcatagctgtcacgaccggaaataacccaacgggctttcctgacgtgtgtgcattaatccttgtcccaggaggcaaggtacaccataagttgatacaaatcatagtttaacaagcggaagcgtaaatagttaacttattacatgggcagcgaaagcccagcacacacagagacaaacgagaaacagcgggagactagggcgacgaccacaggcgcttgacggcaggcacgagctatacaccgaaaccttcatcttcaaggaactccttttctggacttgggaaaaattgagcaagactgagtacaaccaccgtactcaacaagacacacccacaaatgcagaataaatgcaaaggagtacaagggaattataatgtaaagggttagggttgcagtaaacagcatttaaagacatttagttgctcagggctattttgtaaacgcgatcctagaactatacaaagttattaatcaaggccgtgaacccacacgaacctgccttaacccaaggcctatgatgattcagaccgaactggcaacccgaccctgggtcccagctcgtcccaagccaacccaggccaaccattccatattttagttgttaagcaagttttaagaattaaaacactaacttgggtacattgctcggcttgcccataaccgagggctcggctatt

SEQ ID NO: 11454 - DNA, 1445 bp, Oryza sativa
ctgtcccgtggatgcgatcatctagtctaggcgaactcgagctcggtacccctactcctgtttggggatttgaatccgtcgggtgtagtatagatctgacgatcaggttgtctcatatgccccctagagggcctcctgcccaccttatataggatggggggcaggattacaagatagaaaccttaaccaatacggtatcggtttcctaaatctactttacaatattatcaaaccaggactttaggccgttccgtaatatacaaggaaacgtaacacccaagtcatgatctggtacatattccatagatataagttatcccctatgactagtcggataaccatgccgtatgggtatggggtacccataatatccacaacaagggaggacggcctcacctggcacgttcagcacggcctcgacgcggcggcggtggtggctaggtcacctcctccacactgtccaggtcgaagaacctagactcagcgttgtccacagggccggcgttgttgtcgtcatcctccgccgccttatcccttgcccgtgccgctgttgacgcaaaaaacacacactggcctgggagatctgcttagttccagtgcatatccaaaggacgatgagatgcgggtctgccagtcagtttgactctgcaactgacaaaatatacaaatagcatatcaatgagccgatcggctgacaagccgatggagtaattctagcccatgcctatgtcagccgatagcgatagggttttgagctatcgactatatatccaatgtagaatctgacacttgatgtaaacaacaatataaaggcaatcggttgatgataatataatatagcaataatatagtccagtagaaaccattcggctaataatgatatggtaaataagcatcgatccgaaggttaaagcatacatcggctggaggtccgatagcattaaatccacaagattagataatcagtaaaatctttgttgccatcggctaaatccaatatgtatgcaatccttgtaagctgatgcaacgtctagataactcattggctgaaaccccgatgaaacacttattggcagtcaaaaagcaggctagggattatggttttaaacacgacttagtagatcaaacttaacttatgcagcactaagtatgaatagaaacataatatctagacaatcaagcctttgactaatttttgggtggtagatgtcttagctaatctaatctagtaaaacaatttagccggtaccgacaggaaccctaaagcgagaaacaactgatagagctaaattgagatactaagactagattaactaagacatatgataaataggcagacaaatatatcatccaaaccggagcaatccaagaggtcgaacgtactgatgcagtcttgaacgacgccgacgtagactagacaattgccttgggccgccgaaacatgg

SEQ ID NO: 11455 - DNA, 2215 bp, Oryza sativa
  unsure (1)..(2215): unsure at all n locations
acttttgtttatgactagactgagccacaaactaagccttacccactagacatgtgaaagtacggtagtgctttgcaacagaggcccgaagaccggtccttatatggccgaggtgctaccatcaaaaccatgcaccccgaacccagcctaaaaccatttttggggattttgaatggagggggcggtgtgaagccaattccacaatgatccaacaattccacagtgtccaggtgatatgaatatttcccaaagtctatagttgtaaaccacctaatgttacctaattaaattgcgaagcatctatctaaatttaaactagggatactacgagtagagtgtccactagttgaggttttgtttaatctagggtgaacaaggtaataataataacaataacaataataatatggtcacaacaaaggtaaataggcatggctaaataaaacagtgataacgcgggaatttaaataaagcgataatgcaataatttaaatcaacataattttataaactgggattcaatatgctcaaagatgatgtgacttgccttgctcgctttcccaaccgacggcttcgacttccacgaagagcggatcttccgaagctgcagcgtctacacgaccaacggaaaagaaaaggcttttactctaataaattccacataacagcagaaacaaagcacaaaaatgggttcttgacttcttaaggaaaaattagagacttgaacggtccaattccgagttcaaatggccaagttatggccatttgaagtttatatgctctttaaatggatatttgcgaatttcttcatttaaattttaattaaaaatcgggtttattgcgtcagccgagggagagggcgcgcggaccgggtccacgggagtggggcccacgcgtcagcctctcggtccacggtggaccgggagcacgcggctggcggcggccggcgccgtgggtcccatgcgtcagccgcacccgcgggcgcgggcggctgacgcccgggcccacctggcagccgcggggcgcgcccaaagggggcctcgccggcacggtcgacgggagacggcgcgcccgcgccccgatggtcaccgccggcgaccaccagcgcgtcggatcggcgcccgagagagaggagggaagggggaagcgaacggagcggtccacggctcaccccggtcgacggcgacgacgggaacggcggccgaaacgcaggaaggcgtcggcgcggctcggtacgacgaggacgacggcgctccgacagtcggcgggcgaaacggaggcgcggacgaggtcgacggggacgcggcgaagccgaagaaggtgacgccgagtcgggaggaggtccggagcgacgacggcggcgaaccgaagctcggcggcgacggcggagagaatatgcgacggcgcgagcgcgattccgacggggagagcgagtggcgaacgtcggaaacggaggaggagggcacgggagtggcttaattagggttgggagtcagggaaggcggccggggtgttggtaaccggcgcggaggttccggccgccattgattgcgccggcgtggtttgcggttacgattccgggcgtttttgagggagagtgagagggacaatcggggggatagatagagggattcgtggggtttatttcccccttctttattgcgcgcggggccgccgggagacgccgagtttcgcgtcggcggcggcgctagggccggggcgaccggcgggcccggcgcgagttgggggttgccagttgggccccccccgtcagcgggggtgttggccgggcccgcttgttagcggcgcgcgcgcgggggggacccgttgggccgcgggggaaagtagatagagagaggaagggagaggtttggcccgagccggcccaggagggggtggggggccgggggtcttcttttggggtttttttctttttttngcccttttcccctttgtttttttcttttcgnttnttntttgtgctctgccccttcccttgnnttcccctccgcttttggcttttggttttgcggggtctcctgcgtttttggttttgggttctctgcccgccgcggngcggtttgtttgggtgttnntggagtgtcatcatcccgtgggggggggaggagaaagtgttatccctctccgccccgtggtctagtctcgactatttgtatggagtcgattattttctggattcggtgtcaggtttgcg

SEQ ID NO: 11456 - DNA, 1974 bp, Oryza sativa
aagatactgatgcctattagtagtgacagcgatgtagccagccgtgaagaagatagcatcagttggcgttagaacaggccagccgtgcaggcggtgataccagtcagcggcggatgcggcggccggtcggtgaagacgtagacgcccaacaacggcagcataataggctagccgtgcaggcggaaacaccagtcgacggcgggcgaggcggccggtcggtgaagacgtagacgcccaacaacggcagcataataggctagccgtgcaggcggaaacaccagtcggcggcgggcgaggcggccggtcggtgaagacgtagacgcccaacaacggcggcataataggccagccgtgcaggcggaaacaccagtcggcggcgggcgaggcagccggtcggtgaagacgtagacgcccaacaacggcggcataataggccagccgtgcaggcggaaacaccagtcggcggcgggcaaggcaagccggtcggtgaagacgtagacgcccaacaacggcggcataataggccagccgtgcaggcggaaacaccattcggcggcggcgaaggcaagccggtcggtgaagacgtagacgcccaacaacggcggcataaaggccagccgtgcaggcggaagcaccagtcggcggcgggcgaggcggccggtcggtgatgttctgactgatccattcctggagcgtaagagataagcttaaagccatgaatcccttttatgcatatctggatctggatcctgcagaacaaacatataggatgagtagtatctgatataaatataatacttgagaaaaaatcaagtattttaaaatatttataaatatgtatttctcctcttgtcaattttgatttccccgagcagatgactctgtacgtttaaacactctgtccgactagtcataaccatcaagcaccgggagtcggcctaggcacttcccaaacatgcatatgagtgacatgagttcgtcattaatggaacaaagtttcacggatcagaatttactactcgggtacttttgcaattattaagagcagaaaataaatttatctcgtctctatgcttttgatttattccgaataatacttagcaccttgcgttactcggtccatccaacgagcccccgggtgctaggaatcggcccaaaggcaaccatccattggcaaaccaaacggaaagcataggaggatagaactccataactcgataggtacttttgtactcagattatgtcgcaagcaatcaagataaatattataaaaaatatgatataacatctgtagcccccgactcactactcaatggaagaccaattggtgtagtgaggcagaggaaaaggaaaaatatcatataaagaataaaataaatgatgacttagctttgtaatattccccttggtgatggcagaagtggccaatgtgggaacaaagtcgtccatcaataacaatgaagacaccagtctgcggcgacaaaggcggtcgactgtgaaagcgaaaatgcccactaatggaggcataatatgtcagccgtgtaagcggaaacaccagtcgacggcaacaaaggtgatccaacggtgaggatgtatacattcaacaacggcggcataatatgccatccttgtaagcggaggcaccactcagcggcgacagaggcaggccggcggtgaaatcgtatacacccaacagcggcggcataataagccaaccatgtaagcggaagcaccactctgcggcgaccgatgcatgccggcagtgaaatcataaacgcccaacagccgcggcataatacgccaaccgtgtaagcgaaagcaccaatttgccgctacggaagcaagccggcagtgaaattcttgacccccaacaacggcggcataatatgccaaccgtgtaagcaaaggtaccactcggcggcgactgaggcaagcccgccgtgaagtcgtaaacccccacaatggccgcataat

SEQ ID NO: 11457 - DNA, 817 bp, Oryza sativa
  unsure (1)..(817): unsure at all n locations
cggcataataggccagccgtgtagncgaaggcaccactcgncgccgacgaagcaagnccggcggtgaagtcgacgatgcccatcaacggtggtgtgaccacccgcccgtataggcggggacaccagtcgccggcgacgaaggcaggccggtggtgaagtcgtagacgcccaacagcggcggcataataggccagccgtgtaggcggaggcaccaatcggcggcgacggaggcaggccggcggtgaagtcgtagacgctcaacagcggcggcataataggccagtcgtgtaggcggcggcaccactcggcggcgacggaggcaggccggcggtgaagtcgtagacgcccaacagcggcggcataataggccagccgtgtaggcggaggcaccactcggcggcgacggaggcaggccggcggtgaagtcgtagacgcccaacagcggcggcataataggccagccgtgtaggcggaggcaccaatcggcggcgacggaggcaggccggcggtgaagtcgcagacgcccaacagcggcggcataataggccagccgtgtaggcggaggcaccactcggcggcgacggaggcaggccggcggtgaagtcgtagacgcccaacagcggcggcataataggccagccgtgtaggcggaggcaccactcggcggcgacggaggcaggccggcggtgaagtcgtagacgcccaacagcggcggcataataggccagccgtgtaggcggaggcaccactcggcggcgacggaggcaggccggcggtgaagtcgtagacgcccaacagcggcggcataagaggccag

SEQ ID NO: 11458 - DNA, 1354 bp, Oryza sativa
tttaaggtattgggcacttgatcacgcgcactttggcctaagcaaaaagtgcctaagtccctataagaacgtgacaggccacacctgaaaatatgggctgcagacatattaggcctaggccaaaaaatatgccttcgacaccctttaaaggatgacgcatgtaacatgcttccgagtaataaatttggaacgggtgatatagaccaagtatagctcatatcaatcgcttctgatctgagtgattatcccttatgggatactccaaaatagatgtaacaattgaatcccgactggcgcaagtattcagttgataacccttacggggaataataaatagtccagtctttgagcatagaaaatagacccataatcacgaattcatattgcatatatccagagcaagtccaaattgaaggtatgatacttgtgtctgagctagtaagcccctgagcacgtagtcacaattgttcattgatggtagctgacgcaattggcatagagacaagacgacaaatacagagataatattgaccagcagaggtggcaaaaatattggtggtagtgaagatagtggtaccaatcaaaagtgatgaagttgcacagccgtggaggcgaagaaaccagtcggcagcagtcagatcagccagcaatgaatatgaaggcgctcagcgataaagttgtgtagttgacgacgacaaacgcaaccgacatgatgaagatgacgatgtcggtgatccagccaatagcagtgtagcaaccaatgataatgacaaagacgctcatcagcatttgcatagtaggtcaaccgtgaaggtgaaataataagtcggcgaaaacataatcatccattagcaacagcagagatgtcagggtcgatgaagcagaagtgctggtgatgatgtcagtgacaatagtccatcaaattaatgttatagctattgtagatgcttcacttggaggagagttgatgttgttgtccaactcgtccaaaccaaaatatttcaagttgttgaagtagaatgtctgctctgaatcaaagatgaagataatgactcctggagttgactcgttggttgatgaattaatttcttcagcttgacataaaatttgtcaaattttgagccttgtatttgtgtagcccccgactctttgattagttgggaaacaactgaacatagagtcgagaactgtagcatcttgtcgtcgaatagttattgcttgatttaagatatgtgttgaagatgtccaagtagaaatcatgaatgttggagagccacttgttgtagtaaaataacacggcatcgcctgccgagatgtcgagattcacaacaacgtcatggttggtgatgtagca

SEQ ID NO: 11459 - DNA, 641 bp, Oryza sativa
ccgccttcgctcttccaagtagtcgaggtcatctatgcgaagctgatcttgatcagcctcgcagtacatggtggcccgaggggacctcaaggtgagctcggatgggagaaccgcttccgcgccgtagacgaggaagaaaggcgtttccccggttgctcggcttggcgtggttcggttcgcccagagcaccgctggcaactcctcgatccacgaatcaccgtgcttcttgaggatgttgaaggtcttggttttaaggtctctgaggatttccgcattggcgcgctccacttggccgttgcttctggggtgggcaggtgaggcgaagtagagcttgatgcccatgtcttcgcagtaatcgccgaaaagttcactagtgaattgggtgccgttatccgtaataatacggttaggcactccataccgggctgtgatgcccttaatgaatttaagtgcggagtgcttatcgatcttgacgaccggataagcctcgggccacttagtgaacttgtcgatcgcgacatacagatactcaaacccgccttgggcccgcctaaacggtcccaggatatcgagcccccagacagcaaatggccatgaaagtggtatgatctgcaaggccttggcccgctgatggatttgct

SEQ ID NO: 11460 - DNA, 1099 bp, Oryza sativa
ttagtgaacttgtcgatcgcgacatacagatactcaaacccgcctggggcccgcctaaacggtcccaggatatcgagcccccagacagcaaatggccatgaaagtggtatgatctgcagggcctgggccggctgatggatttgcttggcgtggaattgacacgctctgcatcgccggaccaggtcgaccgcatcattgagagctgtcggccaatagaaaccttgtcgaaaggctttgccaaccaaggtgcgcgaggcggagtgggctccacattcgccttcatggatatcggcaagaagctcgacgccttgttcccgaggaatgcacttcaggaggattccgttagccgcgcgccgatagagggtcccttctaccagcacgtagcgtttggagatgcgctggacgcgttcactctcttcgcggtcctcgggtagagtcttatctgtgaggtatgcttggatctcagcgatccaagcaatcaatctaagggagctgggagcgctcccctcgggtcccgaggcctggactccgacgggcatcgggggcctgtcaggcgcgtccgtctcccctaaggggtcgggtcgcgccgacggctgggcaagcctttcttcaaaggcgcccggtggggtctgggctcgctaggaagcgagccgtgagagttcgtcggcaaccgtgttatcccgtctgggcacgtgccgaagctctatcccgtcaaaatggcgctccatacgccgtacttggcgcacgtaagcgtccatctgcgggtcagagcaccggtactccttacagacctggttaacgaccagctgggagtcgcctaacaccaggaggcggcggatccctagtccagctgccaccttgagtcccgcaaggagtccctcgtactctgccatattattggtcgcccgaaagtcaaggcgaaccaaatatctgaggacgtctccgttcggcgaggtcaacgtgacccccgcaccggcgccctgaagagacagggagccgtcgaactgcatcacccagtgggcggtgtgaggcagctgcgaggggcccgagctggcctcggggactgagacgggctcgggagctggggtccactctgcca

SEQ ID NO: 11461 - DNA, 675 bp, Oryza sativa
cggcataacaggccagccgtgtaggcggaggcaccaatcggcggcgacggaggcaggccggcggcgtgaagtcgtagacgcccaacagcggcggcataataggccagccgtgtaggcggaggcaccactcggcggcgacggaggcaggccggcggtgaagtcgtagacgcccaacagcggcggcataatagaccagccgtgtaggcggaggcaccaatcggcggcgacggaggcaagccagtggtgaagacgatgtcgctatcggcaacggcggcggcacacaccaaccgtggcagcgaggccgcaagcagtgaatgattgtttgatctcgactgccatccaatgcatgcgaacaaccatcgctccagcatacatgtagattaaatcgacgtatacacgtgcttgctcctggtggccgagtatattcctgtgtcctgtgccaatctagcagcacgtccatctgcatggaagggaagagaggagcactcggacacggcaagaggcacccgagtggccgagtaggcgacgatggcggccgtgtcgtgatctcaaccagcatgtgaaaaacaacaaaaattgccaggaaatcaaaacggccggcgattagggattaattaataatcaatctaataaaaattaaattggaacagccaacccaagttgtacggcgtggct

SEQ ID NO: 11462 - DNA, 977 bp, Oryza sativa
agctcactgtcggcgtcagaaactccgaacttggcctcaagagcatcccacatgtccttcccagaaggcatgtgcatgtatacgtccactatgttgtcagcgagtacactgatcaatgttccacggaacaggcaatctgaagcctcgaacttagcctcttcctcaagagaaagaggtggttcacttcgtttgccccgtgaaacatagaagcactgcatcgctgtcaaccacaatagtgcacgtgctttccatcttttatagtttgaaccatcaaaagcatgtgttttcagtgcagcagcaaagccaactaccgaaaatgacctatcaagtttttggattgttggaaatatagtcattaatcggcatattttaatccaaaatgttaaagcaataatcatggcataagcagtgtagggcgatcttaacataaccagtagcatactatgcgcatcatgaatgtcaggaacaggaacataacagtaacgcatagaggcatcatgaagaacaggaacaagaacatagcgcacatagtatagcgatagcgctaataatggaacaggaatagcgctaacaatgggaacaggaggagaagattataccccgagaatggccctccgctggatggtgaggcagaattgcctccgttgttgttgtcgttcacggcacctcctcctggcgcactagctccggctcctgttggcggcgcaccacctccgccatctcctccagcagcggcggcaactccagacatcgcgatgagcagtcgtgtgggaggcactccccaaaaacctgatcacccgcctacccggtgcagatctcaggcgaaggtgtggtttcggaggcactgctccttccaatctctcgtgcgcgcaagagatcagaagcgaggaagcgagagcaactcaggcggagaaggagaaaccaacaccggaaaagaagcgatgaaaacggatcgcactcgcggcctccttatctat

SEQ ID NO: 11463 - DNA, 963 bp, Oryza sativa
tagcatttgctgttgggttcgtgagtcgcttcatggagcggccaactgaagagcacatggtggccctgaaacccattctacgctatgtcgcttgcacgatggagtacggacttcattacaaaagggagaaagaggagcagcggctgattggttacagcgacagcgacctcgccggcgacattgatacaaggagaagcacaagtggcatgttgtttttccttggctcaagcttggtgagttggcaatccatcaagcagagagtggtggctttatcttcctgtgaagcagaatatgttgcagccaccaatgctgccacacaaggaatctggttggctcgattgctcggcgaacttcttgggaagcaacctaaagcgatcgagctaaaggtggacagcaagtctgccttggcgctggcaaagaaccctgtcttccatgagcgcagcaagcatattgatttgcgctatcacttcatcagaagctgcttggaggaaggaagcatcagcgccagcttcatcaccaccatggaccagctcgctgacattctaacgaaggcattggggcgagttcgattccatgagcttgttgcaaggattggagtggtcaagattagttcagaatagaagaacaaggattaaggggagattgttagtataatccttgttctagttagttatttggttttcttagacagtaagctataggctgcagctgttactcggatgtcagactgctgctattagtggtagtagtcaattttgattttacctctagcaggaacatagcagcagcagtattgtcggttcagcaacggacctatccatgtactataaatatagctattgtgctaacataagtaagctttttaagctcattttaagtttcagtttcagctagattattgagtgccctccagaagtgatcctaccaccaataaccatcagcatattgtgttcaattgtgctt

SEQ ID NO: 11464 - DNA, 2013 bp, Oryza sativa
  unsure (1)..(2013): unsure at all n locations
cgtgctggcctttgattgcatgagcaacgcactcccatagggcgaattcgagctcggtacccatcaggaggtctttttcttttcttgcttcctttcggcaatgaggacacaacattaacattcttagcaaaagataacaaataagggttattttgcaacacagtatgaccaatacatgcattattataccatagtttacatttgccatttgcaaaatggcaataatatccatcaaaatcctatttttatacacttattaaattacataaaaaacatcttgaatgtaaagggtgaagccaatcggtagctctaggcaaagacttcaacagcttctacttttgctttaacttcattggcaactctaatggatcctttgtttctttgcgtagttcctgccgaacggaatccctttaaacaattacacgcctgaatagttactccagaaataatccaccatgtggatctaaaataacccacataatgagatttatttacaaatgtaataatggtctcacctttctttgccatgatcatttttaggaagtcaggacaatctttcttgtaatgtcatgtcttcttgcaatggaaacactgatggcttttcaacagtgaaatgttgatgctgtggcagatgctgaggctatttcccttttgaggggatggtttgtggctctttttcttgttatctttaacatagttaatagagccaccattggactctttgattctttcctcctcttgcacacaattagcgatgagcttttcaaaattccatttctctagacttatgttgaagttgacaataaagttgtcaaaatgctttggcaatgaggccataaccagatggaccagaaagtcatctgtgatacccaaatccattggcttcaacttggaagccatgttgctcatcctaagaatgtggtctcttacaccacccccatggtacctctctgtcacaagctgctttatcagctgtgtcgcataagtctttgaagaaccagtaaactggctctttattctttcgaggtactcagagacggtgtcacactctgggattgagcccaattctttgttgtgttgcaagatgagctttatttgttatctctttctgagaatgtgaatgttgtgtcctcgttgacaaaagaaaacaagaaaagaaagagaactcctgatgtctcatcgaaattatggcactatcgtttaggccatatttcgagggggagaattgagagactagttaagagtgatattcttcctccattggagttctcagatttagaacaatgcatagaatgcattaaaggaaaatttgttaagagcatcaaaaagggtgcaaaacgaagcgcgggaattttggagatcattcatacagatatttgtggtccatttcctgtgaaaagtgtggatggctatgactcgttcataacattcacagacgattactcccattatggttatatttatccaattaaagaaagatcagaagcattggataaatttaagatattcaaagctgaagttgaaaatcagcatgatatagagtttaaaatagtaagatctacccatggggggagtactatggtcggcatacgccttatgggcaagtccctggaccttttgcaaggttcttgctagagaatggaatagtagcccactattcaacaccgggcgaacctaaccagaatggggtagctgaaaggcgtanccgtacccttatggatatggtgcgcagcatgataagctactccgccctaccattgggtttatggatggaggcgttaaaaaccgccattcatatcctcaacagagtttcaagcaaatcggtgcccataacaccgtatgagctatgtacaggaagagtcctaaagttataccgcgataacaaacctacagtaatgtacgctcgcatcaatcagtcaagtggtgctgccaaacacattgacataaagtactatgttgtgaacaacacagtccgggatcaaacaatcagtctcgagcacattagaacagaaa

SEQ ID NO: 11465 - DNA, 759 bp, Oryza sativa
  unsure (1)..(759): unsure at all n locations
gctgatgctgcccgcacgcagnagttcatcattggaagaaagactattaggttggatcggaaggtgtacgataaagctcatttcacggtactacagcatatgactgaggtggtgccgtacgttgacgaacaccttgcagttatccgacaagagaacccaggccgatcagagagttgggtcaggaataagcacatgtcttctttcaacgagtggctgaagaaccgaattgccaggttgcagaacttgcctagtgaaacacttcagtggttgtcacagggtcctgaatggagtgccaccacctggcaaggatatgacataaatggatacacctttcacacggtcaagcaagacagcaaatgcacagtgcagaacagtgggttacgcatcgaggctgctagtgacggtggtcgtcgtgatcaatactatggtagagttgagcaaatattggagctagattacttgaagttcaaagtcccgttgtttcgttgtcgatgggtcgatcttcgcaatataaaagttgacaatgaaggtttcaccactgtcaacttggctaacaacgcgttcacggcttaaaccgctcgttttcgccaaacacgttggtaaacggttctaaatgcttcacccaggtaccatagaagttctcgttgttctgtaagccaatagaactatcgttggtctgtccactctcttagcctagttttatatcatcctgtctctccctctgttacgctacgcgatattcttctcttctacaccccg

SEQ ID NO: 11466 - DNA, 584 bp, Oryza sativa
ctttggagtaatctgattcgagagaagattatcttttcgactacgaaggtctcaggggctactgtggatattatgggtaccccatacccatacggcatggttatccgactagtcataggggataacttatatctatggaatatgtaacagatcatgacttgggtgttacgtttccttgtatattacggaacggcctaaagtcctggtttgataatattgtaaagtagatttaggaaaccgataccgtattggttaaggtttctatcttgtaatcctgccccccatcctatataaggtgggcaggaggccctctagggggcatatgagacaaactgatcgtcagatctatactacacccggcggattcaaatccccaaacaggagtagggtattacctctcattgagagggcctgaacctgtctaaatcctttgtctctgcatccatccacttttaggtctcgtgcgctaccccgttttattattgccgaaatcatgtttcgacacttgtattcctctcgtgcctccactgctgctcgatggagtggaggagtggtggcagcatggagggcgcgacgccagcgcg

SEQ ID NO: 11467 - DNA, 5825 bp, Oryza sativa
cctcctatatgaaaatttatggaaatatatggataccatatacctatgcgtgtacggaaaggtaattttgtaaaaaaataaatatggtggtatgaaaggaaattatctccctggtagaaggtgtcagagtctaactcggaggggacaaggtctccttatcccgggttcaattgtggtaccccgaggtctactcgaagaagggggcagagcactataaatagaaggacccctagatcaaggaggaatagaccaagacaaaccgtagccactagctagccaaatcaagatacatctagaggaaatcggagccatattcgtcgactagatctagccaagtcattcttggcggattagcgtagttgatctaattccagattaatctttctggtattctaaatataatcccatataaattggattagggctattaccttacgaggggcctaagcaagtataaatccttgtcttcattttgcggtctaacccatcgacaaatagttctaaataaatagaaacacattcgctatcgtcatctactttcagcatgcataataaattatggctcatgcaattttttcttacattcccatgcacttccttgtaagcaatattgccatcgttctcctttctacaaccatcccaatgccaactagcccctttgaccgctcgtaggacctccttaatgacatgcggcagaatttgaattgtagttacacttattggacaacattattatcagaatactagactattatctagattcttaatactaggttatgtccaatctagtactagattgctatattttgggataggggaagtaattgtgactatatagtgagaacggggttgatgcactagtgcttgaatgaaccataaagtattatcatgtatatttatgtagcattcttattaattttgcatgcaatccatctctttttgcactatgttccttgttgcgtcgaatctatatcaaatgacatagtttttttttccttgtgtttgtttgattatatgaatattttgtgtttctcccatttctttttttgataaatgtttcttccatttgtagtttttttcctgtgtgtgtttaattatatgaatattttgtgtgtctcccatttatttttctgatatatgtttctcccatttctagttcatcttgtcttagattttgtttatttttcataatcttgaaaaatgtggtccttttaatatcactatatcatagttactagatgttataatgtagtttcttttgttgtgacacatttatcttgttattgtagcagtcacatggtattatatggcctacacatataaatgataggaaagaatctaatttcaagataggattggttgaagctctcagcaaaccattttgccagggagagtatgataggctttatggcatggctagtactcgtgagccattaaaaaaggaacgccggacacgcagtggttcaaagacttactactcttctcattcgatggggaaatcatattttgattgctacccaggtatgcgcaaatgtactacctccgttcacaaaaggatgatgtcctagaatgagtttagtcaaaccgcgacatgttaaatcattagtagatgaaataatatcaatgtttaaatgtgaaacttatattattagatttgacaagaacaaactctcatatagttatgtctctactactttatatagaactgtagtttgagaatgtaatgataaaacatgtgcattgtaggtaatgtcattgtccaagttggcatccttcttgaatgtaatgtttaaattaatgaaatttgggagcatttgaaaaatattattgttttttctcacttttcttatttgcatgctttctttgactctagatctcgcggaacaagttgaagaaactagctatcccaatcgcttggcgctattgcgcgggcttttctactggttggaggtaacctcgtactattattgtgattgttagtaagtgttgtgttcaaaaaattaagtgtgcagtatcttgttgctaatgatcatacttctatcttctagtaatgactaacatatttcgagtttacttgtacacacttctcccaatgagaacagtttaattgttttggacttaacataaatattttctattgtttgctacacaatttgtctagacctatgcatgttgtatgttgaccacatgtttgttatacttttttgcttttacagtattagtactagcattgagttcataccatgatgtgtgcatagtagcactattttatttctttgtacatttactcttcttggcaggttttcttgatcgtgtattttcttttgcagaatgttgggaaaaaacaccaattcatgccatggagaaatgagcacaaacgtttcaaatatgttaatttattatgagaccatattaccttgttgccacctccatatcagagtgggaagctatggaatccaacgagttgtgggtcgtgaacctagcgccagttgcttgcgcataccagttttcttttgtatttttatcttgtttgattggagttatgtaaactttggattggttacatacttacttttcccaaatgttttggttgcgatttgtggagataatttcacaagttctgatctccctaaaataccgagcccattttaaaaagtgttaaattatcaaatctcttcccaagaatactagcaacattacttcagccactaggcgggcctgctcggcccattcaggtttgactctaacctagcccagtagtacacctccacgcgatttcgccaccgcggccgcggcggcgcatcggcgtcgtgatcccgcgcggcgcggcctccccaccgccctagcgcagccgcagccttagccgccgccgcgccatctccgtcggcatttgcaaggtcagagacctcccgcaccgctccctcctgatctccaatctacgagtcaaccatttgatcgatttttcttgatctgttgcgtgcttcgatttcatggccagttgtttgctcggctttattcggtagtgaaacctttgaattttccccaacccaaagtacttcgatttggtgagcaactgacatctcctgttcagacttcagaagcggttgcatgatgattcagttagcttggacccgctcgtatagtgttatacattaaaaaataaattgtattgtgtattctatttttagagaaagaaagaataaactatgtagaagctacaattctacttcaaatagagccgtgcaataatattgcacagaaaaattcaagctatttatcaacaataacaaatgtctgtatgccagaccagacaagttctgtgacgcatctaaatagatgctgactttgaaccctgcccaaaaattttcgttggcattagataccttataacgaaattattcgtctgaaaatgaatggaggttgcaattagtatcattttataagggagcgtgtgtataaaactggaattccctagcttatacaactgtggttcagtgattgcttctttaggacatcccattcccagcagccaaggatcactgatcatgcaaaaaggaatttcctctatttgactgaatcactcacgaatcattgctatggaattctgaaaatgttcaaatgaatatattgtctctagctctgaaagaaagatttgttttggcaccataaacaacccttattgacctgtacttataaccagcttgagattacatcattattagagtaaatatttacaacctcgcaagataccggaagaacctgctgttatcatatatgctacagaaagaaaaaacacaaccaagcacaatctacagcctgattgcacaaagaggaatttgattaataatggaatgacttaacatggtgatggactaagtaaggttcttcttcgaaaggttgtacacactacaagattttgacaaatgaaggggcgtcgtcccttggtcctgcaagagatcgatataaatacagatggtcaacattatcggcagtcacatcttcattaccagaatggccactaatcacttcagccaccaaatttggcatttgctgagctacgtatctacagcctgtcatggttactctgcaagagctcatccacaagaatctcatattccaaaagtggcttaaaccagagagcaatccctcgtcaccaaaaggacattccctgacctcaagcttctgcaaccgagtgcatccttcaaacacatatctgagtgacatgtcagtattgccagagaaggcaacagacagagttttgatcgatttcccatattgcccaatgtacgcgaaggccttgtccgtgaccagaccagaggtcgaaagcctggaaagcttcttgcaattcatcacaattgctccaaaaccttcatccattggctccccggtgatccgatcagggagataagttttcaaaatgctgaggcgaaagacctcaagattagggcagttgctggacataatgaccattgctgcatttgtcatgcttccacaatagtatgttagggttttaagcttttggcagcctttcgagatagtttcaagcccaacatctgatactgagagatgatgctcactcccacgaagcaaacgatacactcgtaaatcctggagatctaagcacgtctcagcgatggcagaaaggccatcatcacctatggagtcgcgcacacagaatgtccggagattgccacaggagcgaatgatgggagcaagctgttgccctgttaaggtggcagagctgatgttgagggatgtgagattggcacaaaccgggtagatcgcagggaggtaatctggattggcgtcctggagacctgagagagagtggagtgacctgcatgctgcgaagtatgtcgcaagttcagacaccgatggaggggcctcacctgcagggtagccagtcttggaccggaacacacccgtgccaaggtgcgttagattgggagcgattgccatgaggcagcacagctgctctaccgtcacatggcgattcacacccagctggcacagacctggtgagcgcgcgacaagggcctccagtgactcaaagttgcagggcgtgtcaacacagctgaacagaagagactccagcgacgtgctgggcttgggaaacatagagatccagtccacctgcttgtccactgtgtcctcgactttatcattaatcagatcaagcacatggagatgcctgcactgctccgcaattatggcgaggccggtggcactgaacttgtcgcagctcatcagtgagagctcccttaactgagggaatgactgcgcgatgagcctgaggtcattgtctgataccgtcatccgcttgaggaagatgcacttaaggtgcgggtatgcgggacccaaagcagccacccagggcgatgcgtatgcaccccagcctttgggcactaaagtggagtctgcgaagcatggcctgcccttcagagtgatggagcgcaggccacgaaaacgctcaatgacacgattcggagaaacagcataacagtttctgatgaagagctcttgccgtgtctccgcctcagcatggtaccagtagcgacagactagcgatgccatgttcctatcacgtgccgttgtgaggaactggagaatgctttccagcagtacattctcaagcacatggttgggctgcggacacctccccacaccgtcactatgccactcaccgtctcccaacatcgaccttccaatcccatagttggagttgcatgttcttcgtcttcatcgccgtaaaaaaccccatccaccaactgaaaattgattctagggttgcctggatgattgctaatagcagatgttaatggaaa

SEQ ID NO: 11468 - DNA, 3043 bp, Oryza sativa
ttataattctgctccgctgagtacactctggaaaagcttgatttagaatatcccacacagaagcagccgataaattgtcaatgataattaaatacctgccaataatatatgcatattaaatacattttgctaggctactattaaaattgatcagaagggagctaaactaaaataaactagctgggtggcccgcataattgtgtggctagcaccatataaaatcggagtaaactcttttacacataattttcttaaactttttaaatagtctataatcatctcattgtcctaggatttttaaaaaatcaaaccttttcgccattagttctcaattttataattgttaaaagtcacaccatttgtccttgcttgctactttgtcgccctttatttgcgacatgcaatgtttctattcattcctcatgggatctttaaaaatcagaccttatatttagtttatagaagtttcgtcaaatgccacccatcaccctcctatttattgtcattgggttttaaaaatcaaatatgatccttgccggtgttctcttttttactttgtagaagcatgtgaaccgtcacgaccctactcctgcatagcctagttcttgtccaccctcttaatcattgttgagattctaatagttgaagcaatcgtcaatagttctgtttcatagtttcaggagttttatcaatcaccagcacactactcctttactgttcgcccgctacctttccaattattatatgtaattcttgtattctagatggattgttcttacaacattcctaatatttcttatttttagttcgaattttggttgtttttctttttctaattcccaaattattttattttttattctaaattttaattaaacttgtatcgtgttttgcactaactgttcttttaatattccttctttttattctaaattttgcttatttctaaattatattctgatttgaactattatttttattttctaaattctgaatttatttcatattttattctatttttgttcttccaatttcataatttatttcatatttattctaaattttaattaatctcgtcttgtgttctctactttccatattccttttattatttttattccaaattttagttatttctaaattgtattcctacttgaacccttatttttctatttctatttcagaatttattttatttcgtatttcgaattttaatggatcttgtattgcgtcctaggaggactcttatttcaatatttctcttttttattatgaattttagtttatttctaaattataattcaacatgaactctgttgtgaatagactcttattacaatatttcttatttttttattcttattatattttattttattcctaaattgtaatcatatgtgaactcttttttttttcttttccaatttctgcaattagtctatttattattttaattaatctcttactatgttcttgatggactcttctttcaatatttttattttttatttcgaattttagtttatttctaaattatattcctagttctaccctctttcttctttttctctgattaatgtgtgatttttattatatatttcagtttatttctaaattgtaatcctacgtgaactgtcttatttccttttccaatttctgaacttttttattttgaattttaattaaactcataccgtgtcctagatagactttctctcaacattttattccaaatttcagtttatttctaaattgtattccttcccgcgtagttttgcgtgaagctagataattcatgtagtgtaagatttaatatatagatctgaaattttatttttataaaaaaatcattatatatagaagtatatttagatttcatatacaactcttaggtcctatttctataaggtatggatttcacatataaattttagattctattctatagtcttagatttcatatacaacacttaacttctattataactgtattttatatacaaatatatcaatcaatctatgctgttataatctggacccaccatgatctaatggtaaaatgtttttctttttttatgattaatgtgggaatttctagtctctacaatgaacgtagtgccttctttcaagcttgttttaatgatataatagattttaaggaacaagttttactggaagaaggataataaacatgttctaacttgtgagtaaaagaatgtgcaactagaatgttgttgactatcaataaatgtaatagcaggtagtatttttgtgtgcctaaattgtatgatccaatattcacttctatggtgtttcagtcaaaaatgcctataacacctacatcaagtttgtgaaatataatgagagcagactagcttactgagtgaccagaagatctgctgtaccttgtgtgtaagttctaatattaacttctgagcaagcttttatttaattttggacataagaaataatatttatttcagaaaatagcagcaccttttatcttgtagatgtctcctgatattatcaataagttcaagctccttacaatcttcgtgggggttattttgctggacctgggagattatgtcgcagaagagccttttcatattaggcttttggggaacctggatgaaagctctacagtcgaatcgtccaccaaatttgttgtagaaaagcttggcaagtgtagttttaccaataccaccacatccgacaatagataccatcttgagctttggatccccatcattggccagccatttgataaacttgctcgtccgcccatcaatgactaggtcagcagtttgttcatagggtgttgatagaacatagctaacggacgcatatctttgtctataggtgcaactgtggagatcgtaccgttcgtaccgttctattgcctcttggacataaatcctgaattccgatatcatgcttccgatctgttggtgccacttgagtcttctaggaacaccactaatcttcagatggttgatcctgcagacaaatctggtcttggtatttagatggacatgccctg

SEQ ID NO: 11469 - DNA, 660 bp, Oryza sativa
tactttcctttcttccgtacaggtggcttgcaaaaaggaatcgacgatggcccatgtacactaccttcctacaatgttttagatacgtactttcagtttcatccatgtagtgggtgtgttaacaacagaattttgtatcagatccggaaaagaaggaacaagatcgaagcggatttgatgaatgatcaagttgtatttgaagtcggaccgcgcatcggctgggcattgtatcggctggagacagaatagaagtttggcttagccaatatggcaagtggccgatacgatatgacttgggctcgtttcgggtctagattggaataaccgtcattgtcaattagagatagagctcgattaaggcaattgtatatattaattaggatatttaagtcgattgttagagatttggcaacagaccgccatgtggtcttgtttgtatcttatctttaggaaagtttgagtcgtgttcataatggactatgtttgtactcggggtacaaatatgaaccccagagcattgtaataagggaaataatccaatacaacttcggcgcatcgtcatccgtttttgttcttcttttcgtcgagttctctcgacaagaggtaactcgtctcaatggcttgtgctatcggggctactatgtcgttttggatgttata

SEQ ID NO: 11470 - DNA, 533 bp, Oryza sativa
aaaaatttaaaaaatagattaattaatatattttaaggcaacttttctataatgttttatgccaaaaatacatcgtttagcagtttgggaaacttgagtgtggaaaacgagggactaaagttgggaacttgcaccaaagaacacgagggactaatgtgtatgaaatctcactgtgcctgtgattaagttatatgacagtgacaatattgactttgtctgtggtgaacttagtggtaactgaatttgtcacctcagctaaaaattgatcaagcccatgcgaagacaattcagaccgcatcttgatagcaacctcagtactgtcttctaaacaaccgtagtacacatgcccgaagcctccatgcccaattaaatgtttgaagttatcagtaaacttctctagctcttgatacgtgaatcggcgattttcaggttcttgtaaatggtcccaatgatttgtgatatgtccaggagcacccctgagttctggtaccatggcaagatcagttgaagaagctagtgcaaaaaaaaaaagt

SEQ ID NO: 11471 - DNA, 623 bp, Oryza sativa
ctgatttttaagacatgaatgcatatgtgatgtacaagcttttttataggtgtaatctacatctgtgctttgctagtccctatgatacaaagtgatatctagtatgattcttagagatcaccgcattaactactttttgttgttaaagggacaatactattttgattatttatgttattgctccccctgccgatctcggtacccacacaagagacgagtgttttacaactcccttaattgctatttgaagttgctcgtagaattcctttctaactgtttgtctgtgaatatattaaaagggaaaattggtatgggagaaaatttgaattggaagacacgcgtaagagttgcacttgaagctgcacaaggtattctataatagcaaggcaaaaaaaacaaagcaaaagtgttatggctcatcttttcttctaactatagtttccttatttgtaggcctggattatctccataagggttgcaacttgccaataattcatggggatatgaagacgaacaacattctgttgggtcaaaattttaaagcaaaaatagcagattttggaactcatatttcagccgttgcagctggatctatgggttatattgactctgagtatgaatct

SEQ ID NO: 11472 - DNA, 835 bp, Oryza sativa
tccccatgagcttcctccaattcatggctttccttcaattgcaagaccacggcggacatcattggcctttgagcagcaatatctgctatgcacatatggcagcatctagaaccttccacatggagttgacgttataagaacctccaagacgtgcatcggcaactgagctgatgttaccagtgaccatcttctgcttcacacgttcaacaatgtgaccatttccaggtattatggtaggttcaccactagttacctctagtaaaacaacaccaaagctttaaacgtcactgctctcagtgagtctaccggtgatgtagtacctaaaaatggcccacattatgttaaacacaatgattgcaccaagtgattaaggataaaattgaatagaatcattaaaatatatgaatacacagcacaaaattagcattaattgtgtagaaagaagctcatactcagggtcaatgtagcccatagatcccgctgcaatggctgatatgtgagtctgggagtcactatggtaggtttttgaaagcccaaaatctgctatttttgcttttaaatttccacccaagagaatgttatttgtctttacatccccatgaattattggcaggttacaacccttatgtagatattctagccctacatacaagaaaactacagttagatcaagagatgagcgataaaacatagaaatccatttatatcactgagatcagtttagttcgatgatttgtcatcgattttgtctttcctataatacgccactgactttgtcaattttttctacaatataccattaggggtggatacttttagaaaatacctaaaatgc

SEQ ID NO: 11473 - DNA, 2007 bp, Oryza sativa
gggtgaaccatctatgcagggatactgcctccgctcggctatctaatccgctaggtctatacccattcgagaagtacggttgtacgggggtcgtttcatgcttaacttcatggctcggtccttaattgaccggggacggtactagccttttccagataccacccaaatcctccgtccgccccagtcgaaaacagttgtttaattttatttctcctttcacaaatcatgtcatcaacatcatggcaatgtggcgctcatgtctccacgtgccgcatctcaattaccttcccaaaggtaattgcccaagcatatagcatttgataaatatgagtatgcatgattctagaatagcatttctaagcaattgtcataattgactagggactcatacgtaatcaggggtacaaggattttaagggtaaacaataatcaaggcacggcataatcacaagtaggacgttcatcattgcatgcaattttatttgtaaacaaaacaatttcgcaattaggatcaacatgttcaaggaatagtgataacttgccttgctcaaagtcttgcgggtcttggccttcacttggatccgcaactccctcgggctctatagttgcgtgcaaaattgatttgaattcggttagaattcaaataaaaatccaaataaatccaaatgaaagtcgaacgcgagagttgattctttttttttattaacattactatctgcgaactacggcaaacccaatttcgatttaaactattttgcgggtataattatttcgttgtcaataatttagtctccccgagcattgtatataataggttagaaatttctaccacgagctaaatattggacgaaatcctagaaatgctatacaatttaatttagtctatgattaaatgattaaatataatatacggctaaaatccctagtaattaaatccgaatttctaccgttaattgattacttacagggattacccagaaataatccataattatttacgagaattcatacatttgtttaattattaattacatctaaattaataccgcgaattgatttcttatggagagtactaaaaattatctataatctataggaattcatccaattatattttcattaatcctatatttaaatgctagtattttaggtatttaattagtaagatttcatctaattatattttcattaatcctataattaaattctaatatttgcaaatattttaaatttcccgtggagaggggagaggggaggaagggtgagatggggtgggggagaatggagagagaggggggggtatttgtagagaggggagaagcggcggggcttggggcggcgcgcggctcggtgtgacggcgatggcgacgcgatgatgacgcgatgcggcagcggcgcggggcgcgaggcggcgacgcgatggcgagcggggcgcggggcgcggggtgtgagacggcgcgcggggcgcaaggcgacgggacggggcgacagcggcgacacgacaggcgcgcggcgtggcgacgggacggtcgcgcggcgatggaataggcgggcgacgcggcgcgggacggcgatgcgcggtgacggctatgcgtcggatggcgtggcaacgggacgcgcgcgcggcggccggtgatggcgacgagcgggcggcgcggcgcggggctcggcgcggcttggcacggggctcggcgtggcgacgacggcgacgcgacgggcgagcggtgcggcagcgggatggcgatggggacggcttggcagcggcggcgcgcggctcggagcgacgatgggacgcgcgcggcgacgggacgggtggtgacggggcggcagcggtggcgcgcggcacgaggagggatgcgatggtgacgccgagcggcgcgcggcgcggcaggcgacagcggcacggcggcgggcggcgacggcgatggctcggggcacgaggcgcgcatggcaggggaggggaagggcctagggaacacggtcgagcacgtggcggccgatgaacag

SEQ ID NO: 11474 - DNA, 520 bp, Oryza sativa
tgcttcaactgtggagagtatgggcatttcgctaataaatgtcctcatccaaacaagacacccattcgtaccggagctaatgcaacggctattcacggtactgctacccctgctgctggacgaggtctattcaggactccgcagactaacaggaccgctaccggatttggacgcgggcaagtgaaccatgttcgagctgaagaggcccaggaagaccaaggcgtactgatgggtatgttttcactcaactccactccagttaaagttctcttcgattcaggagcatcgcattcatttatatctttgaaagcaagtcaacaacacaatttaaccagagttaaattaagacaaccaatgttagtacattcacctgggggtgagatagcagtggatacagcttgcattgacgtacccatccgccttagggatgtggtatttccctccaatcttatggtgctaataccccaaactcttgatgtcattttgggtatggattggttagcaaagcatagaggagtaa

SEQ ID NO: 11475 - DNA, 536 bp, Oryza sativa
cccgagccgatcgggcggtggcggcagaagtggccgccgggcttggcttggctccaaagccggccggccggccatggctagcggcggcggcacgcggtcgacggcgacggcgaccggcggcacgggaggcggcggtggcggtcgaaagcgacggcgcgcgatttgaagcggcggcttggcactaagagggagaggaaggggaatagaggaaatgaatgcctcaccgcgagtggccggcgctaagggagagaatggctaacggcgacggcgagccacgggaagacggccgcgacgggcggacgagcttcgggatgccctagggaaggaagagagagagattagagggagggagatgaaccccggcggcccgcatccatgggccaaggcggcggtaggggtagggctcacttgagcgcgaggggatgcggttcccgcgacaatctcgaccgaggagcgtcgcacgaggtggagttcggcctcgcgaacccgacggcagcgacggcgcggtgcgtcggcgaccctagcagcggctagcg

SEQ ID NO: 11476 - DNA, 1384 bp, Oryza sativa
atccacagtccaccactaagctatctagagaagaggcctctagccgacgcgagatgtcttaaagtgttttctttgcattatcagataagggagctagagctttgcttgaagtatctttttctgcctcatcaagataatctctgatatcaaaatagaagagatcggctagaacctataggtataagttcagaaagtttgagagctaagccaatatagccgatctaaattcttgcatcaaaggaaaacttactgggatagcaggagcagctggttgttcttcttccacaatatgatgactccctacagccgatggagttcggtcactcaatgattgttgtacaggggaagaaggaggaggaggaagctgtaaaaagacaagtgttagacaaaatcggctagaattgactagtaaaattgagagtgtcttactagtggagctggtttgagaattggtgctgccgatgttttctttatagcagttttcttcttctataatcacaaagcctatgagtagtcggctgaaaaataataattataaaaagggtttgcaaggaaagatgttttactctgaagaagtgagtgggggcagaaggagttggaggtatctgcttaggcgaagccgatggtgttttttcagtatcacttacttcggctgcagcctgatcaacatcatcctcaatattttcttcatccagagctttttcgatggatggatctagagcagacagatcatcagctggtgcggtcttctttgtcttagtcttcttcttggagctggggctgaaatatttacagccgatgatctggtctttcttttcttgccggcatcggctggttctctaataagcccttggagaagagctaaagtcttgggggcattatagccgatgacggggggagatggcccacctctgttggggatcagtcctggggcatactcgatatccctgccgctgttgctttggtgagggggagaggattctgttgtctgcaaatcaggaggaaagttagctaaggactaatcaaccaagtagttattcaaataaaatcaagtgagttaggatttacttgaggaagaatatctggaaagagatctgtcatatacatggaagccgattgatggaataagtgtagcttccattcagtccaccatctgtcaaatgctttgctcctaaaggttgccagctttgtggtgtcaatgctgcctagaggaggtccttggagattgagcagccgatccatcattaaagatgatgagatttctcctcggcattggatcttatcggcaaagaataacccgattaggaggtgcccattccaaattgttggcagaactcatggatgataaaactcgaaagaaacctggatgtttctcccttgatga

SEQ ID NO: 11477 - DNA, 2031 bp, Oryza sativa
ctcaaggggagggagatccatccaacagctacttccataaatcctttgtcttctgtcttagcaacttagacactaccatatcttagctaaggtaagtacctgaattagctaaggattggaaaaatcatatatctggcagtgcgttcatattgatcactctatctttatttttttttttgtggaatgttgttctttgattaccctgctttagaattgaaggagatgatgtttgctgataatataatttctttttaaaaatggctattgaagaacaaaaaaaaatgcatacttatactacttaatttcttctatgctctttgaagaatgtctattttacattgccaatttagcacgtgtatttctttatataagattagtcttgatctgcaggtcatggtggtgaaggagagggtactcttttaattgaggtaaatacagcgaagattttgctcaggccattcatgccctttagtgttgatttttctgagctcctatgaatatacataacatctcttgacttgctgactggaacaacgtaaattgcaattggaatgaagggatggcccactctattgccttactgacaagagagatagtcctcctttgctaccagaatttgtttttccttggatggggttgctgccagaattgttttttttattgccttggatggactcattgcagccctaagctggattctgcatatagtccttcataagttggacaaagtgctgcattgggtgttgtaaaccgtataaaattctcatattttctttctgtttcccccctacacctcgctgattgctttcgtgttttgtcgtgtttataaaatgttgtttttgtacatgatggacacaaagtcttagccatttccgtgcattattcttaaccacttttatattagtcatgtttacgaactgatgctatctgtcaagagccttatgatctagggtaggcggccctcgactacggagttcgtaatctccggccgtggtcttccgatgcggaggttattcccctcactgccgatcgggcttgagagcgagaggtaggagagcaggtaattgatcttgcctccctaatcttttcggtttacagggaatatatggccatcggccctaaccaacggaggaaacaaactcctcgattcaaggaactaatcaaagatagcaaataatatcttaacaactaaaaatagctttccaacttcagccacttgcgctgatcgcttcatcctcggttgcatgcgccgtgcccgcgatcaccgcgcgttctgcgtccatgcgtgcgcccgcacgttctgctgcccggcgcacatctctggctcggtgtctcctggtgtaggtcttcccccacatgacatctcccccctcctcgagactcagctcgtcctcgagctgaagggcagggtacttggcacggagaacttcgatgtcctcccaagttgccgaagccggagactcgcccttccactgaacaagggcctggcgcacgcctcgcgccaaacgaaaccgaacagcacgttccggctcaggggcgatggcgccgtgatggagaggaggcagcgccggtggtgcacccggtggcggcccgtggaacttcttgagcaggccaatgtggaacacgtcatggagacgagcgccggccggtagctccaggcggacggccacgtcgttgatgagctcggtgatgcggtatggcccatagaagcggggcttcagcttgcccgtgccggactgagggagcgacgtggtgggccgctggcgcaggcggaggagcgcccagtcgcccacctggtatgcaacgtggcggtggtgcttgtcatagtgcagcttctggaccgcctgagcttgctcgagccggtagcggatgtcaaagaggaactcagcccgctcctccatgcttttggcgacggcggcgacccgcgtgtcccccgcttcgtaggagcggatggagggtggatccctgccatagacgacccggaacggggtgtcccgaagcgaggactggtacgccgtgttgaagatgaac

SEQ ID NO: 11478 - DNA, 2407 bp, Oryza sativa
aaatactttagcctctgcaggactcccccacacacggaggtgagctagcgagggtactcttcctgtccatagctcatacggtgttttgggcaccgatttgcttggaactctgttgagaatatgaatggcggtttttaacgcctccatccataaacccagtggtagtgtggagtagctcatcatgctacgcaccatatccataagggtacggttatgcctttcagctaccccattctgttgaggttcgctcggtgttgaatactgggctactattccattctctagcaagaaccttgcaaaaggtctagggacttgcccataaggcgtatgttgaccatagtactccccccccacggtcagatcttactactttaatctttatatcatgttgtttttcaacttcagccttgaatatcttaaatttatccaatgcttctgatcgctctttaattggataaatataaccataacggcagtaatcatctgtgaatgttatgaacgaatcatagccatccacacttttcacaggaaatggaccacaaatatctgtgtgaatgatctctaaaattctcgcgcttcattttgcaccctttttgatgctatttacaaattttactttaatgcattctatgcattgttctaagtctgagaactccaatggaggaagaatttcattcttaactagtctctcaattctccccctcgaaatatggcctaaatgacagtgccataatttcgatgagacatcaggagtgctctttcttttcttgttttcttttgtcaacgagaacacaacattcacattctgagaaagagataacaaataaagctcgtcttgcaacacaacaagaccaatacatgcattataataccatagttcacatttgccacttccaaagcggcaatcatatccatcaaaatccaatttcgatacacttattaaatttctttgaaaagaaggaacataaaaaacatctcgaagtaaaagtgtgaagccattcgtgagctctaggcaaagatctccagcagcttcaactttttcttcaactccattggcgactccaatggagctttcgcttctttgcgtagtcctcatcgaacagaatgcctttaaacaattacatgcatgaatagttgctccagaatcaatcctccatgtggatctagaataaacaacataatgagattcatttacaaatgtaacaatgttcttacctttccttgccatgatcattttcaggaagtcgggacaatctttgttgtaatgtcctatcttcttgcagtgaagacaatgatccttttcaacagtgaactgttgttgctaaggcagatgctaagacttttttgcttttgaggagggagatttgtggttcttttccttgttatctttaacatagttaattgagccaccatttgactctttgattctttcctcctcttacacacaattagcgatgagcttttcaaagttccatttctctggacttatgttgtagttgacaataaaattgtcaaaatgctttggcaatgaggccataaccagatggaccagaaagtcatctgttatgcccaaatccattggcttcaatttggaagccatgttgctcatcctaagaatgtggtctctgacagcttgatcagctgtgtcgcataagtctttgaagagctagtaaactgactctttattctttcaaggtactctgagacagcgtcacactctgggattgaacccaatatcgatggctcaaccgtgttctttaccacagccaaacatttcttgttggctaaggaccatttcgcatgctcaatgtcatgcgacattatggtgggattattgtccctttgtctcttttgccagtcagcatctgactcattttcacctctgacaagtgcagcaggttctgtaggacatggggtagtcaacactcagtccacctctcccaagatgaaagcaaggtcgagttttcttttccattctccgtagttatcttctttcagggtcggaatatctttaatacaacccatcaaggagtagccacttgaaataatcatgtacggtgagaacaaaattaacactaaaatattgtgcattaagcctacatcaccgttgggcagaattagacataacacatagaaccataactataatattgcaattaacaacgttggttagaaaattacaacatcatagcacataattaattttccaaaaattaaattctcccgttggttcgaaatttaattttagaaacactaattttcatcaatttcaactatttgcagcggaagatctatataaaattcatatgaacagtagcaattctgttatttacactctgtaaaaaaataccactctggttcgaattttaaacagagggaaaacataaaaaaaattcaaattctattg

SEQ ID NO: 11479 - DNA, 20022 bp, Oryza sativa
tcgtgaacatattttgccaatcaaggatccgaccgcctagaacatccgtataagtagtaattaacggacagtcccttatttcttagggatgtggctaagttatttcttaatgatgtggctaagttattctcttaatgatgtggctaattaagtaatttgcaggaagagtttcacctttcagttatttagatatatcttattcagtgtttgcccaagtgtatatatgcttatatatagcatccctctgacgtgtttgcatgcgtggcatcctaataacattcaattcagcaagactggccatggtgtctctttttccccctggattgcgtacgcatcaaattccccctgatttgcgtatgcatcgatcaaacaagttcatacaatagaaggagttctttgaaagtttatatactagattgcacacgtccaataaattcatgtacaacacatgacgcaccaacacaatttaatatgaggaaaccgactcaacattcaacttttaatataaatacagttttatagtttgttcggtgcaaagtagaatgaaaaaaatattgaagtaattacgacatatattgtactaatgagtgtgaaacaaaagaaagttgaatgaactgtaagtgctctgattattaggaatagtgaacattgccttgcaaacaggtccagccttgaggggggtcgagctgtgccaccgcactgggccctacaagtcaaggggaccaaccccatattcgtatgcggattgttggcggatggcatgaggcccttcgaccaaacctgccgaaacccatggcgaaggctatggagcaagagcggcgcaaggcgaagagtagcgccaggccagaggcgtctcaggcgaagggtgcaaggcgaagactgtctgccgaaggaggatgacttcgccttgacaagttcgcccccgcgaggaccgaggaagcctctccggcccatcaggccggtgatcgccagacggctcatcaggggcccatgagcccctataacattatgtacccctgtaaatgccctttttgtaagggtaatcatgtaaattcccctgtacaacctaaacgctggtagtaaggacctgtaatggggctataaatagtcccctagggccatgtaatggggggatccaagaaaaattaaaaatttagtacacttcattttcccaaccactgttgagtaaccacgtcctccgacgtatgcagttgtcgtttcgacaacagctggcgccgaccgtggggactccgagcgaaaccactgagagcgaatgccatcgaagagggtcgtgaaggagaaggttgtcaggcgaaaggagagcgacgccggaccggaaatggccgccgaggaatgagcagagccttcggcgtccgtggctgaagatggagaagcacaagcgccatcacagccgccttcggcccccgcgccatcacaaccgtcttcggccccagcaacctcagtgcaagtgccgaacacggcagacgtggcgacaagggcactccagaccagggcggagatcctttcgacaaaccaactggtggtgcctcaagccgccacatcgcagccggcggcgccaactgcgctcgccgttgtactggcccaaatcagcctggaccccaaagcgcaagccgaagccgacatggaagccatgcggtagaacatgacatggctccaagacatgcttcgccaaatgcaagaacaacaacaagcatacgaggcgacaaggcggaccaaggccacgtcggctccaatccttcagtattcggcaggctatgccccacctcaagtccggccgcaagtggtgacccagccctctccgccactagccgcacagccgccggtgtacttcgctgggcagcatcaaccacctggccaagcgacaaaaacggtggcggaaggggcttcggctctgcaggcgcaactccaagcccactacatttcaagtacaaccccatcggctcacccggtggggaatacaagtcaaggtgcgcctaattggttgccaccgattcagcaaggctcgggaccttcgccgtggagtcaaggacagcagttcgacttcggcaacactgctcaggtgccaaccgttcggcagcaagttccaaccccaggcttcggaacaaaccaagcaccaatccaagctgccatgacgtggtcgcagccaatttttgacccatccatggcggctcagcaagtgcctccagttggagccgggcagccgaacgccatggcccaacttcacgcacaagctgcgatttcacccttcgccacaccgtacccgcagcaaggtgcggtaaagagggcgggaggcgaaaaggggctaccgctgagtgggggaatcaagactcgtccaatcccaccccagttcaagttcccacccgtcccgcgctattcaggcgaaactgacccgaaggagttcctctccatctatgagtcagcgatcgaagcggctcatggtgacgaaaataccaaggcgaaggtaatacatctcactctagacggcatcgcccgttcttggtatttcaatttaccagccaatagcatttactcatgggagcaattgcgcgatgttttttgtccttaactttcgaggcacctacgaggagccgaagacgcaacaacacctactcggcatttgccaaaggccgggtgagttgataagggagtacatgcgtcgcttctcgcaagcccggtgccaagttcaagacataactgaggcgtcggtcataaacgccgcatcggctggtctgcttgagggcgaactaacaagaaaaatcaccaacaaggagccgcagacgctcgagcacctactttgcatcattgacggtttcgcaaggggtgagaaggattctaagcgacgacaagctatacaagctgagtacgataaagcctccgtcgccactgcccaagctcaagcgcaagttcaaattgccgaaccacctcccctctctgttcgccagtctcagccggcgatccagggacagccgccaaggcaaggccaagcccgcatgacttggagaaagttcagaacggattgggcgggcaaggctgtgatggctgtcgaagaagtgcaagccctccgcaaggagttcgacgcccagcaagcaagcaaccatcagcagccagcccgcagacttctactgcgcctttcacggacgctcttcgcacaccacagagcaatgccgaaacattaggcaacgtgggaacacgcaagacccaaggccgtagcagggaacaactgtcgaagcaccccgcgaagcagttcaagaacaaacacccccggtcgaacaacgtcaagacgtgcaacgaaaggtaatccaagtgattacgagggccgacccgccaggccaattatctaaaaggcagaaaaagatgcagatccgagcggtccacagcatcacttcagcgggtgagggggcgccacagtacgtgaaccagctgatctctttcgggccagaagacgccgaaggagtcctgttcccgcatcaagatccattggtaatctcagctgagatagccagttttgaagtccgacgaatcctggtcgatggagggagttcggccgacgtgatcttcgccgaagcatatgctaagatgggcttgccaacccaagctcttacaccggcaccaatgtcgctctgggggttcggcggagaggcagtgcaagttcttggccaaacacttttgctgatagctttcggctcgggagaaaacaggcgcgaagagcaaatactgttcgacgtcgtcaacatcccatacaactagaacgccatcttcggccgtgcaaccctgaacaagttcgaagccatttcccaccacaattatctcaagctcaagatacctggcccaacaggggtgatagtagtcaaggggcttcagcctgcggccgcttcaaaacgcgatctggccgtaatcaatagagcagtgcacaatgttgagaccgaaccgcatgagcggccgaagcacacgccgaagcccacccctcacggcaaggtaacgaaagtgcagattgatgatgccgactccacaaagctcgtatcactggggggcgacatgggcgaagaagaagttgagagcatactagaggtgctcaaaaagaacatcgatatcttcgcctggagccctgacgaggtgggggggcgtcccggcgaatctcatcatgcatcacctagcagtcaagccggatattaagccaagaaaacaaaagttgcgcaagatgtctgcgttcgccaagaaacggcgaaggccgaagtacaaaaattactccgggcgggggttatccaagagattgaccatacggagtggttggcgaatccagtgctggtgcggaagtcaaacggcaaatggcgcatgtgtgtcgatttcacagatctgaacaaggcgtgtccgaaagacgatttccccttgccgcgaatcgaccagctcgtggattcaacagctggatgtgagctcatgagtttcctggatgcatattccggttaccaccagatctacatgaacccgctcgacatccccaaaacgtccttcatcacttcattcggcacattttgtcacctcaggatgcctttcggcttaaggaatgcaggagcaactttcaccaggctggtgtacaaggtccttggcaagcagttggggcagaatgtggaagcttacgtcgatgacatcgtcgtaaaaagccgcaaggctttcgaccatgcgatcgacctgcaggagacgttcgacagcttgcgcgcggcaggcataaagctgaatccggagaagtgtgttttcggcgtccgcgcaggcaagttgttgggattccttgtttccgaaagaggcatcgaggcgaatcccgagaaaattgatgccatccaacaaatgaagcctccgtcaagcactcagtcgattcctctcaaaggcggccgaaagaggtttgcccttcttcaagaccctccggggcgcgggaaagtttaattggacaccagagtgccaagcagcattcgacgagctaaagcaatacttgcaaagcccaccagctctgataagcccacccccaggaagcgaactactattatacttggcagcttcgctagtggcagtcagtgctgcactcgtccaagaaacagagtccggacagaaaccagtctactttgtctccgaagcactgcaaggagcgaagacaaggtacattgaaatggaaaagcttgcttacgctctagtaatggcttcacgtaagctcaagcactacttccaggcccacaaagtcatagtcccatcacagtaccccttgggcggaatactccgaggcaagaaagtcactggccggcttagcaagtgggcggtagagctgtccccgttcgacttgcattttgttgcacgctctgctatcaagtctcaagtgctagctgacttcgtagctgaatggacaccggtacttgcccccaaccccgagcccgaagaccagttctgggtgatgtgctctgacggttcgtggtcgcacaagggggcaggcgttgcggcagtcctcttttggccgaatggtgtgccgattcggtacacagcgaaattgcagttcgacacaaccaacaatgcagcagaatacaaagccgttctcctgggcctaagaaaggcgaaagcactgggagtccggcgcctgctaattcgaactgactccaagttggtagcaggccatgttgacaaatccttcgaggcaaaagaagaaggaatgaacaggtatctggaggccgttcggtccacggaaaaatgcttcaccggcataacagtcgaacacttgcctagagaccagaacgaggaagcagacgccttggcgaagtccgctgcttgtggtggcccacatttgcctggcatctttttcgaagtcctacatgctccaagtgtgcccgtagacagcccggaagtcatggcaatcgatcaagagaaactgggccaatacccatatgactggcgaactccatttgtgaaacaccttgaaactggctggcttccggtagacgaagcagaagcgaagcgtttgcaactcagagccacgaagtataagatggtctcgggtcagctttaccgctctggggtacttcaacccttacttcgttgcatctcttttgccgcaggcgaacaaatggcaaaggagatacaccaggggctatgtggcgcacaccaggctgcaagaacagtggcttccaaagtatttagacaaggagtttattggcccactgtgttgaaagtctgtgttgagcaaatcaagaagtgcgaaaattgctagcgtcatggccgaagccaagccacgccctagtatgatctgcagcccattgcgccagtatggcccttcgccagatggggactagacatcattgggccattcccggtggcgtgaaacgggtataaattcgcaattgtagctgtggaatatttctctcgatggattgaagccgaaccccttggggcaatcacttcggcagcagtacagaaatttgtatggaaaaacattgtttgccgtttcggaatgccaaaggagttcattactgacaacggcaagcagtttgactctgataagttcagagaaatgtgcgaagggcttaacttggaaatcaggttcgcgtcgatcgcgcacccgcagtcaaatggggcggccgaacgtacaaatggcaagatcctagaagcactgaagaaaagacttgagggggggggggcgaaaggcaaatggccagaggaattgctatcggttctctgggcccttcggacgacccccacaagaccaaccaagtttagcccatttatgcttctttatggcgatgaggcaatgaccccaacggagctaggggctaactcaccaatggttatgttctctgggggcgaagcggggcgcgaggtatcgctcgaactcttggaaggtgtaagggtcgaagcgctcgagcacatgcgcaagtacgccacaagcacttcggcaacttacaacaaaaaagtccgacccagggagctgatgcttggtcagctcgtcctaagaaaaaaggcgaacccagtagcagttggcaagcttgaatcaaagtgggaaggaccatacctcatcaagcgcaagtccaggacgggatcttttcgtctagcgacactcgaaggcgaggagttcgatcattcctggaacgccgcctgcctcaagcgcttctatgtctagaatgggtggcacccaaatcgccaacttgtaaaaatgtacatattttcatgtaagcctttcggcactatgtaagcctttcggcaagaaaaaaaaagaaaagaggagaaaaagaagagaagagagaaaaaagaaaaaaaaactggatgtagggctattatccaccatggaggcccgaaccggtataaaatctctgtgtcctccgccttcttcttacttttcgtgtgattgataatttgtggaaaaaccccaaggcaaactcctgatcagcgaaaaaggccaggggggcgaaacgaatcggctgaagcattgctcgccgaacgttgaaaccgcaacagcttgtctcggaaaataaatagccgaacgacgttacgaccgatcagcataaaagcaaaagcgtttctctcgacatagaacgctacagatcgaaaacgaacgacgaaaagctgaaaagtcactacacctatttcgctaatgttctgacctaacaaaagcacaaagtttgacgatgcgaaaaatagtgaaaaggaaataaagcacgttctttattagcttcgaaaaaaataatcgaagaatacaaggtttacaacccgatacaattcattttacaagtaaattacatttccgccccagtaatcattatccctacttaaggaatggtcggacgaactaggtttgtcatcactactaatatcatacacaattttaagaggagtagggggcgaaacacagactaaactataacgacgctgaaagatcgattcctggcgtttactcttctgatggtttcgccaaaagcgagccatatcctccaaacatcttgaatgaacaagatcgtaatcttctaaggttcgcccggggtgcgcccgcagccagttggcaaccttgaaaactttatagctgcgaccgtttatttccatttcgcgataaacaggccgaaatagacatcgcaccatcagcaaacccttcaatgccacaaatttctcgttttgacttcgccagctcccagaagggggccgaatgcatgattttcgacagaccccctggtagacagtgcagaaaaggcaaaacacatcttgcatggtaagaataagcgaaagaaggggaaggtatggcataatgcaaaatgagcgaaataataatatgccaaagactttgatcattaaaaagtggttaaaattatcatacagtccaagtatgcaaaaaagccttttttaaggtttagcggcagtttgccgaatatacaatggttgccacatctagcaaacaccaaaagaaaactatgaaaatctaagagaagggcggagggcctcacacctctgggtgatcctgggcatcgcctccaccccctccggccactgcgccctcctcttcacaaatgtccgccgcctccgctttcgccagctgctccaaaaggcgcgccttagcggcggagcggccatccttctgccaaaattgttttcaccacgcacgaagtgcaggcgaaatgtcttgcgcactgatttcccaatcccccttcgcgtacttggggaactcggcgatgtgctcgcagccgaactgctgcaggaggcccatggtaaaggccgctgacacgcgtgcacagcaatcgccgtatgcggtggcgcagtccgaaaccgaaccaccagcctgttgggtccattcggagaagtcgaaggctgaggcatcttcagaggggacaccccgcaccttcgcgcccatatcggtaagggcaaggcgaagcgtttggcacgctgtccgcgcggactcggtggatttcaccatctcccgcgaaaaccgccgcgactcctctgcagcgcttgcttcggccttgcgaacctcctgccgaagagcctccatcttcggctcggtgaggttataataatctatgagcacggcggtgtgggccttctctttctccagttcggcctttaagcgatcgacttcggccctagcttccttccctttctctagttccgattggagctgcttgttttcggccttcgcctccttaagggtgttggcaagggcctccatctccaaatttttgcggcctagttcgtcatccttggcccgaagacagcttttgaacccatcaagtcgagctcgcacggttcactccgttgagcagtgagccgcgaggatctgggcgcagaatacgagcggcaaagagaacaagtatcaattgtaaaaacaagatagaggaagagtaaagataaaaaggggggaaaaaacgtacccgaacagccaggctttttatagcagagcactcctcgtcgaactcattcagttcggtgaacaagctcggggcgctggcgggcagtacaagattgcttaccccctccacaaaagaaaggaggtccgctcgcatctcgaagtcgccaggggcgaagcggggtaccgagagcgaatattccgaagcggatgtctcagcgaccgctctctttcccttcgcctccatcagcggcgaggcaaccggctgatgcggaggactgccgaatactttcgccgcggccatcacaatcctttccgcagaagccgaagccccagcggtggtactaccgtccactccagtggcgccaagtggaggaatgggggcggccgaaagatccaggctgcgaccagcgggtgaagtcggagtcctgtcggaggactcgtcatcgctaaaaacgcgagcgacatcgacgagccctttctttttagccacctttttgacaagacctcccttcgccgacgcgcccgaagagaacgcaactagggccttcgccacttccaaatccttccgacgaaggggggagctgttcgggtgtcggcgcggtcttcgactgcctcacccgcggccttatcagccacaacctccacctcctcctcttcctctccttcctcctcgccgtcacgttcttcggcatcatcctcgtcgtcggcgtcagagtcagacgaagcaggaacccttcgcttcttgggggcaagcttcacttgtccacgcatccgctttcgcgaaggccctgcctcgtcgtcgaccttttggggattcgcccggggaggcagttcgccattgtaaacccggttcgcccgcccagtcgcttgacgtgttaacagctgactatactcgacgaccgaaacatcgccgatcatcctgcgggctttgtctttgggcctggtcgagggtcaacactgtaaaagtagcgcgtgaagctacgtcaaaagacaaataaggcgaaataacaaagcacagcagtatatagcaaaagaagtcttactgttcgccccctcagggagtatcaggttcggcaaaccgtcgacttcttcgccttgctcaaccgcgacttgccatgactgggagaggggaaaaatgcgaagcatacaaaattcctccaccaagtcacggtagctaaggcaggagcaaaccttccgcagtagaacgaaccgcgcctccatggcgccgtccacagcgatcttggatctccggttcagcgcaatcgccctacgccggcaccggagggctttcgctgattcagaaccagcctcgaaggggatggtgtggtagaaccacctcgccatccaatggcggtcccacttcgacatagtagcgttcactggccagagatcggaccgctcggggcgaacgttgaagttcacgctcccgaacacggtttttttcgttccagccggggtgatcactgtcttcgagttcacggtggcgaaaaatatggcccaaagagctcggcgttgggctcaaacccggaagtccggaacgcccagtcgaagatagcgatccgaacaagcgccgacgggctcagctgcggaagttccacctcaaagaggcgaaggatctccggcaacaacacgttgcagggaaaccgtagccctgcctcaaaaaatacggcgaacaccaccgtccggttgtcgacaggtttcggcaccacggttttccctggggcgaaagcctgcccctcaaccaacgctccggagctgaccagcttcgccagctcgacgtcgtccacaagagagacccccagaaaagcggtgctgtcgtcatcgactcagccgggatctggccctttcgccgaagtagggtttggcttacgtggagccatggcgaacggtgcatttgcggtggcaaaaaaagatattcggcgaaacgcctgaggggtcgaaagatgctgtgaaaggaagagacggagaaagagagcgcgcacggtaaaatggcaagtgtggcagtgtaaaggaaagagcaacgggaatatatagcccacccaagcgaccgttcgcctacccaccagtaataaagcgccacgtgtcgcaagggtaggcgaaacggtaaattcccatcgaccgagcggcacagtaaaaagtccaaagataggaaggcccaatactgttccgttcggcccaggaaaaaataatatatataagcatcaatctcacgaggcgaagcgcggcaaaataataccagccgcacaaataacaaacttcattcgcaggaataatgttgatttcggcaggagcatcggtcgaaagggggcgccgcataccataccacatggtttgcacggtctcggccgaagctccagtctcacccttgcccatgaggggcttgttggcggatggcatgaggcccttcgaccaaacctgccgaaacccatggcgaaggctatggagcaagaacggcgcaaggcgaagagtagcgccaggccagaggcgtctcaggcgaagggtgcaaggcgaagactgtctgccgaaggaagatgacttcgccttgacaagctcgcccccgcgagggccgaggaagccttttcggcccatcaggccggcgatcgccagacggcccatcaggggcccatgagcccctataacattatgtacccctgtaaatgccccttttgtaagggtaatcatgtaaattcccctgtataacctaaaccctggtagtaaggacctgtattggggctataaatagtcccctagggctatgtaatgggggatccaagaaaaattcaaaatttagtacacttcattttcccaaccactgttgagtaaccacgtccttcgacgaatgcttttgtcgtttcgacaacacggatataggagcccataggccatatataggaacttagatttacgaaacccaggagagaaagatatacaatttgtttgataagaaagtttattttatgctttacatttgttagaaacattcttatactttcaaagttgtattgaaggcccatcattctagcttcactccgggccactatattgacaggaccaggcctgcttgcaaaacaactagctcctaggaacatggaaatcaaggtaataaatttggtcctagttaattaaaaatggcatgacaagttagtgtgcaagaaacgaaagttcatcacaaactcgatcgagtggtgcatacaaacgacagaactatatcttgtcgtgtcatccgaaaccccatgatttgatatgcccagtcgtccagccgtatgacactgttagcgtgttggtttgtttggcatgtgccgcttattatgtttatgtcgtatctcccgatatctctaggttctattccaatatgtcggttgagcagatatgggaaggttcgggcgcatatgtactccatatcattgtcaataatcaatatatttcgttgaggcatatatcagacaccattgagagttgatgacagacagacggcacaaagtttcaaaaattatgatgcacacatatatactgttaaataactagtggcctattcgctgatccggagtagaagacgacatcttatgcacacaatcatatagtagatgaacacggatatagagagaggcatcacagctttattgctttctcatatatggatacatcaaccaacctctcaagccctctctctcagtatatatacccataataggaagagtcctattaggatacgttttcatatatttggtatgagcccatatttatctctggtaggagataatagtttcataacactccccctttgacgaataccgcgctatacacatgtcttattaaaaactccatctaaaaacccagtgggagaaaaggataggggaaaagagtacattgtacacgctagttatattgcacttgttgcctcgttaaaaaccttgcgtgagaaatattcaagtaaaaactcactaaggaaaaagagtacaacacacgatcttcttgatcgcataatctttaagatcgactattcttcgtaaatagctaatgatctatatgctttattatattaatcaacttggattaacacaacaatatagcagtagtaaccttcaaggtaaattatcaaaacaatgattaatgtgattaattgttggcaaatcaaatataagttccaagtcttaagtatgataatcaatgtttagcatatatgctccccctcaataagacatccgttgaaacttcatgttccaatgtcataaccacatttttattaatgtgtaaaacaatgataataaaattaccacaatgtttaatctttcgtttacttatttcataagttttactatgaacatgagaaataaatcaacgtataggagcaatatgtataaccacttattcaaatgtgcaatacaaacaaagtttaatccttacggaggattatgggaaaataagttgcaacaatacacatatgtggtatgtataaaataattagctcaatacaagaggttaaatattatgcaactttctcttagtggatttatcaatcattatcaatttgattgtttcactaatcttcaacaattagcttaaaccacttagagtgacataaaccggtctatattttggcattaggagaattaataatattgccaaataccatcaataagtatatcttcgagatatataaattcttacaccttcatagtatgtagaaaactaccgatccacttgcatgctagtggatgtgattttccaattcattcgtttgaacgggtctgtccacttcatgggtgtacgagttatcggtgttatatggagattaaccggtaattcatacattagcgtagtcctacagggattaacttattcttccggaagccattttctctgctatgagaaatattctcacttctaggagaaaaactcttcgtgagtcatcataaactcttctacgagtcttgcaattctcttcatgagaatatagtgtgcttcatgacactaattagtatgagatttacacatatgttacgaaattgttttctttctagtgaaagcttcatatggattttcataacccataaactgcatatcatttatttattcatgccttttgccagcgatatatatatagcggaatttaatacattcatagtaggagaatattagtcttttccatgaccatatgaaccgttgcttttcaccacttcatttcctattaagtctgaactttcatgttcacatagacttatttagcgactatggttcaacctcgttgctttcttcaatagactcgatatgagtgctactatgcaactctgccatggactttggttccggatccagattctcattagagaaatattaccaatcatagaggcgatgttgtcaacaactattcttttctccacatactcattccgtgaggttaattcattataaaccatatcttagtcatttcccaaacataagatgtatggttgttccgcatcccataattagatagatatgtgcactttaattctgggttttcatcttcatgatgaacctcttcatgaggcaattcaccttcatggtgattactccgtagattttagaacattgacttacatgtcactctgcatttgtggatatactattcaaaacccggggtataccactgttagcagaaagtttactacaagtaaacataacttctgattactcctttaattcataattatctagcaagctcccgcttctggcttacaggagaataaactaaatcttctagttcagattggcttgtgcattattcttacttataatgatccttttcttcttgaaaatataaggcatctttaacacatgggcttttctccccctgatgccgatattcaatctttatctaatagcatattacaaaaatcccctatcataggcaatggattaatggaattcggtccatttgtatccccaacttcatgtggaggcccatatatatatgctatggtggtgatatatgagggaaatgttcattcattgaacatgcacttatacaaaataaagggggtaaagatattatatgcagtgagctaacataaaaattgatgcaatagcatgaaaaattgcacatccctaatactgtaggttatcccaattcatagagggttattattctgtgacaatggtgcccaaacaaatatccactactcgacaaaattactctattttctagctttttttttatttgcccaagacttgatccaattactcatactatattcaattcttgaattaagttggatcaataaacttcatgtttatatttatgcaacatagatatgatcataagatgatgagttagtattatataacttaatgatgtcttcaagaacataactataacactaaaacattaatctatgaacatagtttaaccatcatggaacttttcaaatcacccaaacattattctacgagaatatttattcttcttgaatatgccaataaattaattgggtgacatgtctaacttttatttattacgccaaagtaaatgtggtgtcatttgatcattcagaatcattcgaatccaaaaggtcattaattatttaggatattgtttactacaaataaaccaatagctttcaaatagctatatgcaatttcatacttccttgatgaagatgcaattttcaatggccaataaataacacaattcgttgtgtgacaataattcataatgatcccaaataagattcgctaatagtttgggctatttttgcttctagcattttgacctataacacaccaatttgcctgccacgtatccacaatttcttatgcttctttattgcaaatattttaaaattaatttgcaaaatacacatattcctcccccttttcacgccaatcataagaaaacttacaaaacagttgtcgtgaaacccacatatttgttgtaacttcatgatacaacttttctaaaagaaataatgtggttacatatggatatatttaagcttcaatgcttaaatataaatattctaattgttcatgtgcataagtaaacaactttacatgtatgccaatgtggcgtcaatgcacttagaactatcaacctacatggttgattgaggcttagtggataataagaatacattcaccaaaaatacttcaaataacaggcaagacaaatatttacattcaatgttagacatacaattcacaattttattccacaaaagattaaagaattactacaggtaaaagaaaggcaatataggtaaggtgagatgacctatataaaaaaaatattctgtaatctaatgctgaagcttctatgcctaaagcaaaagataaagatactctacatgagcttaaccatgttcttcaaattgaacttaatctaaactataatgtaactcgtgtattgtaaaatactatctcaaaagaacgaatgcaagattactgtcattactattcgtctccccttgagttgaacatcaaattcaaatacaccaaattcctttccttccacaaattttgagttcttcatgaacatattaatagtacaagtcatatatgtgcgtgcaaatgcacatgttgacagtaatacaacttcttgtgtatcaattctaacaactaaacatgttgcatctaggccaaaattgcttcaaatacaaatgaccaatttactcaaaataatttgcatacatccataaaaacaatacttcatttgtaaattcatttatacatagaagatggacataacattatcaatcaaattaactatagacactgcataggtacatagtattttgatagataattttggtgcagggcatattggcatatagacttcttgtctatatattcgcaaattcgatgacattgtatctacttggacacaattaatataaattagttgtagcttatcttctctgatagtcatgcactaataaatatctctaagtcaataatatactctcttcatgatgagtgtatacatttattctatacggagaatatataattgtgcgttctgcaaatgtggcgtcaattagacaaagagaagatatatgaataattttattactcatttgcccaataaatgtatttgctacatgcaactacttacatgatgtccttttatgcaactttctaccggtttacttcttgtaaataaagtgcacaaaacgagtacaaaatagtaaagaatggttttctatacacaccttttattacaatcctagcaattaacatgattttctaatattcaaaggtatgtgtaatttacagaactactaacccacagaacaatcaattatcccaaacaaacaattgccaggaaataaaccataaaatattatgcttccaaaaggggtgctaaaacaaaggtttcacaagttcatggaagctcttttgcctaaaaacaatgtttctaggattaattatggttattcaagaaactaactaaatagttaaagcaaatacatagaaatacgggactaaggaataaatccttaattcttctctatttggcgtaaacccaattcatgaaggttcaaagtataaatggcgaatgtatatttcccttagtttctaatgtctcataggacttttccgcataatttccgagttccgcataatgccttggaaaccaaggacttttgaaataaaataccattttcggaccaaaatcacggttcgtgcccgactccttttaataggccaatttctacttggcccacctccttatactggctagctttaaaacctggccagcccatctcatatgtcgcctaatgggctattacgaccttcccccacaagaagtgggtgaggtatgatccaattgccattcttcaatggagacaatggatggaaccaatggcaaacgtgctagtgagccctcggtagagatggacgtctatggaaagttgccatggtcagaggcgaagcggcgatgcaacatctagtagcaccgacactggcattcgttggcatcaggccgtgtccggcgtccgacaatcatagctccatgttacgtgtcgatgaaactcagctcggcatataggccggcatggcggacggctatcgacggcgggtgctcacggcggcttcgaccctcgtcccggccgcgtgcggtagcgtgggaggcaagccgtgcgtactggcggcgaggggaggcgggcgtgctccttggcgtcactacgggcggcgaccgtcaattgcgttgtggatggcctcgaaaggccgtcgagtcggcatttcagatggcggatcgacgagggaaagtctctggattgattcggcaaccgttgacaaaggggaagacgtcatgcggtggcgtccgggtgtcgctacgtgcaggcagcggcggtggcgcctgcaggtgccgatgactcggatttgttaccatctacttcatacagatagcaatatgatggattattaacatacaagtcacaaccgacagagtatcccaagcgcgctgatccataagatcagcgatgacgagtgtgttaatatattcatagattaatgactatgttagccagaaagacgacaacttctaggtggtgtcgtgtgttactgagtgttaggtgtcgtcgttcgggacaacactccgtcgttcaattcaacggattatgtatgtgcaccttcctgtgtgcatggtaagcgcattcgggcgcgtggtgccaaacttcgtggtcggcgatataacaagggaagagtcggcgcaaatgccggataaatacatctattcatgcgagaaaataaaacgactagaggcatgatctagcatattactctcgctactgcaaagtattagaatagataaaaccgatactgtcgaaacatgatttcggcaataataaaagggggtagcgcacgagacctaaaagtggatggatgcggagacaaaggatttagacaggttcaggccctctcaatgagaggtaataccctactcctgtttggggatttgaatccgccgggtgtagtatagatctgacgatcaggttgtctcatcatgcccctagaggggctccctgccctccttatataggttggggggcagggttacaagatagaaaccttaaccaatacggtatcggtttcctaaatctactttacaatcttatcaaaccaggactttaggctgttccataatatacagggaaacgtaatacccaagtcatgatctgttacatatttcatatatataagttatcccctataactagtcggataaccatgccgtgtgggtatggggtacccataatctccacagtagcccctgagaccttcacagtcggaaagataatcttctctcgaactagattactccaaagccgagtgcttcaatcatcttcgccatgatctcccgagtactttttccaagtcagaagactgtggagggctgaaaaaataaagtcagatgcatcgactagatgcacctaataggtgtaacccccgactatgtggttaattgaacaaaccaaacatatagtcaaggaataagtcatccaattaaccgagtggtttttgataattatagtcaaccaagtgacttgataccaatatatagcatatgcggtgtgaatccccgaataatatgatccaagtgatataccgactgcttggcaaaatatgatgagtgatatagcaaaatagctataaag

SEQ ID NO: 11480 - DNA, 3527 bp, Oryza sativa
  unsure (1)..(3527): unsure at all n locations
ataggtgtcggtacctttacctttatggctttattgggactagcaagtatgcgcgcattgcagcggtcatagacaagccacgaccagatgtcgcagtggtacccgagtcctctgtgggggttatggtcgttaaccgaggcaaaccgaaggtggttataagcgactgcttcttccagaatacaccggtttaccaaaatttcccatggccttgtgcacttgggtagccgttttgtcgggtgtgcccctttaattaaaagggaggagaagtgtggggagggggggcgactttgtgtctctttcgtgccattgcggcaggtggagggtgagtggaggcagtgtanctcaaatgagggggaggatggagcagcggtctggcgttgggggcgatggcgatggcagtgagcggggaactggtgaccacggcgctggtagcggaacggagcaaggcgctactgagccgggcgtcgcgggcaggggcgagcttcgtcggtgcccggtgttggcggttgtggatctcggcatgtggcggcgagcttccttgccggcgagggcgacaagcgaagacatcgtcgtcgatggtgcttgaatggcggcggtgccgaggagagttggccgcgacgacaactttttagatagagtatccgccatttggcgatgggtgtgggcaagggtgtggtcccttggagtggccacttgtgccttcttggcttggttgattgtcaatttctgtgatcagcaatatattttatggggtgcgcaagatcaaggagagatggtgacgcaggggtttatcctggctcaggccctcaatatgaggtaatatcctacgtccagtgtgtttttctctgtatctgggtggaaaattaaccgagaggccaagaagccgggttgttgagatgatccaacctcgcgggacccctgccccctgttatataggatgaggggggagggttacaaggaaagtatgtgatggattgcaactagatcattctattctatctatgaagatatgcatgatccctaagatttatatcttattctgggaatctctcttcctctatttacaagtatgccgcatgggcctaggacactcggcccacaccatgcggtccggcccaaggcttgtcgttgggtacccgggtatagtgtaccccacattgatgtacctggtggcttctctctggggttatggcgcaagctgacagatgatggccattctgactacctttgggtggcggtccttttccttaccttgctagcgcccatagtctttctcaacttcatgggtgcactgtaggctagttgtttggtgttctagttgtaagatcctggctggtatcctttcttgtacagatctggcgattctctatgtggaacatggttaatcttaggtttggacttgtgccgggataaccttatacgctgggtttagcttgccgacagtgttgtaaggagtggtttcggccgccaagattggtgctttcactctggcttgtatctcttgcaacaacaaacacctagatcttgtctagaagttcaagttagaccagaatggttacaagtgaagcactgctaaattagcaataagatccatgaagttttgctccctaacatttcaatttgtccaaacaagtccttaaactatcatctagctcaatgcagccatttaaccctcccaaaaaacacaatttgggcatgccatatcatcctcgcatgcaaataaaataatatatcaaatgaacattatatcgttatatatatatatatatatatatatatatgtatatgtgtatgtatatgtgtgtgtgtgtatatatatatatatagggagcgtatcttatgcacacaggccctcgcgtgtacaccaactaaaaattatcacaaaaaattctaggaaaattcatacatgtactttcaatagtattacatctacgtgcaaagtcgcatcttcaaattcattctacaaacgatggtaattgccatatatatatgtgcgtgtatatatatatagtatgttacagaaaatagaaaaaaaataaaattaaaatataacaacgcacaaattcataatagaaacaatgttgggctggcccgatatttttaatttgattttgttttttctttctttttctttattatgatatttgtaagggtagaatgattattaaattattgcccttgcatgtgtggatgatgtggtaagtccacgtggtgtttcctgtgggtccaaggactatagatttcaaggatttgtttgacaaattgaattgtcaaggactaaactgactacggagtaaaacttcaaagaccatattagctattcacccaatatattcttaataatattaagatcatagtttttttttaagtatgaaaccattgtatatatcattccttatttgaaaatagtgtaacaaacgatggtaattgacttcaaatgcatggtaatgaataatccttatcacactttaggtatgactttatttgcttggtatttttaattaaaacaattagatattatttagaggtagtatttggctatgtgcatcatagatacggatgtcagggatgtaactcatcttacttttttttgtgaaaagtactactaggacctagtagtatttttcacaaaatatatgaagaaaagaaatacgggctgtgcttctgtcctcttcaaagaacaaactgcacggattttaaaggagatgagatggtaattttgtctctagagagaaataccccggatcccaagcccatatgcatccattcagtcgctggccatcctcctctctccctcgttcttctccgcctctgatgccgtccagcctacataggcctatacgcctagcacaccaattgtgcctccttgttgtcgttgtaggatcgaatcacaataactaagccaactagagggggctgaatggttggtatacccaaaaaccaaaaacttttagcggaaataaaagttacccttaaattcgacggagatcggtctgaccgaaactgtcctgccggtctgaccgcgcctgtgccgtcggtcttaccggtgtagatcaatcggtctgactgccctgagatcgcctgccacgcctgttgacttcgccggtctgaccgcaggtcacctgccggtctgaccgtcgtaatgctgccggtgtgtcgccggtgagaccgccgaaacccggtgaaacacaaatcgaagaactcttaaagtagatgacaactttattgcttctctctgtgtttacaaagtgcaacaacatcactccttacaaaaatttcgactaaactcgaaactctaactcaactatcaactcaattcctctcaaaagcgataccgagaagcctcacgctccccctctatttatacccgaggaaagcagcctaaagccacgaaccaaactcatactagaagtcctaatcaccctaggaaaccctctagtacaagaaacaaactttacgtaaccactcataccaaatttggactccttctaaattcgactccgcatcccatacgcacacaatacctc

SEQ ID NO: 11481 - DNA, 571 bp, Oryza sativa
agcgccgccgccttcgtgtcgcctttgcgccgtcgcctccgccgccagttgccgtcgccggcaacgcgttcgcacgcgcgcgccgtcgccatcgccgtggccgacgggccggccttgagccaagccgagccgggtcgccgccgcccgtccgatcaaccccgggggcgatctgggccgtcggtcccgtggaccggcggtggaccacccgcgtggtcccggtccacagtgaaccgttccccccttgagtcgctgccgagtgggcccgctcgccggcgcccctttcctccctctcccgagccgctgaccggtgggccccgcatgtcggcgccgcgcctcctccccctcccgtgctgacgccagccctgggatttattgcacaataaatgatttaaggactttttgttatagtaataaacacagtgaatcttctaaaattcatatctaattcatccgagctccgtttaagcccattcaggtctcagtaaatcaagaaaaatgtgtagaatccattaaaaatggttttgttctctgtttcagtagtcttatagcctgtttgcaatgtttgccttgt

SEQ ID NO: 11482 - DNA, 8018 bp, Oryza sativa
atatgtgcatcatggatagagagtaaggaatcgaattggggttaattatcttcaacaaaagaaaaaacaatacaattaatactcaaaccacaaaaaatagaaagaaaagattacatgaaacagaaaattgttacaggtagtattgtagccgagatgaatgaaaaccttctggctctattagagagaaggtttattcattgaagcatgcaagatagataggttgcaattttgcgcagttatttggattaaccacttgactagcaatccttggtacacatgcagcggcgccggaagccgctgcacttgcctccggagaagccctcagtcaggcacacgttggcgcagttggccaccatcatgcagatccccttgaactcgttgcttggcgtctcgcactcccttgcctgtgcagctggtaccatctcaaacaacaaaatattaacatggctaaaacatgaaatcatggtttttcatccatatataccagaccagataagtcgtcctaataatacaccatgtcaactgaatatgtgttatagtatttctaccactagcggaagtcacaaaattgaaatttaatgatgttggaatgtatgtgacactgacgcaaaaagttagaagccaaaaaatattaggccaaaaatcctttcaatttttggtagacgaaagaaaacaaaatctggtattatgatctatacacatgaatatatggattgtcccaccaaaaatttcaatcgaaaggaaggggtcaaattaggtagttggttctaaatatatgtgatttcggacttaaccagatcatatttagaataataactcgcaaactgaatttcataaagtgctatacatataggatgacatgacagaatggaactattggttgttctattgtttattcagcaaagttcagtggtttctcccaaactaattatgtcgtctctttatatttcttcagtatcaaaacttattaggtatgtgccaaacataaagaggcagcagatggtgtaaacaatttccgttatctaagaaaatgaacaaaaagctggaacatggaaaaggatgtaaaccacatgtagctaactcagatatgtatatatatactcctactgtacctgtggtgacaacgagcaggaggagaactacaattgttgggaagaacttgcgtgatgtctccattttgatcgatttgtctttgtgttgatgatcaaatttggcactagtattgaatcccttgtaactatgataattgaagtgattgtggcgaggtttatatataaagagagccaatatcatgcaagtaacgagaaccttaggaaatttataaattgtatgtatatttttttaactgagcactctatatatagttttccggttattattagtaaaaaggtgggtggcattgcgacttttgctgtgaatcgcacattcttttcaccatgcacacagaggttttttcataattaaatgttttgatttctagatatagattaagtatgtatatatatatatatatatatatatatatatagcgagatactatactacacctagggtgtagtacagctaaaacacacccacaccccctcccccacagccctcgatcgagtgttagattgcgcaattagttggtgttttattttgctacatgatctgtctgctcgattgatctctatagactatagcttctgcctttttttggaggaagcacagctgctgtgtttggtcaactaattgcagcttatttgccggcgccagatatgtgttgattgcttgtgttccttcgtgagtttgtataatgtacatgcatgtcccattgatccatcgtggatcaatttgttcctgtttggctagttgcatcttccttgctgcactttaatttgcactgggttaaattaagctatacacttcaattaacccaaagttcaacccagtgatgttttagcacctgtgcagtgatgttttagcatctggaaacaccttttcctatttttattgtgtgactgagctgaacataataatttcacaaatttgttgagtcaggcctgttgaaaacatatagttgctggctgttttgcttccagttccataatcattttgtttccgttcatatccttgtgcatttttaatacatagcatctgcaattattgaggaaatcaagtgcaattttcagttttgtttcattctacctgtaattctggatccgtttttgttcagatatttaagtgggaaacaaacttactatgagaaattatactcctttcttttacgtgctccctctagctgttgatgtgccattcagactaatctttctgtttgtgttgtcatgctctgtgatttcaatttcctagcaacaacatgatgaattaggagcgtacctgatatttcagttttataactacacattattcttgagcaaaagcataacatgattaggaggctctctgaattttttttctcatccggagaggcagaaagtggtgtcctcctgttaactgcgttggtgcatgtcaggtctagggaggagtgacggcgaggatggcttcacggtggtgacgacgataatgaggcaaagcacagattctggggagacttggcacagcaagccaaagtttgcgcatgtttcaaacggaatgttgagaagcatcgatttaatagtaattttgctactaagagacaatatgttgttgaactatcagtgtaatagtaacttggttactatgataaactttgtggcaagatcaatatgttatattgagaaccatcggtgtaagagtaatttatttactaagagaaatctcgtggcgataccaataagtcaattctaagtaatttatttactaagagaaggtatatgaatcaattaggaatactactatcgtaagtaatttatttactaagtgaagagttgagaacgacctgagactctgagagtgattcatttactgagaggaggaaccaaattagactctcagagtgattcatttactgagagaaggaaccaaattgagaagggccgaaaataacctcggagtaatccatttactgagggaaggaatcaatttgggagcattggagtgttagtaactcattttctgagtggctgataaacttagtaatcttgttactgatgggataatcacgaaaaaaagtgcgagaggaaataaaaaaaaagaggaaagaaaaaaaggtgcggcctagttctgcaggattgatggtgtggagaacttgatagtaactcgtttacttatcgaactaaaactacggatagtaactgatttacttaacgaaagaactttttgtgtgggctgatgggtgagtgtttgtgcgggctgcatggggtgggggggtgggtgggtgagggtgggggtgtacgtgaggggaccgttttagttatagcgcatcctgggtgcggtttagcgtgtgtgtgtgtatatatatatatatatatatatatatatatatcttttacgttttacccacaaacaaaacttttagcaggatgagagataagtccaacacaactgcacatcaactggtctatcgaaatatgcatgacaatgaaatttgatattagctgataatgtagttcagctttggtatacatcgattgaaagatcattgtctgcttgcaaagaccaaagatcgaatttctgcagttattggggcttactgaacaaccaatcttataagctaagctggcctctcaagtctaaagtcctaaacagagagaaatgcgaaaaaactgaacaagaaagggtgacactataccacaaatacgtggccaggtgagcgtcagcaaaattatttactgaaaatggcttggcgtcatatctgtggtgccacaggttgagggcttgtttagctggtaccgatcgacacattgccacattaatttgaatatataccaagctctgccacaagtgtgtccaataatttgctagctacatcttaggtaagttttgccaaataatttaaacaggtgatgcacaaggttcagggcatgtacaacggcatttaataacacccacaaaaaaaaaacggcatttaataacaggttctgttcgttgtcatgaaagtaaatttggtgatgtgaaaaaggagagagagaaaaggaaaacatggttgttatacatgacaacggtttaaagtcgactcttatcatttaccatagaaaattttgttgcatgggatggacacaagaaaaaaaatagtaataagaaattattttagtgcattaattaatggttaagagatattgttgtctgtattacgataggaggatagtttataagcaatatgtattatatgttaactaaaagcccacaccgggttctatctctctttatacatgccctaagggtaacatgttaaaattgtgacggcaaactatatgttcacctaagaaaccgtgacaacgtaagacatggaaccaattcaactgaccttagatgctcccgtatatttcgattctagtgtggtcaatgaaaacaagacttagtaaattactccgtacaattatataattacaagaaatcagataattagggaccaatcttaaaaatttcttgtcacattgcctgtgattatgactggtgtagtgtgaaaaatccctttttttcgttaatagtggcattccttggttcccttgaaatagattggcattcagcaactccacgcaaggaccataaacccaactccaaacgatgtctctcacgctgatcgtgttggaaaggtagacactcatgcacgatctctcgcacatattccttccccaatagcgcaagctgtccaattccaccagccctgccggtgctattgggtatcggccactgcatgcctctcactcaacactggcctctcctgcgcccaatttcagctgttgtatatccccgctagcccaactcttgtctcaaatcctgtcgctcatacattatatgatgaaacgcctcctcactatccaatgcaagtgctttaatttgtacaggatcactatttccaatctttcttatagttgcttccacatatcgggttggttttttatgaattggcacatatgtgtcctttcccacacaaccacctgatggctcaaggctaaaacaggcactaatggacatgactatatcaatgttgtttataagtattgatgaggcactcatcactatgggcatgtgtctgaacttttcaaatttaggtcaaagtgaccagtgctgagtctggctatggaccaatgctaataagcaccttatttgtgccgctgctaactaccaattggcactgaccatatttgtaccggttttagatatgagcataactttctcattcaatctcggattagaagaaactttatatgaaaattgtagctctctgtttgatcaactattttgttgttgacaacttattggttcaagttacttaaatgttcaaatccatgatttaaatatcacatataaatggtcaaaagacggaaaatatagccgctactataccgtgtatatcttttttccttcacatttaccactttttttttcatcaagtaacttggccatatattgcaatggttttcttcacttgttacgtgttttttcttcatctagtaacttgtccaaatattgcaacggcatagacccataaaacagaggatgggttgggagtgtaatactctgttggccatgtactgcttggtttttctcgatagggtggtgtttcgttctctgcacgaggctaggaggagtagacagaccactctgtttttaaggggataagtccattttacacccccaaactcctgtctttgtctaaaattcaccctaaattataaaactggctattcaacaccctctaactattaaaaccgttcaatttatccccatattgttgactaggcggtttttgcctacgtggcatggcagtccaatcaaaaatatatatgtaaaaaacatgaggcccacatgtcagataagctttctcctcttcctctcttcttctctcgatccatcctctgccttctctcaccggtgctgggggagttggagctcaaccttgccgatgcatgcagcaggaggcactcggggaggtggagggctgctagagctcgagctcgccggtccatgcaagggaggtggacggcagccagaggtcgagctcgccggcaacatgggctccagcgtcgcctgctcctccactatctccacctttgcctcaggcttgggctccgccaccgcccccatcgccgctcccgcctcctcttccgctgccactgacaaagataagagaggagagagacaggcagagagaaagggtccctcgacgcggcggcggcctcactgagttcaccttgcagctacggcggcagagcctagatggagcatggataggagcccgagctgcgtgcttggctccagcgatctccacgttgccgacacctcaacccttagatctagaccacgtcaagctcgataccgaaccgggcttcttcgagctcggccgagaggggctggctccgtcgtcctcgttagtacaagaaaggagagagcgtgaggaaagggacggcgcaacgatggaagtcggccggcagcgtaacggcaaaagggaccgagaactggggacaggtcgagtagcttgccaactgctccggctcctccaccgtgtttgtcgttgccagccgccccgtcatcgagtcatgcatcgtcgatgatgtccttgctacggcgctcatggagacggaagcgatgtgcttctatccagcttcttcccgggtatgatgaattggagaaagagaacagagagattgaagaggtggttctgacatatggggccatttttttacaatttttaacttctttttacacgcggcatcctacatggcatcaaaaccaggttacaaaccaccaagggatgtaatgtgcccggtattaatagctggagtgtgttaaatacccggctttaaagtttgagggtgtattttatacaaaatgaataattaagggggttaaaatagacttatcccttttttttaagtcataaggatttttatccaattatttttcttctttacatgtattgtccaattctttctctcttcatctgcttttaactttgttttctaaaaaaaaggatttaagcaattaacatttattttaaaccatacaagtttttaaattgtagaaaatagacaatattaataatttgccataatatattatctacagttgttttcgtttcatgtaaaaatatttgtcatttttactactaccagtaatactttgcttaagataaggctttgtaagtgtgccaattagccatcctaaaatttttgcctcaacgagtggcgcgcggcactagccttgttcacgagtggcagccatttgtcatggccattgtgagggaaatgacaattattacccaacatacctcttatatggtctatgtgtcgatttcgatggagctccttccatcaagatcgttggtcttcccttcttactctatgcgctctcatcaactactcagatgtacgaaggatgagagcacattagatgacggtaacaacaagacgtgcacaacaatagtgatgagcagcgtggcagcgatgagtagatggtgcaccatgtctgcattttccttttgcatattattcatatctggtatataatgtgtgaaccgacagagatcatgctatctctaatggttcttgagccgttacagacgactcacagggataaaggaactgtcacatgatttatacccttttcaaccgcaattgatgttgtattaatgtattgtgttatctgagactgaacttttcttacttccaaacatgaatatatacttccattgaaacattacacaaacatagagtacaacatacagttgactggaccatactaagatcccaaaaaataattaaaaaaaaactgagagaaagaattgattagtacgtcctcgtattattctgacatatataattagaagggcaaaaaaaaaaagctactccacgcattaagcttgaaaaattattcaa

SEQ ID NO: 11483 - DNA, 516 bp, Oryza sativa
aacacaacaagaccaatacatgcattataataccatagttcacatttgccacttccaaagcggcaatcatatccatcaaaatccaatttcgatacacttattaaatttctttgaaaagaaggaacataaaaaacatctcgaagtaaaagtgtgaagccattcgtgagctctaggcaaagatctccagcagcttcaactttttcttcaactccattggcgactccaatggagctttcgcttctttgcgtagtcctcatcgaacagaatgcctttaaacaattacatgcatgaatagttgctccagaatcaatcctccatgtggatctagaataaacaacataatgagattcatttacaaatgtaacaatgttcttacctttccttgccatgatcattttcaggaagtcgggacaatcttttgtggaatgtactatcttcttgcagtgaagacaatgatcctttttaacagtgaactgttggtgctaggcagatgctaagacttttttgcttttgagg

SEQ ID NO: 11484 - DNA, 2416 bp, Oryza sativa
ctccgcccatgggagccagcgcagccattgccgtggacggtcccctgtcaagcaacgcaagtacataataatcacccggttagcagcctcggactgcccatccgactgtgggtggaatgccgtcgtcatgtgcagcttggtgcccatcagccgcatgagttcgcgccaaaacgtcgaggtgaagatggggtcgcggtccgacaccatggactgcggaacgccatgtagatgaacgatctcggcgaagaaggcttgagcgacggactcggcggagtacgggtgcgccagtgggatgaagtggcagtatttgctgaacctgtccaccaccgtcaggatgacggacttgccgcgcactcgtggtagcgcctcgatgaaatctagagcgatgtcggtccaaacgccctggggcaccggcaggggcagcaggaggccggccgggctcaagtgctcggacttgtagcgttggcacactgcgcaggagcgtacccagtcctggacgagctgcttcatgttggggatgtggaactcgcgccggaggcggtgcatggtgcgcttgacaccctcgtgcccgtcctcatgtgtagcctcgatgatctcccgagctaagggcgatgccgggggaatgtataaccagctgttgtactgcagcaggtcgtcgacgagcgcccaggggcccgtgcgcgtgccggcgctgacctcgtcgcggagggcagtgagcgccgggtcctggcgctgcgcgtcatgcagcttgctgatgaagtcaaagcgaggcgcagacagtgccaagatggcgccctcctccgtgtcgcgccttgacagggcgtccgcaacagtgtttgcagcgcccggcttgtattccacggcgaagtcgaatcccagcaacttgcccacccaatgatgctgaggaatggtggcgaggcgctggtccagcaggtacttgagggagtagtggtcggtcttgacgacgaagcgccggccccagaggtacggccgccagtgacgtacggcgtgcaccaggccgatcagctccctttcgtaggcagcgagggcacgatgacgcagcacgacggggcggctgaagaacgccacggggtgcccgtcctggaccagcacagcgccgaacccgtgggtggacgcgtcgccctcgacggtgaacggcttggcgaagtccggcatggcgaggacgggcgccgaagtcaccgctgccttaagggcgtcgaaggcagcggcggtgtcctccgtccaggagaacccgtctttcttggtgagggccgtcagcggggcagcgatggtgccgtagttgtggacgaacttccggtagtaaccggcgaggccgaggaagctgcgcaccgcccgtgccgaacggggaaccagccactcgtggatagcctgaaccttggccggatccatggcgacgcccgcctcggatatgacgtggccgaggtaggacaccgagggggagccgaaggtgcacttgctgcgcttgacgaagagccggtgctgacggagcacggataggacggtacgcaggtgccgcaggtggtcggtccaagtctcactgtaaatcaaaatgtcatcaaagaagacaagcacgaagcgtcgcagaaacggtcggagcacgtcgttcatcagcgcctggaacgttgccggggcgttgcacagcccgaacggcatgacgaggaactcgtagaggccgtcgtgtgtacggaaggcggtcttgtggacgtcctcgggcctcatccgcacttggtgataccccgatcgcagatcgagcttggtgaagaagcgggcgccgtggagctcgtcgacgacgggaatcgggaacgcgtccttgacggtgagggcgttgagggcgcggtaatcgacgcagaaacgccacgagccgtcggccttcttgacgagcaggaccggcgaggagaagggcgagtcgctgcggcggacgacgccctgctcgatcatcgcggcgcactggcgttccagctcgtccttgtgcgccgctgggtagcggtacggacggaccgccacgggagcggagctaggcttgaggacgatggcgtggtcgcggccacgtggaggtgggaggcccgtcggttcgccgaagacgtcctcataggcgaccaggagctcatccaggagcgtcccactggccgcggctagggtacgcaggtgcgttgttgaggtcgaggccacgcccttccaggcgaagcgttgcccgtctcgctggaacgccatcgaccgggaggtgaagtcccacacgatgggacccaacgtgccgagccaccgagtgccaagcaccacgtcgaaacctgcgaggggcatcacaaaaaagatcggtgtggaatgtggagccgttgatggtgaaccccgcgtccggatgacacaaggcaggccacgcgttcgcccgtggcgacgatgg

SEQ ID NO: 11485 - DNA, 7936 bp, Oryza sativa
gggtacgcaggtgcgttgttgaggtcgaggccacgcccttccaggcgaagcgttgcccgtctcgctggaacgccatcgaccgggaggtgaagtcccacacgatgggacccaacgtgccgagccaccgagtgccaagcaccacgtcgaaacctgcgaggggcatcacaaagagatcggtgtggaatgtggagccgttgatggtgaacgccgcgtcccggatgacaccagggcaggccacgcgttcgccgttggcgacgatggccgtcatgcgcgggctggactggatcgggaggccggcgcgccttgccgcctcctcaccgatgaagctgtgcgtcgagcctccatccagcaaggcgaggagggaggcatcgccgacggtcacctggagctggatcgtgtccgcgatgggcacgccggcgacggcatgcagggagaacacgggcgcctccgtatccccggcggcggccgccgcgtcaccctcgattgcgacgtcgtcgatctccaccccgtcgacgaagaagaggcgacggcagaacctgttgtggccacgggtgaatttctcgttgcaattgaagcacagaccttggcggcagcgttcggccatctcttccggcgtcaggcgccgtgggttggccgcgtcgcgaccctgtggggcggccgctggtggggcaggcagcgccaactgctgcgcgggcgcgggtaacgcgagccgtggcgcaggcgcaggtagcagcccacgcggcggagcacgtagtggaggtggcgccggccgatcacgctccatcaactccacctggcgtgccaggctcatggcggcggcgagcgtctccggatggtggatgcggacggcgtggctgagaggcggcagaagaccgccggtgaagagctggacgcgctgggactcgtcgagccgacccgcgcgcggcaggagggcctggaagcggttggagtattcctccactgttcccgtgcgtcggcactcggaaagttcgaagagcggggccgaacgcaggggtggcccgaaacgcaggttcacgagttccttgaagcgcccccacgtcggggttccctcatcctcgagcagctgggtgtaccaagtctgcgtgacgtcgtccaggtggtaggacgccatgccgacgcgctcttcggccatggtacggtggtgacggaagtacgcctcgaatttgttgaggaagagcagcggatccgtggtgccgtcgtagcggggaaaatcccacttcttgggccggggaggcaggtcgaggtcgcgcaacccatcagggtggcgagtctcggtgcttgcggccgtcgaggccttgtccttcatggtcgccatatcggccttcagggaggtgagttcggcggacatgttcttgatctccttcaagaggtcggcgatggtgggctcggccatgtcggcggctgggttggctgcggaggcgggtgatgggactggggatggcggcgctggtggtgggctagtggcggcgtctggcgtggaagatgaaggtgcggcggctgctggggctgaggatcgagtggatcgtgataccaggttgtcaagagccttatgatctagggtaggcggccctcgactacggagttcgtaatctccggccgtggtcttccgatgcggaggttattcccctcactgccgatcgggcttgagagcgagaggtaggagagcaggtaattgatcttgcctccctaatcttttcggtttacagggaatatatggccatcggccctaaccaacggaggaaacaaactcctcgattcaaggaactaatcaaagatagcaaataatatcttaacaactaaaaatagctttccaacttcagccacttgcgctgatcgcttcatcctcggttgcatgcgccgtgcccgcgatcaccgcgcgttctgcgtccatgcgtgcgcccgcacgttctgctgcccggcgcacatctctggctcggtgtctcctggtgtaggtcttcccccacatgacactatcttaatttattattagaccatgttctgttagcactattaccacccaaattccatgtttctacatagttagctggaggatttgccttcaaaaattcaactgtttcttgctgcgacactgtattgttagcacaatatgtgaaactcagtcatcaatcctgttcgtgtcaaatgtgttgttttcaaattctgtgaattctagagctctgtatttagaccccagccaatgtgaattctagatctctgttcgaaaagtaggcgaaatctgaaatccaatttctcctgtagtttagtacatgctgtgcacattagcaaactgttatctacagtttcccaaagaattcacctacagtaagcacacatatgcgtttcaatttattttccttcagctgaaaataactgaaatgttatatgtgtttatgttctccttccaatgctctgcctgcacctgcaccatgcttccctttcaatcttttgtacaacagtgtgcttactgtttgtttgttaaaatgctcaccatgtatttgttgagatgctctataaatatttgctccaaacagccaccgcttcaccacctgcaatggacatcactattaggggctccccacaaatatcatcaacaagctcaggtaaattgtcttgctgctgatgtcaacaaagagaggttgtatttctgcctgttgcagcttttatcttacgataacatgacacattcctatacttttttgcatgtttgaacaaccattgcaatattactaatttgagcgcagatctattaaatagtgcagcatgcagttccttttcctttttttttttgtttcaattcaagtgatctgttctctgaaatctgaagtttcagagaaacttccaaggtgttggttttccatctctggggacatcaatatatttatcaattatacacgaatttcgagtcaggatggagaaaaacaattagtagcattcaccaaaagaggcacaagtattcattcaatgagtaaccactttttatagtgaattgtacctaccggatacatcaccaactggttagcctaatatatttgattatttgagatggttttctcacataatttgtagcacaaatgaacaccatcaaggcatcaactggacattatgttgatgtgtggctggcatcaagtaaattggttgtcagttatattgtgtttggcattttgaaaaaggttgataattggtgttatcagttatattcttcacatttacattatttcttcaatgttttatttctgtaagttcctttttagtgtccttggtttttctctagaattaaatcgacactgttcttttgtccattatgtattctggaggcttttaggtgggaaatagctagatactaagcaaaagcacaataaaggtattttcactaaggaattagaacatgcatttttattttaccctgttaagtatatttgttgtatatgcgcttaggcctttttatggtgactcccatcacgtatcttgctgataatagatactaagaatacatttattataatattgtaggcaatatggcagctttttcctctattctattttaacctgaaactcagggccggccctgacgggggtcgagcagtgcggctgcactgggcccccccaaacccaggggcccctcccaagatgccgaagagtaggcctactctgcttccgcgtatgatgatcgatccgtccagccctaacgattagcgacgtgctgatgccgacgttcctaatgccctagcgatccgcgagattagcagatcaattttcttctcgtccatggcaggcgacggcaaagcaggcgtccacacgtggacagccggcagcctcctctacagttccgctagcttcaaccgttgcagcaattctgcagttctacacgcctactacctgtctgccgatggcgtctgcaggtgaggtgaattccctgctggattaatccagatgtgggaactgaaaatatcatgcaaaaaaatctattaagcctacaaccagtagtctgtaggtggactggacaggcctgcatgaagtgctgtctcatcctgctagctgctgcaagcacacgctggctggccgaagaattgtaattagtaagtgttgtttgaattaatctaatatttttgtagtttgtatatttttgatatgctattttttctaattaatagatcgttcttgatatcatgttgtcgaaaaagtgtatgatttatgcactgagttgaaattgctagatgatattgaaattgatatcaacaccaatactttccctttacatatatccagagaaattttcatatatagatatctattgattataagatattatattaatggcccctactttttgtttcgccctaggccatcgaaacctcaggaccggccctgctgaaactcaaaactcatccgtatgaatccaagctctcctctgatgcttttctaacttacattacttttcagcctaacttgcaattattactataattcttaactaagagatcaaggcatcgagttctttgcttcatgtagatcaaagatgtttgatgatttgtatttttttccaagggatgatggcttgtattagtattggactgatgcagactagctaaatgtgttttgatccgcaaccttaaagtttaatgtgttgtgataatgaaacaagtaaaggtacatgtagcttggcagttggtgaccactgaccagccgtcgtgaggaactcccaagtatttaagctgttaatgatcaggaaaggcaatgttgacagtctacttagttctgttggttatttgtgagtaacaattaatagtgcaatgcatatgagtaaatcatgtgtacatgtattcctttgcaacctatatttgcttccatatcataggcatattatgataagcgcttgaggcataaattatcatttgtaaacaatagttgtgtgcgtgctttagcataggcaagttacggtggttgtgttttgcttgcatacttgaaatttatgaactaaaataactcaaacaaatttttattgattatctattttcttcaatttaattcttcaatatatgtcaacgtgccttggacgtgcacgctcactagttgttgtccaatgttgctgattaagagactgcatgaattgtaggaagtcgagtcattactacggaatccggacaccttctatgtgttggtttccaaaaaaactgacagatataaccccttcccgactttcacatgagggtaagattgaaaaccggcattgatatatctttatagatatcggtttattaaaatagccaacacatataatacatgtgccgattttcttttaaaaaaaactagctcctataactataaggatatatgggtgccgattttctataatctggcatctttgtaggaagctaagccgatggttttcctcctcgcattccacgcatctctcacccccccccccccgcccgcatccatttctctctcgttctcccctcctattccactgcccctctccctcatttccttcgctgcctgtgccaacctccccatcacttctgctgcccattgccctctcctccgacacccctcctccgccccacctcctctccccctcacctccaccgcagcaagcacgggggccagccggatctgctgccgcacactctaggatggccggatcagctgtcacacgcacggagaccaccggatcaacaacgaccgggtgaccgcaactctctcaaccaccaggcgctcgggagcagacggatccaccaccgcaaccattggggcagcctgctagatgataacagagattccctcaactacctcaaactgtcacgagcacgcggtgcacgtttgacgatgacggttgcttcctgaagtccctttctgtgttctctctgtgtgttcttaagtgttgttggatgttgacaggtggatattaattttgcaattcaatggtcatctacgactgtgtgcttgaaatgttagatcgatcttaggggtgatggggagctactcgattcatggctcgaccggcttcttttatattcgtgaaacctcaaaggttttgattcctaaagtggcacctttgattcctcctcattagctccctacggggtgccggttgggaaatccgacaccctatataagaggttttctgaaccaacaccaatcatatttttctatagaagtgagttcatcatttccaccagatgtaatatatttgattccatggcatggcagaaggccctcctgggctcctgttgatggtcgttaagtaccgattttgaccgtcaactaccaaaataaataatatttcttacacgtatattagtaataaataatgttgttccacttgtattagagaaatattatgcatgtagagattatacactaaagtgaagggaaaatgagccggcatgcaacaaaagcacaccaccgacgaatcacatgcgagcacacgaattgatcggcccacaagtcagctcgaaccgactaaaaatgaggccaatgaatcctcaaatgccttaggggcccacatggtagtccctggtgatggtcggtggcgagaaatggggcctaggggtcagccgaacccttggttcggccaaaccaagcatggcccctctcatcgccaccttacacatggacgctcctaatggactccaaatgacgactaccagcgcattgactttagtaaccaccatataactgtcactacaagtctataaatagatgatgccttctcacttcacaacacaaacctcaaggagcaattctcttattccatatattgtattctctctagtagtagtggagttttgcttactcttcagtcctatagtcttctcggaaattctgatatatgtttagtactttactcttcttgtaagactgtaaatgcaataagggaagtatcttctttattatattgtattcatagttcatatactactttattagttatgtgtgctatgaatagtttatacatcatttatatgcttcacatgattaggctagtcgatatatgctatagtaacggtccaataatcttaatgggttgcactagttctaaatcgtccatccgaaggtgaaagtctgaggggaattagtgacattatgtattaacataaacatggtgtttaggttagttaaatgtcgttccatgcaggtatgcttcccgaaaagtgaggtaggcgaaaggtaccctgtccatcttttgtattcctcgatgttcggatatgacgtaggagttcgtaaaatgccataaaaacgttggtagactagcagggagtggtctcttggtagtatacctaggtgcctaaaacaatatcctagtcttgtaagcatgtatgtgttaagtatatactaaacatttgtagtatataagtgcaaatgaaccttagctctttatagtttttctccacttccgagtgtatctttattagagatgaatctcctgtgtgtcacactacccatatatcatattatcaattaacccctctttagactatggtaaagtaattaaagctcgattaaggatataaaaactctatctttacatcatcactttccctgcagaaatataaatatgatattcttggaatactcctaggcgaaatacgacagcgatatccgtgcgcttgcagatttatctgtgatcataagaaataccaatatctcctaaccgtgactccttgatgttaaatattttctctccaacttttctttgatcgtcccttcagtaaggaatgttggagcacaatgcaaattcagagggacacacagctctggaactgaggtccatgcttcatgctgctaaccctacttttcactactagaaaacacattttcggtgtcgtaggggttccattttcgcaggcgggtatgttattcggagacaaaaccccgccggcgaagacgatacccggggtggagggggctgtcc

SEQ ID NO: 11486 - DNA, 6973 bp, Oryza sativa
aaagcattacaatttataatcagtcgtatacgaaaacgaagagagagtaggaggctctactccagacctccagtggtgtcctcttgcgtgctaatgtcaaaccgtgagatggcgatgcggtttgacgttgaaggcatcttgatctcttccctgattctggctctgttataggagtatgtttgagtgatcagctggtgtgcattgaatttgagccagaaattgctctggtcgaatttagtttcaaattttttcttcaaactttcaactttttcattatatcaaaacttttctacacacataaactttcaactttttcaattttaaccaaacttctaattttaacgccactgttcgaaaagttggtgcttctactaattaaaatggaatataatttcttcttctaaagttaaatcagttgtgccacgtgaaccatttggtttggggataagcagagaactttcagatggtcacgtcgacgggacaggtttacttgcccgtctaatcaccatgcgatcacacgccattacgagactagggaatatccatttgtagagcatttgtagagcagcagcattaatgcagctggagaaatgcaggatttaggaatagatttttcttttaaacatcattaaaccagcatgtagggatcatatgctcacgtaaggaacagatgataaatggcatactacttcttaatttttatgtacatagcttatgttcataagcttgtatagaactttatttattttaagatggagagggtaacattactgtcaaattattataaaaaagatagcactagcaatatggtggcatattttacccatataagaatcgttccggtgactatgtatattacccatatggccacatgtaaatgtactttcagtgaggccagtaatttctcactagtctccatctttctgtgtgttaacgaacgtatttgtatgtgggtacgtgtctcctctgtataattgagaaaaaaaaacctatgaaatttgacgttctttctagctgcgtcatcttcacctaaacgaaagaaagaaatgcctccatgatatatcgacaaggaaaataaccacatcttcttttgaaaaaagaaaaaaccatgaataagaaaggaagacaatcactatctactctaatttaataattttcgttcagaaaaaaactttaatttaataatgtgaaatgctctctatacaacaatacggtgcaagaattttctctatatgaaatgattcgcccatatgttaccgccaccaattgacgacgacggaacaaattaatcctctgactttggaaccaaaaagccagatacagaacagttattcaagtactggtgccataatgatgtgtgcagtatgaaccgtgcaggtactgtaccaaaagggctgtaagacactgttaccggaaattaatccatccatgttaaaataagagaacttttacgatataatatactaccagtatatactgacagtatataaaagggcatattaggaatttgatagaaaataaaacaacactttagtaatttttggttcaaattgaatttaattgagagtacctggtcctggatcttatcgtgcactagggaaagagcatcctgagcgccatttgatgacaaagcacgtgatgatagcacgatttgatgatagaataacgaagaaaagacaaaattaccctttcaaactttatactgcaatctaattaaataaaaaattaaatcaatctacaccgttagatcatatatacttgcagtatatactagcagcatatcgtatcgtaaaaatcctctaataaactagttcgaaaagcttaaagtttatcccaatacaaatcaattcttaccttcatgtatatcttcggtccacaaatcgagaagttatatctattgaatacctttgtctatatgtaatttcttattaactttcttattgacgaagagtagtttaatcttttatcatcactactaaatactttgtactaaatgtatctttgtaatgcaagagactgatttatttaggaaagaagaagtatacaactgagcaattgtattatttacgcgagcaagtttaatagtagattataaactaactataaacttatatagattttagagaactagaaaaataaatagtattggctcttataaaagagctaactcttcatatactattttaagatgaatggattaaattcataggtaagagaaaaatggagagaaaaatagagataacgttataactcatccactataaaatgttaaactctaatataaacataatagttagctctactattaaacttgatatgatactatagcaagttgacctcatccatcagctacctaaatcaaatgactccaaattccaaacccatgaagttatatcgatgttccccttgactttaacccactcaaattcagaggaccatttccacgacaacggccactctagaagatcacagaaaggctgagtgccctggttgagcggctgagcccgagagcaagtcaacaagtactatagacattcaagctcttgcttaaggtggcatgatgagatgaatgagagaagagaagagagatgatgagtcactgcttatgcaatgggtaatatccacacactcctagatagatgaaagaaagagaccaatagattaagtggaaataaataaagtaatactccccctacctacttttgatagtcatatttcatcttggcacacagaccaaggataagtaattctacttatcattcatttaaacatgctactagccattcctcgtaaacaagtgattcattaatatttacatttctcaatgcccatgtagccaatcatgtgtggaagaatagaaagtcacacattaaatccgagaaagtcattaagatgataggttgttggattgaaatatgactatcaaaaataaaatttttagatttggaaatatgactatcaaaaatagatggagggagtatattgggacaagtgctttagaggccatgtattgtatagattacctcgtaattagtgagtaaatgatttcaacaaaattaaatatgaccatcacctctactatagaactgtattcgttagttcaggttgagaacttgtcccaccaaaaaaaagaacatgattagtattagtaaaaaaaaacttgaaaaatagattcatatgattttctttcaagcgacttccctataaaaaaatttctaaaaaaacacaccatttaatagtccggaaaacatgtgcgtataaaataaggaagtagaagttgggaaagagaagaaatgaaaacagcctaaaatttgctatgagcaaacaccgtgtaaactatactccctcggtaaaaaaaaaaagatacagtaacgtttagggatgaatcttcactgttctaacaaaaagataatttttagggggttttaagaaaaatatgaagtgaaaccctgaaaattaccgtttgatcgaaaaataaacgtttgagattcgtccatgtcaccataagtaaatattttacttgggaatctcaaaagtctatttctaatccaataatagtttccactacatatttttccctttttcttaagggacacatgggtttttcctcccccctccctctactctgtttagataactacggatccgtcaaccccctccacccatctccatgcggcgaaaaacgcacaaaaaccctttttgggagcttccaactcctccaaacagtcagaattcttatccagattctgcaaaaatgtagctatagaatcgtgaaaataacctagaagttttcaaagactaactaccaaccaattactcaaccaaaatccccaaacagagctgaaatcccccgtgccacggcttccccagccgatccaacagtatccacccgttacttggttccccatgcggtgagagccggtgaggtgagacactgactggatttttcacatttttgtccttttaaaaaacttattctacaaataaactcctaaaaaatttattatagaaatggtccttttcgcagcgccaaaatcattggtgccatggtccaatatgatggtgccattgacgttggcgttgtcacattcacccccggtgaaagctaagttagtaatgtgaaaggggacggtgtcagcgtcattgcaccaaggacctatttgtaaatatttttatttacacgtgggttcattttaattacaaataggttctttccaaaaaaaatacaaattggtactcggcaccaatcacgttggcaccggcctccttcgcatttataacttagcttccactgggaggctagagggacggcaccaatatcattagcgctgttatgatgtactatgtgccaataatattggcgcagtaaaaaggattatttttagaataagattttttttcgacattatttatcgaataagttttggatgaaaaactgaaaaatccgggagacaccgagatccggaggccgaagaatgttgccgcccacgcgcaaacgctctccacacctgcctgcctgcgtaaaataatacacggcgtggcggcgccccgcgcgttgcgctggtggtggtggagtaaataaaacccgggcggtgatgcgctgagccatatggccgcttccgcctccgcagccgcaacgctccccaccactctcctgctccgccgcctcctcctcctctccctgcgccgccaccctaccacccccgccccccgccgattccgctcctgctgctgctcctcttcctcctcctcccccgccgccgcgccggctcacccccacccgcccgccggaggtgcgtgctccgctcgactccattccatccagctagctttagcttagctaccaaccatccacgatcccatctcgcgtcagttgccgactgcttcagaaaccgagagagaccctgctcgaactcgttcgtgtgcttccacccgccgcgattttttttttttttgaggaggatgatctcggtcgcgcccaccgacgttctccccctggatttacaatgctttctttcttcattctgcttctgcttctgcgctgccatgtaaacgcgaactgaaatcgctcggattatccgtacaactccgccaaaaaaaaaaaaagaaaaaaagtttgaggtggggaatggataaacgtggagaggctgggttcccagatgctggggttacaggatgtagaccgggaaaaagaaacaaagatggatgcaaggatgaaaaagatggtcaccatggtaaagaaaagaaaagagaggagataatcacgatggagacaattcagcggtggccactgggccgccttcgccatatgccgttcccatttgcatcttgactatctcttatctgtccatgggaatcgaaaaaattttcaatactgtgtttcaatcatttttagtgcacgtttgcttatgctgaagttctatatataacgaacatgtgcttcaggtaatggcagtccatgtgtgtttgatttgctcaagtgtggtaggtgcagggagaagactgagaggcgagctgcgcagcagagccatgtcaagttccacgaattcgacggttttggcggaatcggtagcgactgggagctcagtggatgttgagcttctaccctttgtgaatgacaaacatggtggtgtgatcgttgagatgacggccccgatggatccccaattgttttcagcttccttgaaagcatcattgtcaaaatggagggaacaggtaatttccggaacagtggggtatacacttataggcgtatgattttctttgggtgttagcatatgttctggatgattggttagtaatgtaaatatcctttaatattcatatttatatatgcaacttaataaattacaaacagttcaagtttgaatagtgtccagtttttcaagattcataatggcacctatgcactatacgtatttaagttaatattcaatacacttaagatttacacagaagtcaatggtgtgcaaaaaaaagacctgaatattgattgatatttggtatgtatcatttaaatgcatcccatgcaatgttctatgtacacatgtggctgcaatgaccactagaaggtttcagtgctatgcggaatggcaccctgagagatttaaatatttcagcaaggagaacggagtctaatttaaataatgtttatgagggttggggatccatcatgatacccaatgaatgccatagatcagcaaaacctattaatgttcatacctaagtgcacttttcatggcgacctgaaggagataatgttataacgcatagccttcatacagtttgttaattaaatataatttcctgtatgatattcccgttggtatctctgtaattgtttatcattttctttgcctgcccttgttgcagggaataagaggtgtctggataaaattgcccatcagccttgccaaccttattcaatatgcagtggaggtagctaaactcacatatttacatctctttagtagcaaaactagtttcatcctcccattctcaatttaatttgccacggtactattattttccaaattgagatactttagtagaattatgcatttttaagttggaaatagcaattattctagttttttatagtagttaatatgcatattaccatataaatctgtttggacatttttatggacgagacagtaagagattatcttactgtatgaatgaaatgcgacattgtacaggaagctgtttgattgatctccgaatcacttttacttcatcttcatgtaggaagggttctggtaccaccatgcagaggaaacttacttaatgcttgcatactggcttccagctacaacacatacattacctgtaaatgctactcaccgtgtgggtgttggagcatttgtaatgaatgacaaaagagaggtactgaatttgaatacaaaagcactatttcagggattcagaatttcagatagtcatggttctgttatatcttcccagcatcctt

SEQ ID NO: 11487 - DNA, 2981 bp, Oryza sativa
caatattacctacatctttggtgcttttcttttgcagcttctaacagggaaatatgggatcacacccagcaagacgcacctgtttcaagttccgtgctcccgcctatgggaaaaatgactcctgaaagggtatatagtacaaacagctctatgtcaaagaagatgaaggtctctgtcacagcgaatccatatacagttgcttctctccaagttgctacaaacagcttctgccaagattcgctcctaggtgagggttcacttggtcgtgtttacaaggccgacttccccaatggaaaggtaaaacatcacttgcagtaatctattgttggtcaatacagaaatattactttgaacttagcatggtattgccttatatatgttcaacaagtgtttatttgcatagctatgacgcagtggaactgaattctgtgcttgatcgcaggtacttgcagtgaagaagatagacagtgcgtcactttccttgtatgaagaagataactttcttgaggttgtgtcgagcatttcacgacttaggcacccaaacattgtgccgcttgcaggctattgtgttgaacatggacaaaggcttcttgtgtatgagcacattggaaatgggacactgcatgatatattgcattttttcgatgatacaagcaagatccttacatggaaccaccgcatgaggatagcactaggcaccgcgcgagctttagagtatgttattatttgagcactctagtgtttttcactctatgaaaaggttatgttaatcaagtataatgctacaatgcaatgccaacctttcttcagatacctgcatgaggtgtgcttgccccctgttgtacatagaaacttaaagtcagcgaatatcctgcttgataaagaatacagtccccatctgtctgactgtgggcttgctgccctgacaccaaatcctgagagagaggtaagtaatgtagtaccacatctctatcaatgtagttatttccaacatttcatctttaggtcctacagtagttctttgggctaaaccatgtgttatgatgcaggtttcaactgaagtgtttggatcttttggatatagcgccccagagtttgccatgtcaggaatatatactgtaaaaagtgacgtgtacagttttggagtagtgatgttagaactattgacagcacgtaaaccgttagacaggtacattaccttattatttcagagctagtaagtagtaagaaaatgagtaatgtatttctttattagtaacttcaaggccgtcattcattcttgtgttgcaatgtgcagctctagagagaggtccgaacagtctcttgtcacatgggctactccacagcttcatgacatcgatgcgcttgccaagatggttgatccagcaatggatgggatgtaccctgcaaaatcactctcccgtttcgctgacataattgcattgtgtgtccaggtaatattcgttatctttcgcacatttctttgtcctgcatatgactacccatttcttgttcgcccaaaattgttcttacagcttctaatatgaacaactcactgagcagacggttcagttctatcaatcttaaagttggttttggataacatatgaactagaaatactcttcagaagcacgctaagatcgatcatcattttcagtttgtaccataatgctgtcaatgctttgtagcccgaaccggagttccgtccaccgatgtccgaggttgtccagcaactggtgcgcctggtgcagagggcaagcatggtgaggcgtcaatcaggagaggatgtggggctttcatacaggggccctgaccgcgagggaggcacagccgacgccatctgagaccaaaatcttctcagtctctcagctatgcagggttacaaaagtttcagagaaagcaagctgggactgtggcaacatcccagtatctccaaagctatggatcagatcacttgttcctgcacaaaatgaaaagagaagagaagaaaagaaagaatgatctgatcacctgttgagtttggcatgagctgttcagtgttcagttttttcactctgttctctctgtggtatctgtccaattgtatactacagtatgtggattttgggccgctactgggactttgtgaatggcatgtatagtgttcaggtggctggtattttggtagttgttaattaatttatagtagataagaaaagaaggtagataaatgtacatttatggacttgtgcactgctactgtcaacagctgaacattccaccttctacggcgagctgtacactacatgcttatagttttaagagatctctagttttaacggtatttacattcttcgagcacttcctcttttttttttttgaaatataagtatttatacgttgtttagcagagattatctttgggaagaaaagactttggtgtcccatattaagtgatagatggttgggaggtaagatgtgaataaatttcagtaggaggtgactgatgggataataagtggagtaatactctgaacaatgctagaagtgtttatattttgctacaaatttcaaatgttagaaatgcttttatattttagaatagagggagtagtttgttgttcttctaatttaatggtattgtactcttgtcctgccataagataccaccgtactctacgactatgtgcatccatgatcatcatgttcatcctctgtcttaaaagataaaactgctgaaaatttctaggatagtgacatgtgcctggttggtaagtcaagcctgagtactacagcatatcgatgacagcaaattgcgatgcaatcatgcaaagtctgcaaacacatggcaattaaattcagtaacaggaggctgacaactccatcatttagtattaggtacaactaaaatttaaattttaaaatcattttaatatatattttttcatctaacttattttttaatcttaccagttgaatcgttaaaaagggctgcaggaat

SEQ ID NO: 11488 - DNA, 8642 bp, Oryza sativa
ccatagaattttcatgtgaaacacagatacaaggaactatgtttatagtaaggaaagtatattctggagagtttgaaatccttgcgttgttaatgccatgatcataatcagatctcttgacattgttagggtggctaatacctgctaattactgttgttataaagcaaaacacatgatcccctgtttgttaaattcgtgataagctagctgtttgtttgagttatgagtgaattaacatttccaacctacatttataacttgttattacctcgtgcagtggaatggtcgttagagatcgatctaagcgtaaaaaccgtgcggatgagatctttaaggaagctaagaggaagggagcaaagaaaggttcatttgaggctcgccggaaatcaaagagctttgctgggacaggcagacttctaacaggtgaatctgcagagcctgttgcgcctcagtcaccagaaagtattgtccacaacatctatttttggaccaatgggttcacagtaaatgatggtccacttagaagttttgatgatccagcaaatgcttcctttttaaaggtaaatactttgacctgtgcaaaatgtgtacctgttttatctgcttattatgtttgtctcatgtgccattatgtacttataccatttatttgttttggaatatcttaattcaccttgtttccgacctagagtggtagctgttgcaatattttgtcatcatgatgcaccctgttgtgcttaacgtaatggctagttaaaataaattcctcatgatgaaaacaaatcactggaatggtcttctttcattgagtgtatccattgatgttcttcagctggcttccatcatagtgtctcacaacctttatctcatttttgggctggtcctcatcaattgatgtagggcaagatgtgttttggtaggaagggtactggccaatccccccctccccccccccccccaaatttgccattgcaaaacagaaatctttctgaaaatttctggaccaagtaaaaatagttggatttcacatttcacaggtagcttgttcagtaaaactacccaaactaatctcaacattaaaaaaatgcactgaggcttttttttgttggtaaaattcggtttagtgttaccatttttcttttatggttattctgttgcttgatctattgtttattttgatcttattcttagcactttatgttcaggtcctctgtaacttgctatgcatgccatttcttttgttttgttacatgtttatgaatttgggttatgtcttctcttgctaaatggaatgtgaattaatcaatctattatttttcctttttcaattgcacagagcatcaagaattctgaatgcccatctgagcttgagccagctgataagaagtctcaggtgaatgtgaatcttgttcggaaagaggaaaagtgtcctgtaagttttgtcagcctttgctttactgtttcaattgttctagacgacgatcccggccttgacaatgtccattgctcgaatgatgtaggaacctgtcaagcgcgcagctccattccatggagcggcaaaaactctggggacgccttctgataataactccacacctccggaggctacttctgcagcagccgctgcttccagcacagagaccgcctccaagaccgtgacgatcacagtggatgattctttgccatcgacctctctgcagatcaggttcgtggacggcagccgcatggtcgcgcatttcaacacgagccacacgatcgcggatgtgcgggcgttcatcgacacaacaaggccaggagaagccggtgattacacgctccaggccgggttccccccaaagccgctcgatgacatgagcaagactatcgaggaagctggcgtcgccaactcggtaatcattcagacagcgtagcttcgacagaaaacagtttgttgaccccccctctcttcaacaaagcacactatcccatctgaagcgtgcaaatttcctcccctatcttttcatgccaagttttctttttctcttgaatctacccttttctgccttccatggcttcgaccaatagctgctccaggtatgaagagtgtaaaacagtgagatctgggtatctcgtccttattcatctatagtgctatacttttgctctacatgtctgtttcttgcccagtccacatcacgtttggtgcgtttaactgtgctcctttgttcttaatctaacgccctctttggtactagaatgttggtagtacttatggacaaagttagttgcaacgggtgctccttaattcctgtttttccaatgttcttacgctaattagaatctgagcccaaccgacgtgaattgaattgtttattactagaacagttcttgtttagccaaagcctcacttttttctagtacaatcttttccagcttttcgtcggatttccagtgttgaaaagcctaaagttatgctagcagatcagccacatacgtcaagaatgtctttagttggtagaagaaaacaaaaactttatgtaccggaattggatttcttctgtccttgggttgatgtcccactgtcacaggttcgtggccggagagatgtactgtatgcagtgacagatcctaacctggtgtcagaaaaatgacagagagtacgaggacacctttacagttatacgtgttgctttccaagatgaatggagagtacatcgtctggttggaaatgtttcgtcctcttcatcatcaccacggcctcattcctcgcttccttgtctctgtctcacctctctctctctcttttcagagattagctgttgcgacatggttttctttgctgtggcctaaacaaatggatctcgtctcctcttcctcatttaattgttctactacgagctcatcagctacttgtgttttttttcttaacagatgtgaataaaagggagcaagtgattgcaagacgatagagtacaatgtaaaatcacctgtcggtttggctaattggattggtcgatccaaccaacaactgacgacaagtaggtgagccctgatcagaaaaacccccaatgatttcgtccttttctccttcctcctcctcaccacctgtgtgctctgggaccgtggtgggctcactcaccatcgggggtccatcgcggcgacgtgacgggaacgagacgccgacaaaataccggacgcgcggtttcgagctgtaaaagtgcgtgagaactgaagaaacgccaacaattccccggctctatccggtggcgcgacgccgacgcggatgcggtgagcgattgctctcctcccgccgctgtagggaagcacgtaggtcaacccgcgaactcacttataaatcaaataaataagtagttctagagatctcatgtcgtgatccgacttaccgtatctctggcaaggtttaaaattgcagaaagaaattttcgaaattttggtcctatcggccgattttttttttgaatttggtagtattttgttcaaatttgatcaaaatttatttaaaattttggaccgaaatttctgaaatttcaaaaattttggtatatcggcactctccgatacaaacgccaaaaacgaaataccgaaatatgatctagggatacaagtgggacgatccgtgaacccatttatagattaaattagtaggtaatccgcgggttactaattttgtttataaatggattcgcgggttgattcacttactttcctacccgctggtgcatcggtgatctgatgatcatgggggttgtggcctgtgtggcctactggccacgagcgctgcctctcacaggttacgatttgtcacgggtgttgcctattggtgagatgctgtgatctgatggggttgattaatacggggagaaaccggattggtggcgagcatgagactgggagcttccaacttggttaaactaagaaagcttggggagtgtccaagattgattcgaattcaacctttattccgcaattcagcttctactattggcttaatcacgtgctcgttggaaacttattgaggtactgacgtactgattggagggggagggggatttttttttttggccgtcgcagctgctccaaaaatctacagctattctttagtagctgcgaaattaaaggtttgtttggaggaacttaaagcaatcacaataaaaatataaccttaagacaacaattacacttataaaataagtcatatacattgtggttatccttgagatctaccacaacacaagcaaatagaaagtaatttttttcactctcattcacttcatgaacgagagctgaaacatttttttttcatttgatgcaggctcattttgtggctaattctaatgatggtattgtgggaattactttaacgatgatctactattcatgtgtctcaccttaaggttacattacaccataaacattgaggttgccgtaagattctgagaagcaattggttggtatacaacttttgtgaatttcttagcttctagcttttagtttattttttctaaattctataactataacttttcagaatctagataaaaaatagacagtttgaaagagtttctgatttttgaagaaactacggcggctagaagcctaagatactcttaaaaaaaccccgcaataaaaaaaagatactcttaaaaaattactacatccgtcctaaaatatagcaatttttggattgtccagattcatagctaaaaatgattatattttagaacagagggagtacttttgcattgttgaaagcagaaagctctcccaaacaggtcccataagctctctcaaacggttcaagttacttgcatcatttatttcacatgaaaagtctaatttggttaagaataaaaggtaattcacatgtacttcgacaaataaggttagactaactattggtaattcacatgtacttcacataatggattatttacgtcgaaggttagaatgggacctcgtatgtctattggtttcgacctaaggagaagcattatgtctcttggtttcgacttaattgtgtgatgtttattccgttgtcataagtatctgtactagttctaagaagaacctttggctctggcctaattcaataaatgttgtaggacactgaaatacaatatgtactgatttctttccctttatatttccaaatggttggattagcttctcctgccaacattctgattagcaaggctctcagcctgtcaaacacatgtagccatccaccaaacagtttcctgtcctctcagctgtttaattagctaacaacactgtactcagtttggtcgaacgtcgcacagatttcgggtggtggtaatctggtatgtttgacgaatggttccctaatgactaatgctcctaactaatcaattcactaccgacattttgcagtaaatctattaaaacaacaactaacatgatgtgaaaactacaatatattctttgcttacaaaccttcggttcacactaccgaattttgatttctcctctttttttttattagaccctcgtttgtcaatagcaaaacatcatgccaactaatgagtgataataagtgtagacaatttgtacaactggccaccttaaacaatgtttagtagggacgaaaacgtggagtgtgtgtaactcaattggttagtccacttgcggtggaaacagtctatccatatgagttatagacttaacacaggtgttcgtatttacgattaattattcttttagtggtaggtgatgcacctgtcgataacaatgtgtctatagtgactccttcaatctcaagatataccagcttagttttatgaaggtgtcataggagaagggtgtaagtatgcgcatttataacagcgagtgtgcaaacattgtgagctcttggatttataccgtgttctcaaagaaaaagatagggataaaaagggtgatagaaatttccgaccaactgagcatagtttttttgtaaaaactgataccaaccgtttttattctaaccccatatatttgttttttttgtttcttttatcatcatattgtaatcatcactggttttcgtgaagatgctaccgttttcgaacatttttcatacctacttgtaaccgttaaaaaggtccctcttcatctgtagcaaaggtgcattcctgttacaacttacgacttgacactgccagtgattaattaaagctcacagtgaagtgttgggtagtgcagagagcgagtgagagagtagaagcacgtcaataatcgggtggaagagggtcacaatcggtgttgatcaatgaagccatcagcgtcttcttccaacagttgctccgctcccacatttatcatcttaaccccaaaagctcactcactcactgcagctgtactgccacacccccacctcactgcggactagcagcagcagcaagagagagagagagagtgggagagtggggagaagctaagaagaaatcaagaatttcaatctttgccgacaccacactggatttccttcctcaagcaaccatggcagcagcagcagcagcatcagcatccatcgagagcatatattagctatccgtggtgatcatgtgatgccaagattgctactataagcaaggagatagcgagggagatattcttctctttctttttcaggtgggggagaaggtgaaggtaggaaggagggagagaggccaagaatggcggccgccgctttggccggcgttctcctcctcgccctcgcggcggtggcgggagccgacaccgacggcggcgacggtaatatcaattgcagcattcaccccaagttcttggtttcttggaatgcgtgcgtactgtttgatgatatgtctgcacggatgatcagttgcttttggttcttgcagccgcggcgctggggaatctgtactcctcctggaatagcccggctcagctcaccggctggtcggccggcggcggcgacccttgcggtgccgcgtggatgggcgtctcctgcgttggctccgccgtcacctcgatgtaaataaaagatcttctgattaaactccccccaaaatgtttttgagtgatgaaaagatttcgcgtttgatgcctttcatgttcgtggaaagcaggagtcattttgctggttttcttttcactgcatttcgtaaaaaaagattgccgtggctttgtcttgacgtgtgggcattgaaagccgctgatgaaatcctgaagtgtgttggtttttcacattctctatctttcagtaaatttctgatagataattggaaattctcatcctttgcagtagttgattgattctactatcatgagataaaacgttgtccaaaaaattttcattggatgcctatgatattaagagatagaaagtttttttttcctccctgcatgatgtcaagtggtgttaatataattctactctactctctgcatcgattaatttgccagctcagagtttgggagactggatccagccatccaggcaaataatggtgctctgctggttttcagtgtctttttcagttgtaggaaaaagggctttttcgtatgcataaaaaaatatttgatatttgttctcgttcaaaatctgatgtctgggtaacatgcaacaagcagaatatatctattctggctaaaatatagattatacaaaagaggctggagagtgtatcttatctttaagaccataccttaattttgctattttcctctctttttttttttttgtatatgaaatcgcctcaaatggagatgctcgatgctgaaccattctgtttgttcccttgttctgcagcaagctttctggtatggggctgaatggcactcttggctaccaactatccaatctgctagcattgaagacaatgtatgagctactacttgagcacaagtatttattgtcttgttttcccctaatttatgtccttcatttcttaacttacagggacttgagtagcaacaacttgcatgattcaattccttatcagctgccaccaaatctcgcctatctgtaatgcttcctggcttgcacaagtttattcaagtagtttttgatgcctgcatcttcaataacagttgcgatgcaggaatttggcaggaaataacttttccggtaaccttccatactcgatatccaacatggtttcactcaactatctgtaagtgctggccattgcaaatgtgcaattcattaggtggagattgttattttggttgacatagtctaactgtaaaaaaacacatctacatgcagcaatctcagccacaacttactatttcaggaaattggtgaaatgtttggaaacctcactgcactttctgaactgtaagtcctacaggacctttctttgcaaggcttgttatctcgattgttgaaactcttggtttcatgacatgatcttgtacaatttgaaatctttacagagatgtatctttcaataacctgaatggcaacttgcctatttctttacgctctctgtcaaatatttctggcatgtaagttcttactaatcctcagttcaaacttccaaatttcgtatttcatttcatggttctgatagttcttttgacccattgtgtagttatctgcaaaataaccaactatcgggcacagtcaatgtactcagcaacctaagccttactacactgtgagtgattttgtaca

SEQ ID NO: 11489 - DNA, 9807 bp, Oryza sativa
ccgtccccgccgcggcgcacttcctcctcgcgttccgggcgtcccgcaggccgttctccgccgtcgtgcaggtctcgctatcggcggcgtccgcggcggggttcctctgcctctcctcctccttccgccgcatcggcctccgccgcctcctctacctcgacaagctccgcaccaagagcgaccgcgtcaggctcaactacaccgcgcgcctctccttctccttccgcctcctcgcctccctcgtcgcgccgtgcttcgccgcggaggccgcctacaaggtgtggtggtacgccacctccggcgaccgcgtccccttcttcggcaacgacgtgctcagcaacgcggtcgcctgctccgtcgagatggcggcgtggatgtaccgcagcgccatctacctcctcacctgcgtcctcttccgcctcatctgccaccttcaggggctccgcctcgaggacttcgccgggacgctgctcgtcgaggtggaggaagggagggccggcgtcgagcgcgtgctccgggagcacctcgacatccgcaagcagctcaaggtcatcagccaccgcttccgcaagttcatcgtcgcctccctcctcatcgccaccgccagccagttcgcctccctcctcctcaccacccgccacgactccgtcgacgatctcctcaacaccagcgagctcgcggtgagtccccgatcacggccaaattctttgatcagcaacactcgatttggttcccaaagttcgattccatcccatgtatagcaatcaatcatccccaatcatggacgaaacgaaacttccagacaatcttgtcttaatttacacggaaccaacatttcttgatgcttaaattaagcacaaattgacctgtaaagttacaactattaaacaatttgggtggacaccttgctaattcagtgctactacttgtactaactccgaaatggaaaatctccctgcattctgcgaattaaatccttgctcctaaaaagtaacaacgttttctggttcgattttgtgcagctgtgttcagtggtgctcatgtcagggctgatcataatcctgagcagcgcggcgaagatcacgcaccaggcgcaggcgctgaccgggcagacgacgaaatggcacgcctgctgtaccatcgagccggtgccggacgaggaggcggagcccgggtcgaaccacagctcgatgctcgaggtggagcccgtcagcgacagcgacggcgagtccagcgaggagaccggcgacgaggacctgctcgagaacaccaagatcatgctgccccaagcacacgtcatctccttccagaaaagacaggctctaggtaaataccgttacagcagtaacaatttcatgatccatccagttacttcgataataatcgttgatatgatagctaaggtggtgttcgaacatgagaaatgcatataaaacgagaaaaccattagcacataattaattgaattttcattattatgaacataaaaataaatttatttgttgtattttggagtaactcctatagagaaagttttcatatgaaacatattgtttagcagtttgaaaaacatgataatggaaaccaaggtaaaatttacattttaattagaaaagaattggacctaagtgaattgggaaattattttcatccctcgaggggatatctcatcgttgtttgcatgtcactcaaatggttatgaaaaaatttaaaaaagattgaggagacgtgttaacatatgatatatcactctacaaacatgtaagttcaaattcaacttctacatctcacaacgtaaaaagtgaattgtacattgttgcatcagcctaaacttttttggatgaatttatcggtgtatgcaacttgacaataatgaaataaaatgttcactcatgtttggtgcagtgacctatctggagaacaacagagcggggatcacggtgttcgggttcacgctggacaggtcctacctgcacacgatattcatgctcgagtggacgctcttcctgtggctgctgggcaagacgatcggtttctcgtgaaagcgaggtaaaaaaaaaagttttcctgcatacaacaagttcaggttgttctggaacacatgtatgtttggttggttggtgggttgcaattttgcggatgcgtggctgtgcagttggatcctcgtgagtggagtcatttttgggtgctcacgatagtagcgtgcgcatgtatgtgtatacgcatgtatgtgtatacgtacgtatgtattgatgtttgtataaaaactggtgttagcggtgtacagattttgagtccattgcttcgttcgcgctaacaccaccttagtaaatgagcgatatatgtagagcgttaggacttgtatgtacttttgctgctttagtttgcggttgtgcacgcgtgcggcttcctgttgctaacgtgcaggctttatcatccggttttgtaatttgtatagccgatgaaagttgcagagcaaattttatttacagttcagtttcaaatttcccatgttttggagaagaatttatcgttctgtatttctttttctttttgttgaattgagatgcgtcatacatgaatgtagcagattttttttttatgaaaggaaatgtacctttttattttattgtgatgtgagtgaactcagattaaacccacttaaggccttgtttggacggaccagtttaaggaaaaagtaaatcgaaggtccctgaacttgtcatcgagttaaaaaacatcctcaaactgtaaaaccagatatctgacgttccttaactaatcaaaaccggttacaatagatccctaagcggttttgatacaggttttgtcctgtgtggcggttgaatcagcgtggagcccacgtggaccccacatgtcagcatgccacgtcagcctcttctctatttcctctcttctctcacttcctcctctctctctctcactcctctgtggggctctggacggccggcggtggggaggaggtcgccggggcatggaggtccgacggccggccggcgatgagggggcggcgacccagaagggaagggcggcgggcggcgggagcacggaggagcaacaccagcgtcttgtgccgcgtccacaacggcgtgccagcgccggcggccggcgaggtcgcgttggcggtgccggacattgctgctgctgctgctgcctcccggaactcgatcgagacacatcaagggatccaccagctgggatttatctacagccatcgcagccattaaatcgggaatcaaagcttgcaaatttggcatccagcagaaacaggcaagaaattaatttcgtgctacaaatgccatctcgtcatactcatctcttcttatctcatccaactaagaggccatagaaaatcagtgtcattctactggcaaatcacaattaggcaaaaaaaatgcaagaagttaatctagtacagctaccgcagctcgcagaagggcaccggcgaggagctcgccggagcgccactgccgccgctttgcctcagggcccttatcaagggcttggtcgccgaccacggcgaggccgcgccggccgtgtacgcacacacggccaagctcggcctcgaccaccgcctcgccgtccgcgatgggctcgtcgagctctacctcgcgcgcgtcgagctcgcctccgcgtgggcgctcttcgacggattccccgccggctggccgggacgtcgtttcttgtacggccatggcggatgatagcggcgtgtgcatcgacaccgtcgccgccgccgcggcgttctcggcgtgcgcgcaaatcggggaccttgcgctgggtcgggagctttaggaggatgcccgtgaagaagaacgtcctcgtcccggccgccgccgccacgtcgcgccggccgtcggacctcctcgccccggcaacgaccaccccaccgccggccggcctgcccaatccagagagaagagtgggagagagagaagggaggaaaggagaggaagggagaggctggtcgctgacgtggcatcctgacgtatggggcccacatgggtcctacgctgactcagccgccacattagacaaaccggggtcaaatccgctgaggacctagtttacactgttttttaagttaggggatacgttgtatccagttttatggttgggggatgattttgtaactcgaggacaagttgagggaacttcggtgtactttttccccagtttaaacacatcaaagtagatggaccggaaaatttgacctaaaactaaaaggcttaaaatccatccacatccaagccatatgttaaagggggaatgttactgaagagcaattctacggttcttgatgaggtaacatgagataataaaaatttagtgtaaaatttgatacttaatggtatctcataatacctaggtatcaagaggtataaatttacaatataaaaagtagtaccttgtatattttctgaccgtaaaatagctcgttaatgaatggtgtcccgttcgaatagtacaataccatttggatatcacatcttatgtcacactggcacagactaatacccaacggtactagatttggtatctcatcgatacccgatgataccctacggaatcagacatgatacctaagcaccaacctagctaatacttgtatatgccgatagtccatcagacatcggtactagagagaaaacgaggccagaagtgaaagttgaaaaataatgatgtgctctaagtctaaagagcatagaagaacacataagaagctcattttaaattttttaaaaaactatcatagacgaacgtgttggttaattacaaaactatcgtgaagatggggctcatccatccaaccgtatccagtgttacggacaagaatgcggcgcatcgtctgcgagtggatccaagtgagcgaggggaggagtgactgagggatgaggatgtttcatgttaggcctctaaaatagtaaaagttttactgttttagagcactttttgttaaaataaatctaaacactagtagcaaaagttggcaatttgacatttgttatttgggagtcttatagagtagcaaattttgcaaaaaagtgcgttggaacttggaagccatgctttctctgtctttactagtaaaatggtaaagctttaccatgcatctaaataccatctagcaaaactttaataccaaatcttttaccaccaaaacttttaaaaaaaattaccacagcaaattgatctaaacggctcttagtgatgatatgagctcgtcggctccaattaggatcaggtccacctccatagagcacgacctcgtcggctgcaaaatgaacaagatagatggagttgtgtttagactgctccacaacttcactcaaatcccaactcttgaaactaaatttagaaggaataagtttattttagatcccttaacttgacaacgagttcaatttttgtcctgacacgaaataccaaaaacaatggatcattcaatcgtctaaaccgatgcaaataaggtcccaaggtggtttggatggtagttccgactgacgtaacgcctacgtgctggtttgacttggtccttattctacgtggtggtgacgtggcattagaaacaaaataaaaaataaaactaaaataaaaatatgggacccatgtgtcagtcagacaaaatataaaaaagaaatagtgggctatctccaaggacgtcggtgtgtcagtggctcagcgccgccttctcccctctctctcccagccatcctcatccctccgcaagtttcctcgccgatcggctaccgccgctgccaccttcctgcagccgccgcaatcaacaaccacggagaccaacagaagagaggacttttggagctctaccaaacgggtcctatatgggctaaatcaccagctattaccaagacatgggctgaaatgtggcccatgtaaaatgcggctcatagagtgcggacccacaaacctctgggcttctgcagagtaaagaccgaaatttctcaaggcaggcctaaccgtttcggcacaaaccttcttctccatgaatccctcccagtccaccaggagcccaaaataaaatccccaataaataggaataagttcatctaaggtctcttaacttgtcaaagaatccgattttcgtcatcaaccgcaaaaccaatacaacgggtccctcaactatcaaaacaggtgcaaactaggtcccttggcggtttcgatggcagttttggctcacgtggcgcatacgtggctaatttgactcagtatcgatctgacgtggcgcttacgtggcaatttgatccgaaaaataataaaattcggggactcacatgtcagtttcacagaaaaaataaaaaaaatggtgggacccacgtgggccccacatgtcaatctcaccctcccttcttcctcctctctctcctcgtctccttctcttcatctctatcccctttcctctctcttctctgtccagcaacaccaccaccgactccgccgccgctcccgccaccgccacatccctcgccgccgcttcgcctcctagctcccttcttgcctctcagcggtcgtctccgccgtgggaggccgtggcgggtggcagcgggagcgggaggccgtctccgccgcagccacctcgacaccgaggatctccgggcggcacgccggggctgcacggcctgcctatggagatgacgacgggggagatggaggccgccatcgtcgccctccctgcgaagaaggaggcgctgcgggaggccccttcctcttcccctcgccggttgccgctgcaggcgctgccgccgttgagccgactcgattaattatacttccattccaatattctatggaagcaagcttaatttgcaaaagtgaagtgaagctgagcatagcatagcagagcatccagctcgctcagatggccttgaggaggtcggcggcggcggcgatgtcctggccgtcagcaagggtgacgatgttgggggactctatggccacgacgtcctccgtggtaaacccgtcctcgtcgcagaggagctcttcgctgccggcggcgaccatccccggcaggatcaccgtcctgtgcagccccgggaggaggcgctccctgtcggtatcgcccttctcgccgacgagcaccgccaccttggataggtcgatgccccactgtatcgacaggtacctgaaagattaatgcgtcgaacggttagagacgacgagatggtgatgaggtggtggtggtggtggactggtggtgatggtggcgtcgctggcggcggcgtctcacctgatcgcgcatggccgggagagagggatgatgttgaggcacatgcacgcgcgcgtgtagacgaggtttctttggaagccgcgcatccgcagcacctgcttgatccaatcgatttcttcaagaagtgttgtcatcaaatggtgttcgtggcaacggtggtgctctgcttaacttggatgtgtccttggcgacgtaggcgtggcagtgcacggagcaggcggcggcgtcgacggcgaggtccgcctcctgtgcgccatcggccttcccgagcctcggcacggcggacctcacgtggtcctctccccccggagagacagagagaggatagagatgagaggggagaaagaggatgacatatggggcccacatgggtcccaccattattattattatttttgtgtgtgaaactgacatgtgggtcccactggttttattatttttctggagcaaattgccacgtaagcgcacgtcagatcgagaccgagtcaaattagccacataggcgccacgtcagccaaaaccgctataaaaactgccgagagacgtaatctgcaccggttttgatagttgagggatccgttgtatctggttttgcggttgaaggacgaaaatcggattcgttgacaagttaagggaccttagatgaacttattcccaataaatatcaacgcgcctttcggcccaaatcttcttctccaagacacagcgcgagccattatcttacgtcacggcccaaacgccgaggcggtggtggtcaagtcgcaagggggccgaaggggagaggaggatccaaaccccaaaccccccccgatccccacgacgcgccgccgccccgcaccgagatggccgccggggacgccgccagggcgccaccggccgcggaggcgcagtcgctggtggagtccttctgcggcgtcacctccgcgacgccccaggaggccgccttcttcctcgagagccacaactgggccctcgagtccgccgtccgctccttctacgactccgccgacggcgacgcctccgccgccgccgccgacgcggccgatccgcccccccgccagcccccgcctcccccgcccgccagcgatggcgccgactccgacgacgaggactacgtcgtcggcggcggcgacgaggatcaggacgacgaggactacgtcggggatggggatggggacggggagggggacgatgatgacgacgaggacgccgccctcgccgcggaggaggctgcggcgtcggacgagcggaggaggccgctgaagaggctgaagaggggccaaaacgcgcgtggcgggagcggcagcgggaaggggaatgtgcggacgctctccgatctcggcggtggcaaggacagcgcggggtccgaggactcggaggacgacgagtataagccgccgcaggaattatacaccggaggcgaaaagaggtgagctctactcgccttgtatcttagggttcttcgatttcatttctagctagattgttttttggatgaacgcatttgtagggttttaggttgttttgcttagggtttggctagaatttgtaagatacttgttggtttgcattgaacgaggtcaggggtgctggattggatgcaacaattgtcaaatgtgttcaaaatgatgggagctatcatgcttcctgagtatgaaccgtgctaagtctgcattatatgcctagatgttggccctttagagtacctgatttttccctattaataataatagccacagattgttgatccatgtaatccttgtgataataatagtctttgtgtagactaggatttatgatgttgtgttgcaacttatgcttggcagctctgcacttttagagacacatgagttggttgtgagtttagccacgtgtaaggttctgtgatgttcatttcatttctagctagattattttgggtgaacaaatttgtagggttttaggttgctttacttaggcctttgctaaattttgtaagattggcttgcccgctgaaggaggacaggggtgctggattggatgcaacaattatcaaatgtgttttaaatgattgaacctttcaatatggagagtgctaagtctgcattatatgcccagatgttggcccttgtagtccctgattttcccctttgcattattagccacaaattgttgatctatgttgcagtccttgtgataatgatatggtgtccttgtgtagaccaggatttatatgttatgttacaatttatgctttgcaagttggcatttctggagcacatgagttgattgtgaactgtgagagaagtggttcattaatgacctgtatcttgagtttgtagtttgtactcacatgtgttgaaaattttgagactatagctcattcaatgcagcatcaaaatgcagtgcttcaccttagctactagtataggatattcacatggcaaaggattagttaaatctgatggcatccaacttaaatgtgacaattgcagttttctggtttctagttgtagttccaaatcaaatcacgccttctcttgttactctctccattgggg

SEQ ID NO: 11490 - DNA, 5725 bp, Oryza sativa
aggactatatgagcactggtgctctaccaatccattggtcaaagttagagttgcaatatatatttcctgttcatagaatgctgcacctgtacttttaattcatacaataatctgaagcctcatcacttttttttattagctttagtatattcatgtacttggaagtactaaaagtttgtcccttgtcatttgccaagcagttctttccaaagatcctacatattgtaaaagtgctccaaggatctaccattgcttgggatagaagattttgagtatcttgggcattcagcattctgccctacgtcgccctgtcgatgcatggaacgatggagaagaggcaaagtctagtggccaactagaaaggtttccggtgaccaatgccagaaccttgggtttcacctccctttgatctaaagtatgccattggtaacccccacatgtaccttaaaccatattgatgcatcagactcccaggtgataataaactaaaaattacatgtggtgtggggtgaatcagacgccctcggtacacaagagcgtacccgtgtaccatgttctacccctgttgtcggtagcaccaagggaggcttcggctttgatgcacggtgaatgcattttccagtgaattggttgaaatttgatctattttcagagaacacattattcaagcatagactaacttgagggttcctcttttcaggtgtgatcacggcaggtgactcgtaaagcatgggcaggatgccagcttgagctttggtgctgctgctggagggcattggccctagaacccctgctcctggtgtgcggattcttgctgtacctggaatgtactaatctcagacagtcagctcggtcttccggattcaagctgtaccagctgcgtgcccgctcttgccttcacaactcacgttgcgcgaaaaggtttggagagctgaactgtttctcttgcgtctgtaagtctgttcacctgaagtctattagttcatatgcactagtcaaattggtagctgtttttaaacatcaaggtcatgaggtcgtttgaaaacataagcagatttgaacttcccactaatagaatttttgtatcgttatgatgcagttgtgtgtgttggatttcgatgctgaagatagcaagttggcaatttcatcgtcaacttgatgctgtttcacatgttttggtgcaaacagttgcgggctgtttcgcacaccacattcatgcgacacagtacaagcacagggtatgcgcccaaatgcccaatacaatctgggaattttgtcggtggattataactttctagtggcgaggacaatcgtacaaacatctgttgtctataatttttcacaatttatttacataatgttgtacacttgtgtagtactagcttggctactcgtcgctttctgttaacacgcttttcaaacggttaaatggtgcattttacatgaaaactttatatatataagttgtttaaaaaagtataataaatgtattcatcaaatttttatatattaatacttaatcctatgttaattaatcatgtttctcgttttacgtacggctaattagctgtttcaatcatctaaaaagaacgcagcctaaacgcccatgcgttgcaaccggaattaaaaaaagaaccttactgtacactttaaagcctcaaaaattaaagtaaaactattttcattgtaatatatatatcatcatttttatttcactttaaaataggtttttcttatttgatgacttgacactgggaagagacaaaagttcacctagctcattgtttggaggaccaacatgatagtggtggtggcagattcaccccctcaccactaccaatcaaggttgtcaggatcggaatactagatagtatcgttttgctcaaagtaatatcgtatcataggatcatatcgtagtatcgggatactataagattttctttttttaagtttaattaatatttatattaattatatatagccattctatataaaaaaacatagtaaagatatatgtcatgcaaatagagacatttatcaagagaaacctcgttggttttgatatatttaactgatttttatataaatttgagcatatttatttacattattttcaaaccatattattttatataatatttatagtatcgtagggatcgtagaatcgggatacacctaagattttgtaggatcgtgtagtaatgaatagtaggatcgggatactatgacaattaggatactaggtgggatcagtatcgttttggcttggtatgatcataatatcgtaagatactaagatacaaatcgggatactgataaccttgctaccaatagggtgttttaaagaggtgttggggaaattttggttcgtaacacagttgggacttcgaatttgtaaaataccataaaaacttccccgctttgctggatacgataagacatggtaatttctctagaaaaatatgtaccactatcgtctcaactcttagtctttcggcctactgaaaaaacggtaatttgttggtataatggtattattctgtgacttttagtcatatttaaatttaaatttgtagtaataggatgagttacatctcatattaggtttatttattttgaaatattttttcctatgcctataaagcttttagccttctagttcaatatataatccctttccagtctttctatctcaaacatcacaaagataaaaaccgagaaataccaagacgataataacaatcttcaaggctgtgtagtctacacgctgtgctgaaaaatcaggtaggagagcgtcttgtacgtgcgtgcggccgcgcgagtgtgcgtgcgacacgcgcgcgtcgcgcttttggacttcgatgaggaccacgcgacgcgacgggtccgtggcggtggcgaggccgtcgcgctgcggttcccgatttcgggggggacccagcgagctctcgctctctctcgcgcatgggacggggcgctgggcgaacgtgcgcagcggcctcgggctccggcgaccgcatcatttggtaggccggggagcacgagggccgcccccgcaccccggcgtgccatccaaccccgcgagcgcgacacattttctgccttgaatcaccttccaaagcactactactcctagtaacgaccctctcgcatatcgcactaccagtaccacatgtgttccctacacacgccaaagatgcaagtgacattgggcccttggaacatacaagttcacgactattctactgggaacaagactattttgtatttcgaatcgcatccctagctcaactgcaaaaccggatataacgcctctcctaacttcaaaaattggtgcaaatatactacaaaggcaggattgggcccggttatggctcacaagacatccgacgcggcgtattgattgggtcttcatcccatgtcagtgaaaagaataaaaaacggtaggccccacatgtcagggactatctccttcctctggcctctcccctctccttgttatctcaaggcggcaaccagcaaggagatgggcgacgacgtctcctctctatgagcagtgcaggcgggggtgcctcgtcgggaggcaacgacccgatctggagtagttcctgactgctcctacccccgttcccccgtgagctcgatgaggcccacaccgtctgctgcgcctgcaacctcaagctcgagatccatagtcgtcgtcgcatcttcgagctcaatgacaccgtcgatgcttgcgccgctcgagagggaggacacggcacaccacccacgccactcccttccatctttgttgcgggagcccaagctccatctacaccaccgcaaagctcgaaggccacgaggttgttgcagtcaccgctcgggtaagaggacaccacggccagcgtgaccccaagctctcctattctcttgctctagctcccctccatctctgttgcaggaacctgagctccgtctgtgccaccacgagctcgtcggccactgggctgctacggccaccgctcgggagagaggagaccacggccggcgggaccccgagctctctcgtcgcgaaagagggccaagcctagcggcgacagtcctcttgctccagttcctcgtcatctttgtcgtgggagcctgagcattgtctgtgccacgacaagctcatcagccactgggctgttatggccaccgctcgggagagagaagaccatgaccgacaggaccccaagctctcccgtcacgaaggagggccaagcctagcggcagtagtcctcttgctccagctccttgccatctccatcgcaggagcccaagctctgtctgcgtcaccgcgagctcgccgaccattaggctactgtggccactacaccaaccctcgacgtcgcctcaacgacctgtcgtctctctgtctcagtttctcttctagatctaatgccgtcgttgcctagggtttgttcggttgaccaaccggattcacctcctagcctcgcctccgaccttcgactccttccacatcatcgttgacttctgcatcccatcgttggccaccgggtccccgccactcctgatagcggcccagactcgtgccaattcaccacaactggtcatgtcctatggcctcttgcctccatggttgcatatgaggagagaggaagaggtggaggaaggataaaagaaatgtaactcgcatatgggcccactatatatattttgccatatttcactgacatttaaggtcatgcgctaactcagcgagtctaaccgcagtcaacctaccacgtcagcaggaactgctttccaaaccatcgaaggagcatatttgcaccggtttttgaaattgggagaggtgttaatatatagttttgtggttgagggatgcgattcgatcaagggttagagatgcaaaatagacttattccattctactgaatgcatacagccggccgtggcgagaggccttggtttgaacctgggctatcactataaatcacattcaggcctcaatcctcagctttgcccttttcccttcctagtttcctagtctaggcctcaatcatacggaacccggtctagcagtcctggaccctggtcagatttgggccgaaaaacagttataacagcaccacgagtgtatgaaaatgtattaaccgattaccatccattacccataactcacgagtgctaatggttactcacaaataagtactaatatttgcatatcctttcttactataaaattataacccactaattctaaaactcaacatgcaaacatgccacctcatcatccactaacaataattacatgcaaaactaatacaagcatgcaacatcatctataattcattgaatttacatatcaacatctaatcatcctccttcacattatttttcacagtatttttaacatgtatatatccaatatttttataatccttaacatatattcatgcatataatcaaagtgcgggatatcatgtatatttcatctacaatctcatacatagtctattaaatgtatttatctcagaacatagtctgtcaaactaattttatttgttgttaataactaatataatttttatttttatctcgattattaaaaatttttaaaagttacttaggaatttccgcagcaaagcgtggggaatcacatagttcaccagattgtaagtacttaacacggctacgcagaaactgaatagtattaaaagggcttcactgaagaaaggtgatg

SEQ ID NO: 11491 - DNA, 5306 bp, Oryza sativa
ggatttattgcgctagatgaatttggttgtaggtcagatgcaattaaatgcaaaaatttgtgccggatattaatacttgacttagcggcataataatcaaacatctaattgaatttttttctcaggcacaagtgacaaccaaacaagcacaggctcaggctgcctgaccaggcaacctacattataaacttgaatgctactcaagcttacaaatttctcaggcacggaggtgagggcaccaaccaaacaggctcctaatccccttgggctatttttaccgtggtttttgcacacgtggatgacatgtcggatgccacatcagcccttcgcctgagcttgatgaaattcaagttcatttgctagaacctgtctgagtgttgcttaaatcaatttaatacaaattttagacagatttcacagaaaatttacacatatcaaattcctgaacctgtctcaatgttgcttagaccagccaaatacatgttgacagacatatcaattgagtacacaacgaaagtttattgccatcacatacataacatagatatagattgcacccataaggatctaccattgtatctaaaaagttgaaggaaaccataagcagatttgtccactaagagtgtgtttggttcctggtcaagattggatgggatacggcggtccatattttgctggatatggcggtccagttttttgtttggttgtgtgaatatgacgatccaattttttgtttggttgtagggacaaaggtagatttggtgatccaattttttgtttggttggaggaagtatggtggatttgtaggtgtggtcacctctcacttgagatggtgaatataccccatcaaattaatacataatacacattccattataaatacacactccattataaatacatattccattataaatacacatagaaaaaataaaaaagaaaaagaaaaaagaaaaaaaaaagcagcgccggatctgggctcgccgacgccgttggcagcctcctcccgtcggcttcctcccgccgccggccacctcctcccaccgccgcggctcgcctcctcccgccgctgccttcctctctcgtcacccacgccggccgccgagctcgtcgcctctctcgccggccgccgagctcgtcgcccttctcgccggccgccgtgctcgtcgcctcgctcgcgtcgtggtggtgaggggtgacgcgagtcacgcaactcgcttgcccggctcgcccgagcctcgggcggttgcatccggccaaatcagccagatccctctatccagcatctagagggaatattcccctctgggccgccctatcccactctcgcccagcatccaaacaccctccaaaaagcggcggccatgtcctatctgggtatatcctaccaaccaaacacaccataagccacaatgcaactatcaacaatactaatccagcaataattgacaacagaaattcccttccctcttctaattcaatacattaagtttacaagctgaatcatctttctccttgagttttcttgtccaatcagccacatctctattgcacacaccattgtgcacaacctttagctcatctcttgcactgacaagacatgctctcatctctgagttctccttcaaaccatgaacaacattgtgcaaatcatttaacacctaccttaaataaggtgtagtttctggctcataccatctccagaatgcacagcaaccattccgctcaaatagaagaaaaatcgtacaatattatatccatttaaacaacaaatgcattatattaatattttaccaactcacgcgagctctcgcacatgtcagatacctcctagatggattattcccactcaagaaatccatctgaccgtcattgtacccacacttgcatagaatagccggagaataatcaaattgcccctccctttgtcgaattggaggtggattgctcccgccttgactggatttgctgtcatttccagaactagtcatgtccttcgatctgcttgttccaccggctgcagattccacctgctcatcgtcgcttcttccttgatcagccatctctatagcgtgtgtggcttccatcggcaaccgtcaccgctcgtgagaaggttaggccaaaacaacccagcaaatcctacgcgctgacgtagtgaagggctgatgtggcatttgacatgtcatccatgtgtgcaaaaaccacggtaaaaaacagctcgaagggttaagtgcccggtatcgacagttggaggatgaattatacccggttccgtagttcgtggttgcatttagataaccataaaagttcgagggtgtaaaatggacttctcccctgtaagcctaacccatacagaaagcttaattcaagcttcaaattaaaggggttaaagaatacaaaaccaaaaggagtttttctggcttttttgcaacctgatccagcgtaacacccgaaaaattgcctactcgtcgacggactctcacgacccgcgcgcgccacgcaagaatcaaagatccccctccagcttcaaacacgctagccgacgccgccgccgccgcggcgacggcgcgagcgacgcctcgtcgcccttggagaggcctcgacagcgcgcggcgcgggcgcgccacaagctccgctcggcttagccgtcgccgccgcgaagcgaaggccgggggccctcgccgcgctctcctcggcattccgcgcacgccacctgttcgacccaatgcgcagctagaccggctagagattaaggttgcgcgatcccatgtccttcctggcgcccggacgcggccgcctcctccgggtgctccccacaaggcggcaccgtcttccgcctccccaaggtacgccaccttctctcaccaacgcgtcggttccccgtcacggcctcacggggtaagaatgccactaacgatggtgttctgttgttgtttctgttcctggagggtcaggaggctacgcggcgtgcttccggcggtgcaaggcgcacttcttgctcgatggagtcgaggatgcggtggagggagccgccgagccgcagcagccaccggtgtcacttgcgaagagcctggcctctctcaccgaggagtcggccgtggccgctcagaggcagaggaagcccctgctgcggatggagcggaagaggctggctgagctcaggatcaagaagagggtcaaggcgcagtatttgaacggcaagtttcatgatctcatggctaacgtggtggctagcactgatactttggaggatgcttatgacattgttcggctcaattcaaatattgacatgtcatcggtgagggatgatgtttgctttgctacattggcggagctgctcaggactggtgagttcgatgtcagagcgaatgtttatgcggtggttgcaaagaggcgagatggagggaggcttgttctcccacggttgaacttgagaattattcaggaagcagtaagggtggtgcttgaggttgtttacagaccccatttctcaaagatatcacatggctgtcggagcggccgagggcatcagtcggctctgaggttcatttccaatgaaattgggattccagattggtgctttactatccccatgcataaagaagtagatagaaatgttctctctaagattatctgtctaatacaggaaaagatcgatgacaatcagttagttacattcatgcaacacatgtttgatgcagaggtgatcaatttggtatttggaggatttcctaaaggccatgggcttcctcaagaaggagtacttgcgccaatcctaatgaacatatacctcgacagttttgaccacgaggtgttcaggatttgcatgaggcatgaaggccttggttcagaggcagcagatgtttcagacaaccaggagtcaaatttgcgccactggtttcgaagtcaaatttcaggcttgaaggatagggaggaaaacagtgacaatcaaacagactatccactaaaaacaaaactatatgcttgtagatacatggacgagatctttgttgcagttgttggatccagagatattgcagaagatataaaatcggaaatgattacttacttaagaaaaacactattcttggaagttgatgacaggttgtatcttatgccggtcagaagtaattcccggggcttacagtttgctggctctatggtaagagttacaacaaaggaaagtgctgcactgaaagctgtgcataagctgaaggaaaaggttcatttatttgcttctcagaagcaagagatatgggatgctatgaatcttaggttaggaaagaagtggttggcatatggtttgagaagagtaaaggagtctgagatcaagtcacttggtcttagcacgcctttgttggatcacattgcacagtttaggaaagactgtatgaagacagatcattggttcaaaactttactcaaggtatggatgcaggatatcaatgctaaacgcgaagctgatgagagcatactcctgtcaaaatacattgctgaaccatcacttccgcaggacctcaaagacgcgttcaacaactttcagaagcaagccaaagattacatctcatcagaaactgctgccacagaagcattattgtccagcttaaagaataaagaatcagctattacctgcactgatggtgctgtcattaagatccatgctcctattagctatatccataagtgccttaatcgttatggtctaattaatcttgaaggtttccctaagcacgtttcagcccttgttttgcaagacgatgagctaatcataagttggtttgcaggaataattcaacgttggatgagatggttctcagaggttgacaattttaaagaacttaagcttatgttggttgaatgtgtcaggaaatcctgcatcaggacattatcggcaaagtaccgaatgtatgagaaaataacagaaaagcgatttgaacttgatgattatggtattccaatggccgaggactttgaggcaataatggcacctttagaatctagttcgtcggtttgcactgatgaagctctgatgtatggcatttctagtagtggattgtttgtgctcaccctctcaagagttagagttccttctcggcaatttgactgttttgtcatgggatgccaatctgcatcgctgagtatgtatgttcttcatgtcaaagagagacagcggtttccaggatttaggacaggtttctcatcatcaattcatggcagtttggatggtagacgggttgggttgtgcactcaacatgttaaggatttaaatctaggacacatctcccttcagtcgggctgcaggaat

SEQ ID NO: 11492 - DNA, 549 bp, Oryza sativa
caggcggaaacaccagtcggcagcggcggtcgaggcggccggtcggtgaagacgtagacgcccaacaacggcggcataaaggccagccgtgcaggcgaaaacaccagtcggcggcggcgaaggcaagccggtcggtgaagacgtagacgcccaacaacggcggcataaaggccagccgtgcaggcggaaacaccagtcggcggcggacgaggcgaccggtcggtgaagacgtaacgcccaacaacggcggcataaaggccagccgtgcaggcggaaacaccagtcggcagcggcgaaggcaagccgatcggtgaagacgtagacgcccaacaacagcggcataaagaccagccgtgcaggcgaaaacaccagtcggcggcggacgaggcggccggtcggtgaagacgtagacgcccaacaacggcggcataataggccagccgtgctggcggaaacaccagtcggcggcggcgaaggcaagccggtcggtgaagacgtagacacccaacaacggcggcataaaaggccagccttgcaggcggaaacacc

SEQ ID NO: 11493 - DNA, 1095 bp, Oryza sativa
ctgattatgatgttttggatgaagaatgactattgagtagctacgtgtatagtgtacacaaatatttttctaaaagaacaaaaaattatgtcatctgcagggtacagctgatgaagttgtcgactgttctcatgggagggcactgtgggaactctctaaaataaagtatgagcctctgtgggtcaaaggtggaaatcattgtaatctggaactatatccagaatacatcaagcacctaaaaaagtttgtcatggccattgagaaattaccacctacaaaagatgaatcctcagggagctcaggtccttcagatccttgtgaaataggatcagaaagtatgcagagctcaagaaaaacacggatgtaaaggataaatctaggtcaagcattgatcacaggcatagcgttgataggcgggaaaaaccaagaggaagcatagataggagagataaaagcagaaagagtatagatcatcctgataagccaagggctagtgtggatcaacctgatagaccacggagaagcatcgatcggtgtgtattcttatatgctctcgttttgttttcacggttctttgtggattcctgttaccagatgagatttgactgttgcaacccattgctgtgacagttttggagggatgatgaggtcggtgacatccgtcaagttgtgcaatattgactgtttcaaagtaacctatgcttctgggagctgagaatactgaaaggttagtgtttgtgagtcatctgtatttaccccgtttgcattctttgttcgtttgtggctggctgtggaatgtgtatttttttttcggaaatacgctgtggaaggtatattgatttgggtaaggccttgtcttctcttgagttgtttcttgaaaagaaatagccattctttcccaacccttttgagtttttggagtacattcttttgttgagttcaagaacgacactgccgtggagcactaaggagcaccgttcttacatagatgtcatgtacatattgttgtatcattatactgtccagtttttctttcacacgggaacatttcacagacgtgatctaacaaaactgggaatttttttgtccctctcg

SEQ ID NO: 11494 - DNA, 2723 bp, Oryza sativa
attcctgcagccctatatcctctctctctgtatatatatattccacttcgatatgatccatatgtcagtggcacagtaacccttatattctaatcctaactacacttatctgagaatgccacttatttatgataggaaagagttacagtaattttttcttttgaagcttaatccctcttttaatcaacatcattaaccttttaatgactaattatactatgccacccctctgctgccgttctcgccgtctcccttttcttctccgatcgccgcagcttccgcgaagaatccgccattaaaaaaaaaaacccgagctctcctcgccccggcgaacgcagcaccatctccagcgagcagcagcagcagcgcgctcttcctccctgcactgcccgtgcccggcggcgaggagggagggggggagggagggatgggggcggtggcgtcgacggtggcggcgcgcttcgccttcttcccgccggccccgccgtcgtacggcgtggagccgccgccgtcgccgtcgccggcggccgcggcggaggacggggcggtggtggagctcagcggggtgccgcggcgggccggggtggaggcgcggcggctgccgacggggcggggcacggaggtggtggccatgtacgtgcgccagcccggggcgcgcctcacgctgctctactcccacggcaacgccgccgacctcggccagatgtacgagctcttcgtcgagctcagctcccacctcaacgtcaacctcatggggtattacgccacgtcactctctctctctctctctctctctctctctctctctctctctctctctcggattggattgctttggaacgtgaccctcttctttatcatttgcgttatgatgcatactagttgcttaattcaggcgaaagtgtggatctctgaagtatagtttgtaggaagttcatgatcatttgattgtgcgtgtttaggatcttgtgatggatgggtagcaatgttttggtctccactactgttctcagttttgcatttcagtttaggagttatatttcaggtatagtgccattggccttattttagttcgagggaaaaatgtgttatgcggtgctctttactttttactaatttgatttgagtgcctggcgaatttgatggaatcatggaagatttcataatgttcaaggccgtgattgcgattggttttgtattcgcagaaggtggcgattgctactgttgctattcatagttgtctcgaagtgtattgggttatgaagtgtggtggaagattcatgtgttgttgcatcagtgggaatgtctgacacggcagttgttatccggctgtgtggctcaagaaaagtgaggctattgtggtgaataattgatagatttgattgaagttgatgattagtttatgtactaagctttagagctgactggaaagtttggaggttactgtgctgtcctagcaataggtggggatgtttgcgtcatatcactagtactaggctgttagtaccctgtgatctggtgttaaatggcaatgggtgttatggaactggtagattagatatttagatatagtggaacccaatgtagttgccacatttgataaaaataacacctcattggcttatatcaaaggattggtaagatgacgagttgtttttatattctgatattttttgagaattgtttattgatgtatgtgccttgtggtgtatttggtgatgtgcatatttgtatatgatttttattggacaccgatactgtataccattctgttttttttatacagaagttaatcgcctaaataaattaagtttaaattatggatcttatcgtattgcaagttgtgtgccaacgttggtcataaatcaggacattttaagactatttgcacccatttagagggagggtagaacatagtttgattcttaactcttctatttaccagtttttcgatagaaatacatgttctatgagagggttctttgatgaacgttctgttggcctgcttccattaaatctgttgccctttggctcttctcaattaaagtctgggtttttatttctggtttaggtgtagtagtgaataaaaaatactggaaatattgtctatagctcccttccatacttacattttaatacagtactaggtttttagtgaaggaagtaggcattgatcccatgactacgttcaatggataggctggcagatgatctgtttgttggatagtcattgggtggttacctggatctaacacagatacgttatagccaatttctgatcttatcatgttgatcgattgctgtgttctgcattcccattcaactactcatattggtcatttgtttttagtaatatgaaaagtttatcaccaagtttttttgttatcctggtagggacctggttgtggtctattatgcttttactttgacatgatggcaattacagtttgttgattttgatgatcattcagtatccgcatagcttgcttaaatcactgaatcatgattatgatataagcttcatttgatatttctctagtcatgattgtttcaatgtgataagcctcactgatatcttaacataaagtaacttcatatttatatttttacagttacgattattccggttatgggcaatcatcagggaaggtataaaatcatcctttcttaggaaagtgtttttccttccttttttacccatttcgttttccttttagtgaatt

SEQ ID NO: 11495 - DNA, 24218 bp, Oryza sativa
taaaagtttaagctaaaacatgactatatcacgcagcaagtcacctgcggccaccaacctctcggggcacgcttccacgacgcagcccggtgcatcttcacgtctgtgcagctgtatgagcgccgtggatgctgcttccggtggcaacagacacactctgaggttagagctagcagagttctgcatgattttctgtcagttcatcagttttagaaatggttttgggtagggttgtgaatagtgtatgtatatggcggtgatgcactgaggtttctcattgattttacttgcaatttgcagacacggacggcgaatttctacatctctgacaggaacactggaaagaggttctacgtgagagctggcgagggtggcaagatcacctggatgattaagcagaagacggacagcttagatggcgagaggaagggagcatcaaggaacctcaaaagctggatggcaagcaatgatttatcgtgtgatggcactgtgcatgtcaaagaagggtaaggtgctgatgctttagagaatgacaatgaaaaaaacccgtcaatttgaacatcataaacctattttataggttgaatttttgaaattttcaaataaaattctacaccatagtaaggttttatttacagtatgtagtttttgaaaattgaaaaatacctcaaacgtaaattaaatcattgtaatcaacatcaggatataaaatatatgatagtgacggtttgaactgaaaaaaaagagaagaatcataggtgactcgaacggtcgtggttaaaatacatgatagttacggttggaactgaaaaaacgaagaaaaaaatcataaggggtctatcaacggcggtggttagaggtatttctatattctatcaagaatttgtttgtttgatttccttaaatatctgagcatacaaatctcaacatgccattcatctccggtgttaacagattatctctatgtttgaaaacaactgatactattccatattatatataactcaacggtaaattactgactaaggtcgtgagatttcatccgcataacactattcctgtgctgcatgtaaagttcagatcacaaaaaagctgtgcccgcaaacttgcattgacatttgcatcacacaattttttcattggggatcacaacaaattcttcaggttcatcagggaaggggacactgctagtgtgattggagtcctgaagaagcaccacgcctacgacatcgtcgacgcgccgtccggcgtggtaaccaccggctgccagttcacgaggtgtatgtttccagtccacgtcgagggtctcatacttgtaggagacgaagacccagatgatgaagtttatatggtctgacgaactctgaacatacaaatattcctctgctgctttgcacaaatcgcatgcaaaaaactggactcccatggctccaacaacccactttgcatttcggttcacaatgtgatttggatcttgtgtggttgtgctatatactcttattcgtttttcagaggtttattgtagactgtagtgaatgaggatgttttagtacctcgaattttagttacagttgtgtaaattaaattgacacttacaggcttgccagttgccagtaggacaatttgaaacatgattttatttgataacttagtgaggagggacacaagaattgcagatattccatacaaaggtttacttttgagtagcatactcagaagtcatgtaacaattgagcatatttcactatccgattagacttaatttcatatagaaagcttcctgtttatgtttggagatggaagagggtttccgtaccatttgaaaaacagtgaacatgttataaatgttgcaaaaacaccaacaaagattacaaaattttactgttcgagaaatatatgttcctgtcaatcccattggtacctctagtaccctacaaaattctctagcagcggcacacctgggaattgggagagtttccctggaaactgatgcggcaatggttaaacaagtagtaatatctacagactacgatctcttcattcgcggtggcttggcccttgaacaactgttggtaacaaattttgtcaatattcaagttagacttatgcctagaatgtaacagagtagctcatgtgttagctcagcttgggactgtttgcctggctcagtctgaactagtactggttgatattccagatgatatctcggatcatgagtaatgaaatgtctaaaaaaactgcaaaataatactagtaataacagaatagcccaccaaacttctcttggagttttctctgcattcatttcactgccctgctgttgtaatgcattctagttggctactacatatcattacaggcttaatagttttatagacaatgataagctggaaaaagtatttggtaaaaatcacatcttgggtaaaacttttttataagttctaaaaaatctcaaaaaaaatcatacatgtaggtaatatgtaaataaataaccatacgaaactatttcacgactaaactcaacttcattaatgaagtatgaaattaattaataacactattcctgttgttgttttcttttttttttatgtttctcaattttatatctcacaaatgaagttgagtttaacctcgatactactatctgcagatattaccatatactatccaacacagatgttagaataggtgttgaatatactagttctattttggttatagttagacttggggttgtaataggtggtagggggtggagttagagttggactctgtaactcgacatctctcttaaatggagaggaggtggtgaccatggcgactacaatgtagcgtagacacgcagggagatgatggccgcgtggccattgatttgtagtggctaggagatatattgattggggaggagcgcccataatcaaagcctcggagatgtaggctttggctgaacttcgttaacaaatatcgtgtgttcctgtgtcgtcatccggtgtgtcttgggtgatcaatgactgaagcgatcaagaaggttagtcgtcgttttgctatatcgactaacttttataatgacagatggtcgcctgacgtgctcttactctacatgtgactttgttgacaaagagatggcaccgagtgtaagtgtcgtcatcctgcaggtcatagttagctaacttatctgtatgtgattgattatgcaggatatccgaagctgaatgcctaaaaattttccttgagagcatggaattattgttttagacataaggtttttaacgaggcaacaacatacaatgtatgagcgacactatgtacttttcctcctcgtctttttctcaactattgggttttggtaggagtttcgacgagtcattcgttgatcacggttagatcatggaagagtgctgtaaaacaaatctataggagatatgtttcttgtggtctcgtgggcatatccaaaacaaagtatagatagatttatcttctttcatataaacgtgtaggggtggggtgagacctgagacgtttgggtaattgtatccgagaccagatttaataaaaagatttcatcctaatgtgtccatcatctacttatgttagatggatattctcccccaggatggatattctcctctaatgttggggcaggatgcatattaatgttgtggagtgtaaaggattgatttattaattgtctaatagcccgcgaccggattatggaaatcatggaaaaaagtcacatcaacatcttcgagtgatacttgattagtaataaggataggggacaattccttctattgtgcaaaacttttatttgaattctcattatctggtacaaattctgtcacattatgcacaatagattctatgatcttttatttgtttgttaggtcgtttatggatactaatggtgttatttatggattatgtctgagtcggtaacgcgggagcacatcctgtttataaaagcaaatataaaattcattcatcaaaacctggttcctacaccatcaccattatttttagttagattttgcgatgggtaaagtaagtaaacatatatgttgctttgctcaaacatctcactttttttcctctaccatcattgcattaccatattctattcatctcagcaaccatgttgtttaatttatagtgctgatcaatcagcgagaggtcactcgtttggcatgatgcatacaaagcaataaatgagtatgatattgtaaggaaccgtgctttctttcttcttttaactcaattggttttgctcaatggtgtctgtctttcttcttttaactgccaaaccgtattagcaattggttttgctcaatggcgcctgagcagagtaggcaaatcatcgcagagctgtagagggaaggcggatagtaaaagccaccacatgtacaccggccatgtgattcctctcgcagcaccattctgtgcaccccattcgggcgattgatcgggtaggatatctaagttaaatacttttttttctatgggttctaccaacctacaaatgctggttagagaaaagtaaaatgtcttggaatttattttttagaacatgtgggaatttaatttgagaacctatatatataccacaatacacgttagcaaatatataccatttatttataatgtttatttttattaaacacaaaacaactttattggtgctataatatattacaaattatataaaaaatatatctaacatatccataatatcaaacaatcgatttacagggacaatcatgtatggaaataataatattggtgatatggaaaaaacacaaatatcattaacgcgggaaccatccgtaatatataacgactgcgctgtcgttattacaatatctaactacataaatctttgcgatcattaaattggtttcctcaaatatttcaaactcactagcttccataaagctattgtttctcgtgcatttatgaacttgtactaatttttcttggtatgatggttcctacgcttcgtttgattgacagtccacttaatatagcaaagcacggtctatgttaaagctggtaaagcatgaaggcaacgagcctgatactgtgttgagtcatgccgtttgccttttttgtcttgccaattcctcactgatgctgcatggtatgcgtggcatttgcgcgccaatgtgcaattgtagttgtagcatgggggacagacaggccacggcgtggtgaaagtggatctgcaacagttggctgcgccttgaaacagggctctctactttgggatgtgttcagttcatgccaaaaataaaagtttggttgaaattgaaacgatgtgacgaaaaagttaaaagtttgtgtgtgtagaaaagttttaatgtgataaaaaagttagaaatttgaaaaaaaagtttggaactaaactcggccttggtctagaaggagaaaccagagtccagagacaaggggcaacaaggggtacttcgtcttcgctttcagcacaatatatgcatgtttcagcacaatatatggcagaattgtcagtttagagagcaaataataaaattaaacaagacaagaaaccagaaggttggtcgtacctagcagtaggaatcggctccaaaaccagcaatatcgtttcctttatacttattacaagcgaaatgactttattaatgattaaaaataattcatggtaaaacttttaagcaagctctgaaaaatgaacaaaatactcagaatcaacttaaaattgagatttaaaattcaaattttcgcttatagttataagctgaaggttaaattaatgatgggtctgcatgtctccatcttaaatctccaaattcaaattcccgtacacgccatgtctaagaattttttttattttctgaacctttttaatttttaattttaaaactaaaccatttcaaaacatattttcaaaatctgaatcttttggccacgccagcccatctagcgtgacaaaacaacactagcacgccacctgcagcgggcgtgatagttttgtcctaccatgctagcgagcgtggccaaataacttgtcatgccaatgggagcggcctgacaatattattttgccacgccagcatggttggcatgatcaaaaggttcaaatcttgaaaataaattttagatgggtttatttttaaaattaaaaattaaaagattaaaaaataaaaaatattccctaagaatacgatattttctactatcattatttcaatggttacaataattagatataaatcgttggatgaagaatgatagtgaaggtcttgatcagtttatgctagtaatagagagtaccgtaaatacactctaggttaaaccatagaagacagcatggtttgataggttgatgagttataccttttgtcttatcaattgatttttcgaccgcatgctactagcaaatgtattttttggataatagcaactaataagcttcatactaatttattttctttacgtgatgcttatgttgcttctgctttagtgcatgttttttttatttcatctcatgaccctcatagagcttgcctagacgtgtatacagatgtagtttttttagtgcgtactactcctgtttttttagacgtaacaggagtagttggtaacttggtatgggatggtacaatattttatgagtgacacgggacggtaaataacttttttttaccataaagagtgagaaaagggggaaagacaggaaaacgtggaccggaggtggggactgggaacactatgtgaggcactgttttatggggcttttaactatttgccacttttagatttgacaaataattatttaccacccctatctcaatgacacgtgggttcacatgtgtctataacatgtgggtccagtggcaaaaaattaattaccacatctaaatgtggcaaatggttaaatatctcctgttttataaacaacggttggttactgtttcataaaataagtgtgatttaatgtcatcttaaattaaacttctctaacatagataagtttataaagaaatacattagcatctaaaaagaaataaatgcaccagcaaaatatatttcatggtggatttatgaacttatttgatgtttttggcgttgatgtacttttcaataaatttggtttaagctaaattatgaagtttaacttaggagttaggaccaaactaaagcatttacattatggaacaaagattatagttcaggcttcatgttttagaattttgcatagtagaaagtgagcatttaaatgaactgagtttggctaagctatagaagtcatgttgtattattgggtattaagaactcaacgaataatgcgaatgaaaatgttctggttttattaaaatttatgtattaatatgcgaaatcatctcatatatatagaatatgatagttattaacataaacacgctatacaaagaaggacgttacaaaaccatttatattatttttggagctattgatatccaataatatatcagggaagtagctcaaaaaaaattattgcgcgttagtacaagtatgcagtccttctgatatataagatgggactattcgatccagtggtctaactttacatgtaaacctataaacctttttctcctccataatcataggtagatgggacagtattttgtatatttcaataggtgttgtcaacaatcataaaatgtgaatcggttcccacaaatatctcatagtgtgcttggcttgttttgcaaactgtcatgcccaatccgactgtctatccacactcaccagattgatttatagtactgaacgagctttgtttgttatcccagattgatttatagtactgaacgagctttgtttgttacctgattgatttatatagtgctgaacgagctctgtttgttaaggtggtaaaaccatgagagaatatactggttcatagtcatgcactaattactcaatttgacggccaattgcgcatggataggcaacgaacgactaagagcaggtacaattgtgggtggtagatggtccatttttttatgagctggaggagagaggggaagacagagaggagaagcgggcaactaattagccgccaggctatacgctcggcctgaggtcacggggcccaccagcagagacgggttcaccatccgcgtcgtccaccaccgttgccatcgctctccattatattgccatcattgtctcgtgctccaccaagtcaccggcctcgtccgtcatcaccgccgcgcgcggccaacctcgttcgtcgtcgtcgccgccgccgccgccagccgcccgtcgcactccattgagtcgctgccctcgtccgtcactaccgctgccaccggcctactccgccatggccgccgtagcactccactgggtcgctgtcctcgtctgtcgccacctctgctgccctcgtccgcatggctgccgacaaactccaccctcatcctttgtcgccgccgccgcgccctcgtccaccatggccgtcgtcttcttcacactccgagtctccgtcctcgcccgccatagccgtcattgccgtcgtcatcacctacatcctccgtagccgccgctgcctagtcccttgctgttgccatcaccctcttccgccgccgccactgtgccctcgtccgccatggccgtcgtcttcatcgcgctacgggtcaccgccctcgtctgccatagccgtcgtcgctgtcgccgtcgcctacatcatccgtggccgctgccgcctagtcccttgccgtcaccatcactctcttccgccaccgctgcgttcctcgtccaccccggccgcctatgtccgcctcggccgtggccctcatccactgcggacgctgccggcgtgttcttccaccgcagcttgtccaccgcaggctgctgtcgtcctcttccaccgcatctgctgtccaccgccgcagctgccatcatcgttgttcactgcgtcctcttctgcatcaaaagagaagaggtgagaggaaggagagagagggaggagagagaggaagagacatagggagatggtggatcccataaaaaaataaaatatttttgttatagtattttctattgtatagacattagctgcaacgtttattataaatgacatggctattttttttaagccaacagttggctgtgttattgaccttgctctaattgatgggcacaaccggcgcagcagtcacgccacagcttttgccgactcaaagcagccgcacgcaacacgcagtctggtctcgcggttagctgccgtgttcgagactgactgcaggctcaagctggttccacttcccaactccctactcttatttttcgcacgtacgcttttcaaacttctaagcgaagcgtttttcaaaaaagttttctatacgaaagtttctataaaaaaatcatatttttctatttttttaaaaaatagtaaatatttaattaatcacatgttaatggatctttttgttttacgtgtgtacgggggaaccggctgaaacgaacacagcgtgttttcgtgaactccaaggcgcccagggaagggagtcgtggtggccttgtgggacgggcagtcggggatcggtggagcgactcgcgttttgacaacgcgtgatttcagtgggctggataatatcgggagtggatactaatccgaggatgttccctcatgtatttttttttcattttttttcaaatttgagataaatagttatgaagtagtagagttcagtgatatccattgatccttagaaaatcaaattcaaatttgacctatacatcgataaacaaaaataataaattcagatgtaaacagtatgctactatcatatgttgaatttaactattttatatcttgacgtatgagttaagtttagacttaagattttatagagttgtatagatatgttatatgagtgtatttttttagaattctttttatagctatttagatagtttttaatcaaacgagagaaaatgtccttaagtgataaaataatttctcgataatatcccatcacaggtgtcaagcaagctgctgcgtgggtgtaacgccccgattttcgttcgggattaaaaaaatcattaaataaatgcattttctagaaattaaataaaagttaaatcaatttaatcaagtaaaataatgggagaatttgaaattttcccttaaaaatcaatggccgggaatattttgtaatattctttgtgccctaatgtactctccggaattttccgtgaattttcggagctcgagaaatagttttaatagcacaaagatcattgcatcaattaaaataaaaagaaaacaaataaaaacctccctcctctctttgggcccctttcggcccaacccctcctttctctccctctcgggcccggccgccctccttttcccctcctcccttctctttgggccgtcggcccggcttgccccctcctcgcgcaagtccgcttcgcctccctcatcctccctcctctccccgagccgccgacaggtgggccccacctgtcggggtcacccccaacctccagcccgggccagcaaccgccatggccgcccgagccgtccaacgtcgccgccgtttccgcccacctcctccaccccgcgcgcgcgcgtttgtccgtgggacttcgccgcccacgtccgcgccgtttccccccactctccccgcaaaatccggccacgtcgccgcctcccgcgtctctctctcccccacgacgccgccccccttcccctcaaaatccgccgctccccggccctctcctcgcccctttgagctataaaatcaatccccgtgctccccttgtccgtttccccatttttcccgagcccggcatactctccctcgctctccccacgccgcacccacgcgctgccacactccggcgagctccggtcgccgtttcccgccgccacagccgtcgccgcgccgagccaccgccaccgccagcttcgccaccgcaaagggaagtccggccgcctcttatttccccctctccacccctcgagcaccactcccaccgcacacccgaggccgccgccccttttcaccgcctccagccgcgtcgcgccgccgcttcggtcgacgtcgactcgcgccgttgcctccctcagctccgccaggacgaggaggaccttggccgccgcccctcttcgccggaaacccaccggaacggggtatctctcggtcgccggtgagccccaccatttctctcctctctggcgtggtattctcgccgctccggtcgcctatttccctccctaaccgctccaataatttccctaggtcttgccggccctcggccgcggctccgccatggtcgggcgtcgtcggaccgccgttcccgtcgcctcccgtgtcggccgccaccatctctttccgccgccagccgcctccctgtggtcgtctcgccgtcgccgtcctcggtgagaatccccaccgtcccttctcctttttttttcctcctccgccgctccccgtgcccgctgccgcgatgcgccgctgtcgccggcggtcgtctggccgcacgccgtcgcgcgctatcgctcggccgagccggtttcatgccgtgcccgtgccctagccgcgccgcctcgtggccgtccgatcggcttcgggccgatctgggccatccacgtggtggacgcgcacccgaggccacgtgtggacttggtccaccatgcgccgcccctttgtgccgctgacgtgcggggcccgcctgtcggcgccggctgccccttgctgacgtcagcgagatccttttcctttgtaaaaataattaataattgcgcaataaatcgagtttaattatagaaattcatttaaatggctcaaaacttctaaaattcatatctaattcattcgaactccgaattgagccattcaacttgcaaaattcatctaaaattgagctctacatgtttgtttagtttttatgtactgtttccttggtttctattagagtttttcctcgttttgcgtgccagcgtgtagtttccgtcgtttcggaagtccgcggtcgcgaggaaaagagttcggaagatcaaagtggagaagcaaggcaagtcacacattccccttgagcatgttgatcctaatttacaaatgttttactgtttgcaaataaatatgcatgttttgctaattacacgggatcagggtttacctatctgctcgcttgtgccatgtttacttgatatctgtcctttgtcaaccttgggtgataaatcgactagcttgtgttacttatgtgacatagctagaactatatgcttagccatgcttaattaccactagctcagtcgatgggataattgcagtattagacattctagtatcttgttgagccgcgtgctcgagacatctggccatgttttatggtcgtaattatccaactaaaatgcgactgaatggtgggctgtgggtgcatggttttgtgagtcgcacccatggcaattaaggaccggttcacgggaaaccctggaagacttacagcgcttgccacaagcgggaatgggtaactgcttgatctgaagtatagctcgaccctttcctaggcaccggtggcgagggtgggcgtgatggagttgggtcggccggggtgtccggttgtccagctgccggattcaccgcggcgcaagaggggaccgcccactgccttttgaggggtgggggtgaaaccttagcgtggtgtggatggttaggggagggttatgtgaagggtctcgtcacaatcactcgacatggtgacgtgtgcatcatgggcacatgatgacgcggtgacatatcggtgggttgtgtcttgtgggtacagttgtgcacctctggccagagtaaaactattcgaatagccgtgcccgcggttatgggcgatcgaccagattcaccgtgattagtctcactcttaataaatcgacccaatgcactgtagttcaggtgggttggttgggcctgttcaacgtggtgtagcgttgatcagtggagattcaatattactttaattactcaaccgtttacggttttctcaataaaatgttttacaaccgcctttatgcaaatagccacaaaccgtccttgtgttccccttgcacgtctgcatcgttggtgtggcttgctgagtacggtggttgtactcagccttgctattattcccccttttcagaagtgtagtgcttctgagctgaagatggagttagaggaccaaggctcagaccccagttgagttttgcctgtggagtggagctgaagccccgctaggatcgcctttttccgccgctgctgttttcgtttcggtgcgaggactaagtgcctcttttgtaagtattttacgctttatttacgtttggaactgtatattacttgtcgttttgtgtaccctggctggtcctggacagggatttaatacacaaaatagtctggaaatttgggctaaatttctgggcgtgacagtgggtgactggcggacgggttgcaagcctgcaaatgtgtaaatgcgcgagtctaagatgggcgtcatgtaacaccagtgcatatgaagtactccctccgttccagctaactgtaattttgcacggttcatatttaacgtttgaccgttcgtcttatttaaattttttttattaatatttttattattattagataataaaacataaatattactttatatgtgactaactatttaaaaaaatttcataaaattttcaaataaaacgggcggtgaatgtagtagttgctaaatactaaccccgccaaaaaaaaaaatccccattcaacctttttggaattttctcaactcagccagccatagtacccgaaaaaagaagagcgaatgtactactagtagcatcctaccacaataaccctgcacacgaagaaaatggagagggaaaatgatagacaacaccgttcacaatcccagcctattaatgtgcacgatatacggacctagatcgatcaacgtcacatacatgagaggcgatttttttacatttttattaaaatatttagaaaataatttttcatttcaaaaatttattatctagacgcctcacgatctctagtgggatgtttttttttaaaaaatcgtccttccaagagcgtcaagggaccaatgtaataatttttatttgtatttaaatcattttcaccagttttaattcgacacttcaaataattttaaatggaaaaaatataaagtcttttatataaatcttatttctatctgatatcgtttgaaatgtggatctaagatttcgttaaaataggttctaatcttataacgaatgtttgaacatctaagcgatcttaaatgaaaaaattgttaactaaaagttgtcgttctcctcgagaattttcatataaagttgatttcatccaactttatatgatatattttttaatttctaaatcatagagttaacaatttatactaaaagaatatatttaagccccttaacatgctttggatgggcgttttaaaaaacgccctccaaaagagcgtgaggtatccagatttgcaaattgttgataaaaaaatatttttgtaaatgttataatgaaaaagtaaaaaaaaaacgagaatcgtcatcgtcctcagcctcttgtggttggttggaagtacacggacaaattttcagcataatcaaaacggaattttcagcttagaaagccggaaaacacacggcctagctagctagctaggcagcgaactgctgtggtgcaaagcaaatggtccctgtaatgcttacgccggccaccccgtgcggccgtgcccctggccgcctcccgtttccgttccacttgacgttctcgaactgcagtactgccccgtatatgaaccccggcgccgctgccgccgccgagctgttttgctcatagatctttttttcacgaacacatgaaaagaactgcacgttaatatattagaagaaaactgctcgtccatcacacatgcagacacagccgatggcctgcgtcggttcagcatgtcaccacggcaaacacgtaaaaggactgcatattaatatattataagtgaactgctcatcgatcacacatgcagacacagccgatggcctcagcatgtcaccacggcagcacgtaagtcatgactcataagtccaggcgtgtgcacaatactaagcacatgtctgtagtgaattatgctccattatagtgttgataatggagacaacaacataaccaaataaccaaatttaagtgggagtgaaaatgaagataagttgtgtgattatatatgaggaaaaagaaccttaagaaaacaatataggtatacatatgaaatcataaatactgctacggcaatcgcctccttacaacgaactactcctactcctcctcaaagtcagcatggatgcatgatcaatcttcacttcatcccgaacttctcttcctcaatgtcagcgtgatcaatcttcacttaatcttcacttgtgttgacgtttttccttatcttctcattttccctctatcatttaattcgtttttattgtcacagtttcttgataataaatttattatcacctggaagactaccccatacactattaccgttaataggtggaacactttctatccggtcttgaaacgagtgtatttcattaatcatttctttgtaaatacttaactatttaactatgattaggtaagtaaaaacttaaattggatttcaccagtatctcatatccagcctttattcctaagtggcatagcttatgcatagcatccactccacccgttcatctcactggtccatgatggatttatagtgttgaagaagatagagctcatcctctcgtaccatttttaaaccatccagtcaaataaaaggtgatagtcatgcgctcataccttccacctcgtcaattgggcaaatgcgcatgaatagccaacagataggctctttggtacttgggctgcaagcctgaaaatatgtactccccctatttcatattataagttatttggctttttttttttatcaaagttctttagatttgatcaaattcatagaaacaattaacaatatttataataacaaattaattttattaaatttaacattgaatatattttgataatatgttttctatatattgaaaatgttactatatttttctacaaacttaattaaatttaaataaatttaagaaaaaaatcaaacgacttgtactatggaacagaaggagtagctgtgatctggcttgcctgcaggctctgcttttgttcatgaaagtagagtaggggatgtgaatcacatcatagaccaacacgcttatattacacttaggctgtgtttagtttacaccaaaattgaaagtttggttgaaattaaaacgatgtgatggaaaagttggaagtatgtgtgtatagaaaagttttgatatgatagaaaagttgaaagtttgaagaaaaactttagaactaaacacagcgttatacggatagctcgcagcatgttctacgtgcatggctactgacaaagagacggcgctggaatgagttataccgaaggtgccaatggggtgggcagaaaaagaccgagatcgaaaagaccgaaactgataaatttggtccaggcagtgaaataccgaattttgttcggtcaattcacttagtctccttggttaaccgaattgacaaaaagaccaaattaacaaaaaaatatatctaaatgcaacctacaatccactaagtttaataggattaaactctaattttcacatccctacttcttctagtcatgcaacctaataagagtctttactcatacgtgcttacgaattttttttatgattattgtgttaaaaatttttattatttctttgcatatatgaaaattttgttaaatttcggtcagggtcaggactgagaccgaaaccgaatgtctgtcctaaaatttttggttgaaattcggtcttcatttttcattttttaaagactaaaatgaccgaaagatcaaagaccgagactgaaatttccagtcagaccaaatctccaccccgcgccatcatcatgcaggtcatagctagctcatacatactcttccgtacctaaatatatttgacgccattgacttttttaaacatgtttgaccgttcgtcttattcaaaaaattttgtgaaatatgtaaaactatatgtatacataaaagcatatttaacaataaatcaaatgataagaaaagaattaataattacttaaattttgtgaataagacgaacgctcaagcatgtttaaaaaagttaacggcgttaaatatttagagatgaagggagtatatacgtaggtgatttgtctgattaactgtggataactcgaagctaaattttcctttttttcgcgtccacatgttgagtgcaagattaaatatgggagagggaatgaatataactatattttttagcgctcacaggtctaatgtcatagggtttttggtacagtatatcttcagaagcaacatacagtactcctcttggagtggttagtattctatatagatttttgtagagtaccctaattattccatgaatatgagccattcatctggcttaatcccatggataatattcagttctactacacctggtaatttagcactagaagttgtggaggggcaaatttagaaagatgtattttgttttaattcctaatcttaatcgatccataacccatacacacgtacagatccaaaattttggctaatcgcttgattatgtgcggcttagtcggagagaataacatgttctaattattccatgcacgcacgtacgtataacctatctaagcgagataactgcgaggggatcaatgcaacggcgagccacacgagggaaggggaatagatagggagggggatagtgagtatgacaagtggttcatagttgttttttttttctagtcacttacatacgggcccacttctactttgtgattgggttgccatgtttagcaatagggttgaccaagttaataagctatatcagtgaaaattgctctcaaaaccgctgagggagtaaaattacaccggtctcaatagttagaaggccaatatatcttatattacggttaagggatacgaattagattggagtagtatttagggactcaaagagaacttattccttgcgagggatatatagcccagcaagggtggtacgcaggctgctgctgcgttggtgaccatggactgggtgacttctatctctttcttcaccaaaaggagaagagacacaagtgaaaactaaagaagcacacatgatagatcaataatgtactcacttatacatcccatgtaacatatatatgtgcatgcagttgctagataataacaattatatatatatatatatatatatatatatatatatatatatatatatatatatatatagctcccactcaaccttttgtaattttctcaagtcaaaaaccaatccagtgaaagaacatagaagaaagaccaacatcccaagaccaccacacagaaaaagaaaggggagataatgatcaagacctagctaggtcaaggtcacatacgttgatacatgtacaggatcggatcagagaaacatcgccgttcgtcctcattctcttgtggttggttggaagcacccgaacatctgcatgtttcagcacagcacaagcataattttcagcacagaaagccatagaacactcgggaagattagtcatgcctagctaatactctcttcattccaaaatatagcaattatagcagaattgaacatatcttaatattatgagactagacagtcatggtttgaaatttcggcccccaccgacaaggtcaaaatctccccgaaatttttggcttttgccaaacatttttaaatttggtaaaaatatgttaaaaaataaaaaaaatcgtccaaaaaattccgaaaattcagttctttcggtcaccagcggcaaaaacacaagtttcgaaattgcaaaccctgattacaatatattcaagagtaaaatgcaccagcggttcttaaacttgtcaggaggtttcacttaggtccacgaacttacaaagcgcacatcgaggtctctaaacttggtttattatatcatcctggtctaaacccgcgtttgaccgtggtcttgtttacgtggcatgccacgtgtacgatgacatggattctctgagattaaaaaatccctccctcctttttttttcttttatgaaaagacgatgacatggacgacgtgtacaaggcattttcgtcttttcgacaaggaagaaaagaaaaaaagaattaagaagggagaaaaaaataaaaaaattccatgtcatcatccacgtggcgtgcaagatcacggttaaacgcggctttggaccgggatgatacaataaaccaagtttagggatctcgatgtgcgctttacaagttcgtggacctaagtgaaacctcctgacaagtttaaggaccgccggtgcattttactctatattcaatctgatccttattgctatattttaggacggagaaaggcagtgacctgctgcaatgcaaacaacgtgtaccttggacatgagggagtgatcccgagagtgcctcatgttggcggcgcttatctcctgcggcggcgagcgcgggacgacgccggccgcgccggcgccccgggccgcggctcggctccgcttcacgttgtcgaacatcaccgtgaacccctgcgccgccgcctcgccgttctgctcgtcccacaccccgaacttgggcaccgccgatgccctctggcggccgtatatgttgtgctgcggcgaggcggacgcggaccgcgccttgggcgccacctgctggtggtggcggccgtggtggtgccgcctcgacgccgcgtgcatctgcggcgacggcgacggcgcgcggcgcccaccgccgccgcagttgtacccggcatggggtgggtggtgtccgtggccatggcggtggtcggagctgtggtgatcgtattggaaggggcttgggcttgggcggaactgcggcggcggcgcgaacttgctctggaagtcgcccgggtccgacgccacgctgccggagcgccggtggtgctggtgggagcccggcggctgctgatgatgcctctgcgattcgcggtggccgctcgacgtcgccggcctggaggacggcgcgccggcgaggttgtcggcggcgcggatcacgccggggttttcggcggggtcgttatggttgtacggatggcggagcggcggcgcggtggcgcccttgttctcgcggatcttgtcgaagtagagcgtgtacccgacattgtcggcctcccaggtgccgaacttgggcacgctgggccgtttctgcaagtgcacaaaatcacacactcatcagaccatgtcctcgtgggcatttaaaaaacgtgacaaaatcatatacaagaattatttttagataatgggaataattaatgttttacactctcggcttcagtcataatacacacaaacataaatttgttaaaaaaaagtgatgagataaattcctaactctctcttgttattagcaagaacttatttagaaaataattttctggttgatgtgatggtatatgatgtgatctattgtggtcactgagatggtgggagcaccctttgtttctcactttttctgtcttatttttgggtgatttctcacagtgttatgatatataataaggcaaagaacttattattttatacattaatcaatacagttttgaaaatattaatacaaaaataaccacaaatttctactgtaacatagagtatttgttaagatcctacaaaattgcacacagtactacctaaaactgatttacaagagaaatctacataaattattttgtgtatgcaatctaattatttaaaatactttgatgtataaggtcttgaaagtgtgacttgatttgtgtctatataaaatgacatgtagttacctgtaggttactttctccattacagtacgtgctagcaaatgtcaccaaaaattagcttaattacatggtcaatggcacatccattttctaaataaaggtaagtcaatagcagataatacataacttagacataaatgtttaactcccatgtcaggaacctaagatatacacgaccaaacaattaagttcagggggatatgatgcagtttactctttaaaaaatcaactggatttgtaaacaaatgcaaaattaaattattagcactgtattagtcataatctagctgttttgagattgacaaaaaaaaaatcatcacagtcaaatggggccaaacagcaaagtggcattcataaagaaaaatggaaaagcaaaatcaaagtgggtacgtgtcatgcatttcatgttttttttaaagaattgtcccatgtttatttttctaatctcagtgaaccaagagctgaagatcatcagatatggatactgtatttctggtcaactttgtatctgctatactattggattgctatatggctcctgtcagagtcgtgcgaaccgcctcctgtatttgaaagctacgtgcttccaagtagctataaattaaacaaaaccgcgtttcttttgcctttctaatcatactgtattctggatgtgtggtttgaatgggtaaacaagattaagaaaacagcaatataattaacttccaaccaagatgatcgctcggacagtacttatataaaaaggatatataatcttattgcggcgcgtcaagatattcaatgacgtactcgttctcatcaattaattaatgtattaatgtgtgcacagatcttcaaattgaagcaaattgatctatatgaacgcgtctcctagatcatcttcttaatcgtgcatgtcaacaacaagaagcttggagcgacaggaacctttctctaccatttcttcttgctctaattccgctagagatcaattcatttcagcgagatggtttaatttccggcatgcatatgtgctaactcgtcctctccgattcatgatcctatttgttgccaacgtaattaagcctagaaatgatctttatgaaggtaagtaattaattagcaacatgatcaacggcatgcttggtcgtcagagaaaacaggtgaaacaacagtttatgcatgcaaggaataacaaagcagaaagaacattgattaattaagcaaagcaagaagccagcaagaacacaattttgatatgcaagaattaaattagttgaagcagggcaattaattaagcaacgaagaattgaagcactcacggccatatatacgcctgaagagggttcgaccggaagacggcggcgacgacgacgacgacgaatcgatcgacggcggcgatcgacgacgacggcgagctctagctacttctctccccttccccttgagagaggagagagagaaagcagacaagcaggccaacctcaaacacgtaccgcccccaaaaaacgcctctctatatatgcaatatgcttgtgtttatcaggagcttaattatccagcctctcctaataaaagcaaattaatcgagcaaaatcaagctgcgaaatggtggcaccctagtacgttgagaagatggcgacaataactaagatcgagcagcaaagaaagctagctagcaaacggctggctttggctgaatatatataggaaaaagggagaaggaaacagcagaaaaacttcctacctactaccaaccgtgtccatcttgcagatatgtatgtagtcgtcgtctctttcgttgtttgacattgcctacactgacatcgtcttcagataatcgtaccggccccattgtttcgtttatcgggggaataagctaaataacatatatatttgcaaacaaaaattaatttgtgaaaaaaatatatacatgttcttaacgatttaaaagtagagactgaaaaataaacttcgatgaaaaaaaaaatcctaaaattaactttaaatttatagttgaaaatttaaatttcggctgataattaagtataagtataagcataagcgaaaatatgaggcgtagtcgtctttgcccgtacgtgcggatgtatgcgtgtgtggtgatctatttttaattggtcaatttgaacatgcacacggcatgcatggctggtgtgctaaagctgcaagtttcttatttaatttaatttgttgctactgatttgcctttgtctcagttaattgaaactctgatttaccagctggtgaatatatatattttcagatgctcgtatactaccagtctaccacagaaaggacatattcatatactagctactagatagtattagtaccttaatttggttgtgaattctgatgccatacacaacgacacgaccagtatttcctgtcaccttatgtatgaccatccaaaggctatatatatctctacttattatttttcagaccaagttcatcaataagaaaatctacatttcagttggacctactgcaacttctctgaaagagattaagacaacttcttttagctatatattattttgtaacataaaactcggatgcttctcttaatgtgttttgagtccagctagctagctatagctaggacgcacgcatgcaacaaatcaagttgccacaaagaccgcgttttttcttctcatagaaccacaaaatcaataataccattaaaagaacaacaaaatctataataagagtactctacacaccgcttttttcccccttaattaagtatgtatctcagagacgtttaatcaaatactacctccttgcacaaatgtatgggacgttggttagttcaattttgagctaaccaattcaaacaaaaaaaaaatggagggagtattaaagaagtgcgcaatatattagttcttgattctcacagcaagtaatcatgcatgtatgcataatgaaatagcattataccaggattagttatactatacgccttcacatgtttgaaattaaaacattcaatttcaatttattttcttcttacattcttatctaggtatccataatatgtttttcctctccaagatcatcttaattatatatagcagattaattagcagtatactgtttgacttcttatcttgtatataatatataaatatatactgaacattttccaaaactatacataatatatatataccgatgttctataacctcaataatccactgcatctgctagcactatttgattatatatgcacgggaatcatatggtcaatttatatatatgaacaaaccatgttc

SEQ ID NO: 11496 - DNA, 10920 bp, Oryza sativa
ggttaaagcaagttcgtgagggttcacagccttgaataataaatattgtgtagctctaggatcgtctttataaaataactttgggcaactaagtgacttttaaatgctgtttactgcaaaacctaacccctattattatccccttgtacccccctgcattaatcatgcatctgccggtgtggcttgctgagtactgtggttgtactcattcttgctcaatccttcccctcttcagtaagagaagctttggagaagatgtcttaggtggagtcctggcttataccccagttgagcgcctgtgaagatggagccgtaggcccgctagtccgctgctgtttatttttgattgtcaggccttaagtgcctttgtaataatgtaaatattatcgatataataaagatgtgtcttttatatcatgtttgtatggtgtaccccggcttttcctgggacggggattgatacactagcgttcgggaaaaggcaattttcccggtcgcgacaagctggtatcagagccatctcgactgtaggataagccaagtggataaaacctaaggacatattatataaataaaaactatttgcgaaagttcctttttttctccttcccttaatgctatttgcaaaaggtttactcccttcttccttcttcggatttcaattagtactagttggtcagctttgtgaagaagatgtcgtcagttgtttgccgaagctccggaagactgcaggatccgctagtgaagtgaaggaagcagtgaagccagctgtgaaggagtgaagatcttggagaacccgtcgcagaacctaagccaccctctagtgtttcgttagtcgtgtgctcctttgcttgtgtgtgtagcgcgtggtttgcgtcggtgggttgtgatgtaaccatgctaggttgtttgcttaatcaacttgcagaataagcctaacatacatcataacagcaaaagacttagatctgttaaggtcctatccttagtttctaatctgtctctcccctttgttttccctctctccctctccaaacctttgcaacagatggctgacaatgagaaaggcaataaggtcagaagtcaggacattggtacctcaagctcccgagtgaatgaagcaccagacaccagttgtgtgacactagtccaacacctgattaaccagaaccgattgcttatagagatactacagcagcaccagacgccaattctgaacttgagtcaaatacaacctcaagtacagttggaggcagtccaagcactcacaccacaagtcagcgcaccgccaacatcccagaaggcccctcatgccatgccacatgttgacccaaaagaagcaagtatcatctgttttatgtgtgatgagcaagggcactatgcaaggaactgtccccagcagaaaagaaaagcaccactgcgaaccgaagatgaagtccgtaagatgatcattaccagcacagaatggcctccaccaggaatgacaaaacatcagagaagaaattccttccgaggtgcacaatagttgacagagcatcttttagctaatggaggtagagtgtctgatagtgaagattcagatcaagtctcctcagatgatgaaaataaaatagaacttaaggcatgctctcgttgtggagaaatcggtcatgttgccagctcgtgtgcctttacatgcgttcgttgtgaggaagaccatccacccgataggtgccctatgagcaggatcacttgtttcttgtgtgaaggaactgatcatgtaccaaaagattgtcaactcagttttctgctgacgaagaagatggccgaccaacacgcccattctaatggagagaagcatcaaggaagcacaaatcctcgccaagattacagtttcagcctaactccagtgccaggacagaggaaacaaaatgagaaaagaaaatgccgagtccgggaagatatccgttgcttcaattgtcaaggaatgggtcatttcgccgacaagtgcccaaaaccgagaaacatagctgccggcacgtcagtccacgcaactccctgcaatcagcagcttgctcctcaacgaattgtcatccatgcatcccgaagcagtcctttagcccgcgttgcaacaactccaattccaatgagtgcactaccacaaggtgtcaatgctcaatttcacccccagccaccagctgacaagacagaggccagtatctgcgttgtacctttggaagttccaatacagcagctgagaaatcaagtacaagatgaagaacccgagtgtaagaaagttattgtttgttacaactgcagtgaagaagggcattactccaaaaactgtccccaaccaaggcaaaatcgacctccacattaccgccaatttacacgaagcagacattccaatcgtattgtggtcactggagcaaacgccgtacccgtaaggcctcgtgttaatcaggacccatagcagaaacaatgcaccaatgctcctcctgctgcacctgactcggcaataaatcttagcaaccattctctgcatcgacagcctcagcaaagaattgtcgtagatggaagaagttgtgtctctccccgacctactccaggccgagccaagggcaatcaacctccggagggcgataccaagcagaagaccgtcatccgcttcaaccagcaatcagaaggaagcttctcctgtgaatgatagcattatgcagtcctatcacatcatcacagaaccaatcgaggatgcagtcactggaacaatgccagctatatctctccagaatcaaaatgagcagccatgtttgtggttttcagtccgctacttatcatggtgtaatcgaaagtttgcagcaatcatgtaatacctaaatatattcatgtctataaacagtgagcttgctatgcttatggatgattcatgttgaggatacaatgtaccgatgttaagcaccgtccctttttgtttaaggcagtgcctcgtattcatgtaatgagggagaaatgtgtaatacagacaagttccatgaggattcgtttgaaagatgcggatatgtgatcatgtgtataattgttgactgacaaaggagacctagggtctcgtgtcagaggaactatattctaacctcgagttaataaccaacctgtggatggaaaagaaaaacaattaaactgtgttgggttaaaaagccaacgagacagtagttgaggataggagtttggatacgccttttacagatcaagataaggattgttggaggaaacccctaagggtacccgccatgcctctacattgataagttcggatatacctgcaaacagttacaaagatccaggagacatcaatatttgagaacataatagtcgatggttggtaattagtctatcaggtatcagaaaaggaacaaaggtgatatggcagaagaacaatttgaatgctccccacctcgaggaagcactaaagatgatcatcggcaattaaaccctagtggcgtagatacaaatagcaagcaatgtatttcccttaaggtttcactgaaaggcagcaagccaaaggacctcatcgtccccagaagcgtccgcaatccacattaaagaataccacctgttagagataagccgaaagatgattgaaaaaagagattggcaaagatgttctctagcataaaagaagtaggccgaaaggtgattgataaacagaaacatgctctgcatcgctcacggaagacccctgattgtaattgccccgcaacagtcaccttgtcattaagtaagcaagatgacctaggtaaaagtgtttctatgaaggcaaagagtgaaatcttccactcggtatcagatgctacacggagtgaaaaatgcatgcaccggttaccaggcaacgccatgtcctgggagatgatccaacgggaaagaactcatcaaggttaaaggtgtaaaggaatacgttgagtgctaactgatgacaacatgaagagaatagcggaaagtaaactgaatgtaaagaaagtgaatccgagttgcttgttcgtgagggctattcccagttatgaaccaagtgatatgttcgaagataatctacagaggtcagattaaaagcacatctaacaacgaagcctcagatttgacagggtaatgattagacaataacaaatccagcaataaagccattggagaagacgtcaaagtatgtcaagtgggataaattggttctcttgggaagcataacttatagttagagtggttgacccttgcatcgaatagcagaagtacctagcaccggagaccaggaaagctaatatgaggcagttggtggcaagttagaagtgaatgacaggcatgatattcttatgatgacaaacctggtaccctagtaatgacaagctagtgttgacgcatgacataaagtggtgacttgtatgaggttgactccgaagatatgaatcatgagaagttcgggaacggaagcatcattgaactaccgcaacctagtctgagtcagccaaaaggtgcaccctggtccaagtcaggtgaagagaagattccatccgcaacaggaggtcaagccaagcagttccgagtggtgaagttttgctggaagtttgtcaagacgcaacggaagaagacagacaagaagagaagaccgcccaacctaacttcttgctagcctcctcgaatctcggggacgagattcttgtaaggggggtggatttgtcacgtcctgataaattcatcccgaaataaaaatcatcttctaaaaggaataatagaattaattaaaattcgaaaagaaattggcaaacattaaaatacgtacaagaaaaattcaaatgtgacccggagaatttctgttaaattctccttggtctaaaaggagccctcaaattttagtggaattttcagagcacaaataataattgagaagaaataaacaaagttaaaaaggttttataaaaagaaaatctctaaaaagtctgtttccccccccttcccctcttgggccggctcggcccagtccctccctctctctctctcttcccccgcggcccatcggcctcccccgtgcgcgcgccgctgacaggcgggcccgcccgccactctcgctgacgggtggggcccacctgtcatcgccttcctcccgccgcgcccgccgctcgcccgtgccctagcgccgccgccgccccgaatcccgccgcctcccgccgtccccgcgcgccataatgagggggaaattattccccgcgattccctctcccatttcccccgttttcccctctctctctccctcggattcgtccggattcatcccgcaatcgtcgccggcgtcttcaatggcggccgagatctccgcgccggtttccttcctctccggccgcgctctccccctctcggcgctatatatttgctccccgtgcttcgctcttccgtttccgccgctcgccgctcgctctccccgtcggattcgtgctcgcgccgtcttcctctctctccgccgtcgccgacgagctccggttcgccgccgacgtcgctccgcgcttcctcccgactcggcgccacctccgtcggcttcgccgcgtcgccgccgaccccgtccgccccttcgcttcgcccgccgaccgccggagctccgtcgccctcgtcatcccgaaccgcgccgccgcgttcctccgctccgttcgtcgtctccgccgtcctcgtgtctcggggtgagccgtggaccgtcccattcgcttcccccttccctcctctctctcgggtgccgctccgccgcgccggtggtcgccggcggtgaccatcggggcgcgggcgcgtcccccccctcccgtcggccgtgccggcgaggccgccttcgggcgcgccctcgcggctgccaagtgggcccggccgtcagccgcccgcgcccgcgggtgcggctgacgcgagggacccacggcgccgaccgccgccagccgcgtgctcccggtccaccgtggaccgagaggctgacgcgtgggccccactcccgtggacccggtccgcgcgccctctccctcggctgacgcaataaatgagtttttttaattaaaatttaaatgaagaaattcgcaaatatccatttaaagagcatataaacttcaaatggccataacttggccatttgaactcggaattggaccgttcaagtctctaatttttccttaagaagtcaagaacccatttttgtgctttgttcctgcttgttgtgtggagtttagtagagtaaaagccttttcttttccgttggtcgtgtagacgctgcagcttcggaagatccgcccttcgtggaagttgaagccagcgtttgggaaagtgagcaaggcaagtcacatcatccttgagcatattgaatcccagtttataaaattattttgatttaaattattgcattatcgctttgtttaaattcccgcgttatcactgttttatttagccatgcctatttacctttgttatgacattattattgctattgttattattaccttgttcaccctagaataaacaaaaccccaactagtgggtactctattcctggttccactagtatgaatttaggtagatgcttcgctgattaattaggcaacattaggtggttttataactttagactttgggaattctcatatcatttggacactatggaattgttggattatggtggaattggacatacacctctcttcctctttcaaaacccctaaaacctgttttcggtggggtttgggtgcatgccagttgtgggaagtagcaccccggccactataaggattaagctcgggcctctgttgcaaagcactaccgtactaaccacatgtctaatgggtaaggcttaactcggtgctcagtctagtcctgaacaaaaggacacggatagagatggatgaagtcgttgcgacgatggatatctctgaggcaaatgaaggctacgcgagctgcggctcggtaatcgagatgtctaggcaaatgaagactacacgggtcggtgcccgttagtcgagatgccatggcactggactagtacgcgggtggtctcacccctatgtgtgtggcgcacccggtctagatcttgttgctaggggctcaaccctggcctgcctgtcccgggataccggccgtaggcagggttgggtcggtacttttgttcacggctaggatgggtgaagggttatgtcacatctttacgacgggttccaaggccatggaatgcggagtaaagatgtgtcttgtgggtaaagatgtacacctctgatcagagtaaatctatttgaatagccgagccctcggatatgggcaagccgagcaatgtaccaaagtcagtgttttaattcttaaaatttgctcaacaactaaaatatggaatggttggcctgggttggcttgggacgagctggaacccaggtcgggttgccagttcggtccgaatcatcgtaggccttgggttaaggcaggttcgtgagggttcacggccttgattaataatattgtgtagctctaggatcgtctttataaaataactttgggcaactaagtgacttttaaatgctgtttactgcaaaacctaacccctattattatccccttgtacccccctgcattaattatgcatctgccggtgtggcttgctgagtactgtggttgtactcattcttgctcaatccttcccctcttcagtaagagaagctttggagaagatgtcttaggtggagtcctggcttataccccagttgagcgcctgtgaagatggagccgtaggcccgctagtccgctgctgtttatttttgattgtcaggccttaagtgcctttgtaataatgtaaatattatcgatataataaagatgtgtcttttatatcatgtttgtatggtgtaccccggcttttcctgggacggggattgatacactagcgttcgggaaaaggcaattttcccggtcgcgacaggccccacctgtcagcggctgacagagagagaggagagcggcggctcggcggactgggccggctgggccgagggaaagagagaaaagggttttgggccggctttcggcccaaagccaaaagaagactttttaaaacctttttcaattaaattatttcttaaatgcaattccatttattaaaaatacttccttagctcaaataaatcccagaaaaatctaggaattatagaattaagcaaagtatttaatgaaattttatctggcccctttttatattgagatttaacaaattaaaattagatcttctcttataagcttttaaaatcatttctaataattccttttaaacaacaatttataatttaaggatttttaaacaagaaaagctcttaacaattataattagatcattaatgatcaaataattactgaactgttctttgtattattaagagttgagctctgaaaaatccgagaaaatttcagagagttgacttaatcatggagaatttaataaaaattaaatccatccatgctttatatttaggaaattttatttcccacattttacttcacttgtaaattaaagaacatttaatataaattctattaataatttattaaataatttataaatcctgaaacgaaaatcaggatgtgacacctcccgagcggcttcctcggcttggcgggcccgggcggcctcctcccgagcggtatcctcagcctggcgagcccgggcggcttcccgggcggcttcttcagcttcccgtaggcggtctgcggcctctcgccggtcagattcccgcctccgtgcctctgcggccgccggatcttcggcctcggactggccggacttgggatggtgggaggaacgcgatgggatatcactgaagcaaaaagaaaaaccagaaggcaaacaagatgggtaagagaaaacttgcttttgggatagaagaaaagacggtcgcaatgagcgtgggacgaacctgcgagggggtcggttaaatgaccaccttggaggggaaattaggtttccccgggatggttctgtctcccccatcttgcgcagccgcttcttcttgcgctccccctcgggctgcgatgttggcgcggccccctccgggcgcctgctgctggcacgcaccgccccgccccctcggggaggagatgggggaggtgttcctcccagtttcctcttcccccgggcgtcggtagggcggttgctccccgagcccccgacgcggggcccagaagcacgaccccctccgggggtagattgatccccccggcggctcccacctgcgccgtcatggcccttaggagcctgctcctctgaggccccgaccgccgtcataatggtcaagatggaggcacgatctgggtcgctgcagagggggagaataccgtgggggatgagggacgcctccacggagttgagatttagcacccgttggaccagtatcttgaagtcctcgggggcccaatcccatctgactccctggtgggtccgcatgtagtcttcggacccggtgtactcccaggcggcccgagcgcgccgctggagcggcgcaatccgacgacggaggtagtcgccgtacaccatggccccggtgagcccctgggatcgcaggcccgcgaggcggtcgaggacggcgtcatagccatcccccagatctaccggcgcccgccagctggaggcctgcgccgggggctggctcggaaggcggaggcgcgcttcgtcggcgaggggggtgtagaaccagtcgctcttccagtcatcccacttcttgcggaggacgcaggggatgtagcggttcaacaccggcccccgcggcaggaaatagcagccgccgaccaccgacggtggcgataccgactgcacggtaaagaaccaccggaacagccggagagatgggcgcaccccaatgaacatctcgcacaggtgtgcgaagatgcccaatgtcatcactgcgttgggggtaaggtgcgccatctggagatcgtagaactccaggacatccatgaagaaagaagaaaatggcggaaccagccctgccattgcgaaggggagaaagaagacggaccgccccgggtagtctggcgccgggcgtccctcacccagcattactatctcacgaccggtggcagattccggcatgaagcggcgcggcaacccggcctgcttctcgctcacaatgcgagaaggcggcagcacgctaccatcaagcagtgcggagccccgtgccatggcgccggacgaagagaagatgaagagcgagcgcgtgtggcgaaagaagggcgcagggaagaaggagttaggacgcaagcggcgaaggcaagggaaatgatggcgaaaggaaggagacaaatcccatcctccgtgcctttatacccttgccaacgctgtgcccggctcctcgtttctcgcgcccattatttcgccccctcgtttttcgcgcccacgcttccactaatcccattcgcccgcttgcggcgcgtgagatggatatgcagttgcggcagtcgagatagatcatatcgtgcgcgcgttaattacgctcgccaaccgaagcgacattaccgtatctccaggcgaggcaaatcggctcgcccagattcgtgcgccgctcaggtgatgtggcagtctcgaagagaccgcccattattgacagccaaattaccattaccaatatgcgtgatttgagaccgttgggtttctgcccaaccatggagaccggtcccacctgtcaccaagctttaggagtggcgtcacgcccgaccgcttcccttgagaagggcgatcgccctggcataacgccgggggctactgtcggtgatatgggaccgggagtatcgtgactagaggcttgaggcagacacaaccgcccacgtggcctggcaccttcggggacgtcgggcccgagggtgaggtgaccgccctcctcctgatttccccgagggggggtcgggtgactc

SEQ ID NO: 11497 - DNA, 2400 bp, Oryza sativa
ttatgcaaatagccacaaccgtcccttgtgttccccttgcacgtctgcatcgttggtgtggcttgctgagtacggtggttgtactcagccttgctattattcccccttttcagaagtgtagtgcttctgagctgaagatggagttagaggaccaaggctcagaccccagttgagttttgcctgtggagtggagctgaagccccgctaggatcgcctttttccgccgctgctgttttcgtttcggtgcgaggactaagtgcctcttttgtaagtattttacgctttatttacgtttggaactgtatattacttgtcgttttgtgtaccctggctggtcctggacagggatttaatacacaaaatagtctggaaatttgggctaaatttctgggcgtgacaaagtggtatcagagccaactcgactgtaggttgagccaaacggtcaaacactaaggacaagctttctgaaaaccctatttgaaaaatgtctcccctcgcccttcggcttttctttgccaaacggtttttcaaaattctcctccctgcccctccaattcctttagttgtcaaacctggaggacaaaccgccagcgtcatgcctgttcggaagtcaagtcaagcctcaagcttcgtgcagcaggagcaagaagttcagcccggagtcgtcgttgcgcgaagatcaagaagagttttcccgaagttcacctaaacctaatccttcccggaagagtagttcgttggattctagatcgtgtgttgtttgcttgtgtgtaggggtatggtttgcgtcattggtggggatgcgaccatactaggttgtttgcttaagcaacttgaacaataaaagtgtactcacaacagatcagtaggcaagtggtttagtaccttatctttagcgacccctctcttccacctctcttccgtcctggcagcagatggtcagtgttagagatagggtcaattaaagccacagatcaatggtttagttgaaagctaccaggtactcccaataccagaagaaccccagctcgtgatcagcttttggtatccaggatcagaagatgggtgtattgatgcaggagatgcaaagctcgatgcaaggtcgaatgtagcggaagcaactctagcagtagtgtgttgcagtcagagtcagtggatcagttcaaggcaacaagctaccagctgagtcggagcacctcgctctggtcagatcctggctagctgagatctaatgatggatgtgtcagatgttgataccgcaaccgtagagtccgaggcagcagatgcaacgacagtgtcaccgacaacaggtacaagctcggatgcaagcctagagtcagaatcagagttaatggcaaggcgtcagcgtcatcacatcaacagctgtatttgcaacacctcaactcctcaagttgtgtcagctccaatgtagagtcggtcagttcagttttgaggaatcaactatgcaactcgacaccgaagtcaggtcagaagaagaacagtcatgccagcagttggtacttatgggaaagttagtcaagggtcagtgtgttcatgagctaaatgagagtcacttttatgtggaatttcctatcatcaactaagggttaagttccaaatcttgtcgggatgaaagtgcatcgccattgcttcaatttgatggaccgatgaagttttagtcttcaaagtcagggcatctgtaaatccgagaaatgttggttatttttcaaggacaacagttcaaaggttctcagtcaggcgaaagtaagactacccacggtaaggggggggggggtaggtctctgagatgagttttggcttacctcgtcgccgtttcagtcgaaggatcgacgaggtgaaacaaagtggttagtagttaaaggagtcagttgcgagccactagcaaagttaccccaatctcaagtcaacaggttcgattcgaaggtacacccgtgaggccgggtcaacagttcagcttagagaagtagcatcgaggacggttgcagttcagacgaaagacaggtcaagcaggtttcctggaattacgtggcactcgagtcagaacccgttcaagcggacgtaggatcaatgagtttcaaaggtcagatgtaagtttcaggagcatccgtagttctggcctgggtcagttcaagcaaaacgagtcggtccagttttggcaaagcaaaggaacagaatggtcaatgccggtcagttcagtcgagcaggtttggaccattgaggaatcgttcagttgaatcagaaaggaacagtgcagtgtgcaaatcagtcagaccgcccgccagctccagctttctttccagccatcccagaatctcgggacgagattcctgtaaggggggtagatttgtaacgccccgattttcgttcgggattaaaaaa

SEQ ID NO: 11498 - DNA, 739 bp, Oryza sativa
atacagaatttgttgaagttcttgccttcaggtaaccgctggaccacctttcttatttttatttaattttatccatgtccaaagatctaaagaaactagtaaaagttatagttatgccaacttacctattagtatgtttttatgtggcacctagctggctagctttgttgtctcatttgcccataccagctactttccagataacaggaagacctgttaattaactccataacgtactgttagagagattacttaaggaaacaactggatatgttatgaattagtaatatccatcgacacccgtcttgcctgttttggtctcctcacctttgatggtgtttcacttagtatggtttcaacttccaactgccagtccattattttgcatttccattaactatgcagttttacaccattccttcattcttctaatttattgtaattatttcaattgtttttacctgtacagtttgagttaaatctctctcatatggatcaattaccaatgtgcaggcagagccacaaagctttttttgataaatcggatctgttttttgtttgcatattacggccactttcctttgatattaccaagcaagattcagaaatcgaggcagctcaggtatttggaacctctattctagcaccaaactgacctatcagagaagggtcatttgttgccagtttcttattcaacctttgaactactttcatgtaaatgccctgttaacatacttct

SEQ ID NO: 11499 - DNA, 572 bp, Oryza sativa
ggaaaacgatgatgtttatcagtagtggtagctgtctaaaccagacgtagaggtgagggcactagtcagcagtagacgtagacagcttgcgttgaagatgatgatgcctattagcggtgacggtgatgtagccagccgtgaagaagatagcatcagttggcgtcataacaggccagccgtgcaggcggtgacaccagtcggcggcggacgaggcggccggtcggtgaagacgtagacgcccaacaacggcggcataacaggccagccgtgcaggcggaaacaccagtcgacggcggtcgaggcggccggtcggtgaagacgtagacgcccaacaacggcggcataaaggccagcagtgcaggcggaaacaccagtcagcggcggacaaggcggccggtcagtgaagacgtagacgcccaacaacggcggcataataggccagccgtgcaggcggaaacaccagtcggcagcggcgaaagcaagccggtcagtgaagacgtagacgcccaacaacgggggcataataggccagcccgtgcaggcggaaacaccagtcggcagcggggaaggcc

SEQ ID NO: 11500 - DNA, 1129 bp, Oryza sativa
gccgtgtatttggcctcctttccggccagagccaactcggcctgctgtttgttgccccagaggaggacaacatggagacgatcgtcgcgcaggatgcgcttgtaatcacgtggaactcgtcgccagacaccgcagatcttgcccgtggcattctgatagacactgagagtgcccgccaaggtggtctccagttgatgctcctccaggattacacccgcatcatcaacgaattgaatggcacgcggacgaccgattcgcgatgaggtgtagaaggagtagtatagattcttcttgtggaacaggaaacgggcggtggccaccacattctgcggattgtaggtggtgtacatggacttcatttcctcacccttgaggaaataggaggtgcggcccgttagcaacgcagcgtaatctataaatagggatcaaatgaaaggtggagataatccaggtgttagataaatacaatagttctcttgttaattaaatgtaggagctggtgaatgggattacaatttcccgcaggatttggcggattctattgggatctgggtgggtgtccggtacttttgtacttacgtttcatgttgcgctcttcctcttcattgggcacgggcacatccaaggctacatccgtatctgaaagatggagggaatacaaatagagaataagatgatgctgggcgataaggtacgaccttaaatggaatttagatagcaacaaatgcttcaaagcaaccgaaccgccgccagccattcaccatccatccagccagccatccagccagccatccagccagccaaccaactatccatccacaatttgtggacacaattccggcattcaaccaaaattccagttgaatgggtgaatggtgaatggctgaatggacgaatgccaggggatcatcatgaatggcaatgcaactatcaggtagagatcccacctccgactaagaccttccatttccacctctcgcttccacccaggtggcattcattaatcgtgcataaattgagggcaggtagaaggtagagtttctcgaacgggaagtctaacctacatctaactagggaagtgctttgtatttgaggatgtgcggactctggggttctgaattcatgggta

SEQ ID NO: 11501 - DNA, 3069 bp, Oryza sativa
ctccaacatttccatacgggtttggataaggagtctgcattctatttggacatagccgctggaggatcattcatgcacaaatgccgtcagaaggaagaataattttggatcgcgtcctagaaaatacttccttcatgacgcaacccaataaaccccagccggaggtatcgtgtccaagattgaggaacctctaacgatcgagccactcgctgaaccatccacttatgctagctcgattgatgagaaggttcctgagcagccgtccgtcgagaatgaagaaattcagactccggattgtgccgcaattctgctcagggactgttttgatgaagactacggcaataccctgaactattttagcaagaggaaaccacccattcctttgtcacctcccgatcctatggaactcgggctcctacgagaaactgtccgggagttgacatccataatgagcgatgaatggctaagggaggcagagctttcatccgaagtaattcggataaataccgctccccgaatcattccttgccatctggaagggaacaacatcggtattctctacagtccaactatcggggccaatctcgtttcggaatcttttgcattcgcttagttaagtggtaaggcagtgaccctgacaaacaaattttttaagcatccaaacggaaatatcattgaaggatttgggattgtacaagatgtgcctatctgctttgaagacagggaggcgatcttggatttccacatctttgaaatccaagactttgatatcctaattggggtacccattgagcaacttctcatcaacacaccctgattagatagcctcaaaataacactgggagggaatgaattctcaattccattctcgcgggcaaggatcaccttgacagaccctctcctcgaaattaagtcagcggaagaggttaccgcagttcctcctcatgagtctcccgaagcccttctggaagatgaggtcccccgacttcatcaaggaagaagtagatcccggtgagactctcgacctgccaatcatggaaccaccacctcgacctccgcttgagcttaaacttctacctccaggcctacgatatgccttcctatacaatgacggagaggcccctgtcataattagtgacaagctctctgaagacgagactcaacgtcttctcaccgtgttagagaagcatcgttctgttcttggctactctctccaagatcttagggggattaatctcgcgctttgcacccatcgtattcctattgaccctgagagtactccctccagggaacctcaatgacggctcaataaagcaatgcgagaggttgtaaagaaagaggtcttgaaactcctccatgccgggattatttatcccgtaccatacagtgagtgggttagcccagtctaggttgtgccaaagaagggaggaatgacggtcgttgcaaatgctcaaaatgaactaattccgcaacgaaccgtaaccgaatggaggatgtgcatcgtttacacgaaacttaacaaggctaaaaaaaggatcatttcccgctacccttcattgatgaaatgttggaacggctggcaaatcattcctttttctgtttccttgataggtattctggatatcatcaaattcctatccatccggaggaccaaagttagactacattcacatgtccatacggcacctatgcaacgctcctgcatctttccaaagatgtatgatgtctattttctcagacatgatcgaagacatcatggaagtcttcatggatgacttctcagtttatggaaagactttcggtcattgtttgcagaatctagacaaagtcttacaacgatgccaagaaaatgacctggtgcttaattgggaaaagtgccatttcatggtccgtgaagggatagttcttggtcatcgggtgtccgaacgatgaatcgaagttgatcgtgctaaaattgatgttatagatcagcttcctcctcccttgaacatcaaaggaatccacagtttcttgggacatgtcggcttttatagaaggttcatcgaggacttttctacaatcacccgacctctgaccaatctgctcaccaaggatgtgccctttgagttcgatgacgctgtttacacccaaatttagcacctatggacgaaacaggggaaaattgccaaagtttggaaagtgacgggtttccttttcacagagccggtcagaccacaggtgtgtgggtggtctgaccggctagtagggccggtctgaccgcaggtatgtgggcggttagaccgtcagggtccgagtccgagtctgttttcgtcgggtctcgggttttcttgctcgggaaggcatgtttcgtgtttcctttggtttttatcccgagttggacatggagaagggcctgtagagggcaagaccaacccctatttaagagacaaggcaggttcattgtaaaacccccgaatacaatttactttaattgttattttaccatgtttttctattttaccctagtttagtccatctttgtcggtttgcaccctaaactgtccgtcatcgctgcgagagtgcgacacctctttgtaggtttgtcctgaaaaccttccgtttttcccatgagacgggtagttatcctcatatcgatctaaatcggcctagaggctgattttgatctctaaatcggctccgctagctggtttagttgcttttctacaaaacccatcttgatttggccctttggttagattaaggtggttggcaactctatatcaccgtaaggcgtttaggtgttgcgatcgtgcttgtcgacttgtcaaaaaagttgccaacagacgcgtgcctaaaatcttttgaaattctcaaaaaggcactcgtcgctgctcaaaccattcaatcccctgattggactctgcccttcgagattatgtgtgatgcaagtgactttgctgttggagcggtcttgggctaaaccaaagataaaaaacatcatgcaatctgttacgctagcaaaactctaaccggagctcagttgaattatacaactactgaaaaagagctgctcgcggttgtttttgctat

SEQ ID NO: 11502 - DNA, 1704 bp, Oryza sativa
tcatagaacgatgccatgcctcaccctatggtggccattatggtgcattccgcacccaggccaagatttggcaaagtggtttcttctggccaacaatgtacgaagattcaaaagaatttgccagaagatgcacaagctaccagaggcaaggaggaatcactgctcgcgatgcaatgccccttacatacaatttgcaagtcgagatattcgatgtttggggtatagacttcataggacctttccctaagtctcgcaactgcgagtacattctagtggcagtcgactatgtctccaagtgggatgaggctatgccgtgcagcgcatgcggatgcgaggcatgccaagaagatgttcacagaaatcatcttcccaagatttggtacccccaggatggtcataagtgacggaggctctcacttcattgacaaaaccttctgagacctcctacgagagatgggagccaaacacaatgtggccactccttaccatccacagaccagcggtcaagcagaaacatcaaactaacaaattaagaatattctgcaaaagacagtcaacaaaatgggaacaagatggaaggatagattgccggacgcacgtgggcataccggacagcatacaagacacccattggaatgtccccatatcagatagtctacgggaagtcatgtcgactactcgtagaacttgagcacagagcatactgggccatcaggaattggaacatggattttgagggagcaggagaatggagaaaaatgcagattgctgaacttgaggaatggagagaaagggcttaccacaacgtgaggatatgtaaagaaaggaagaagcgttggcatgacaaaaggataaaaatcaagaaattcaagccaggagacaaagtactgatgttcaactccagggttaagcttttcggccacagaaaattatgcagtaaatgggaaggaccgttcgacgtcatcgacacctcttcgcacggggcaatcacactccgtgacaaattagttaacatatttaaggtaaacggtcaacacctaaagattttccttgagctaaatgaaactttagatgaagtggatgtcattgaattaatcgattatgaaccatgatgatcttatctaatgcatgcttaaaactctgtatagttgtcgtttttgtgcttagaataggttttagtgggcctaggaaaaatttggtggcctgccggacccaccagggttcagccgaaccaaaaccagggcgcgcccgttcagccccatttttgaacagtagtctcccccactcgtcttgagtctgtttagatgcgagttcggaggtagatcagtcgtaccagaacaagagcccctgttcttcctcctatctcccacattttgcaacccttctctccatctcaacccaattcccttgctccatcatctccaattcaccaatggctggcaaatccttgattccattcgtcggcacttcatccaattccacatacaacctcaccggagagccgacaccggtaaaccaattgattccgatcgaataatacacgatggaaggggtgaacactgtatgggctcaaccccttgcagctgtcccaggctcccctgcaattttggagccaatcgacgagctccctggttcggccgaacccttctcggccccattcggccccccggggggcagtaaaaaaggctgcaggaattcgatcag

SEQ ID NO: 11503 - DNA, 851 bp, Oryza sativa
gtctgttcagatggtctactacgaagatgcgttccggtagatgaaggcatgaagatcattgagaagtgtcatgctgccccatatggaggtcactatggagcattcaggacacacgcaaagatctgggagagtggattcctttggccatcaatgtatgatgacacaaaggaattcgttcgaagatgcactagatgccagaagcatggagggatcactgctcgagatgcgatgccactgacatacaatcttcaagtcaagctatttgatgtatggggcatcgacttcatgggacctttcccaaagtccgatgactgcgagtatatcctggtggccgttgactatgtgtcgaagtgggtagagacaatgccatgcagggccacagacgccaagcacgcccgccggatgtttcatgagattatcttcccttgttttggaactccacggatggtgataagtgacggagggtctcatttcatcgataagaccttccgaaattttttgcaagagctcggagctcagcacaacattgccactccgtatcatccccagacaagtggacaagcagaaacgagcaacaaacaaatcaagaacattctgtagaaaactgtcaatgagatggggaagacatggaagaacaagctacctgatgcattttgggcatataggactgcttataagacgcccatcagcatgtcaccacaccaacctgtctacgagaagacttgtcaccttccagtcgagttggaacacagggcgcactgggctatccggacatgaaacatggatttgaagggagccggatagcacaggaagatgtagctctctgagctggaggaatggagggacaaggc

SEQ ID NO: 11504 - DNA, 1068 bp, Oryza sativa
aaaaggtatccctttctgtggaggaatcaaaactggaggataggtaagatattccttaatactatccaaagccttatgttgctctaccccccaagtaaacttttgatcggccttcaatcataacaatggtgtaaaaggctttaaccttccaaacaaattagaaataaaccttctaacaaaatttatcttgccgatcatctcctgtaactctgtcttgttctctggaggctgaattttcttaattgcattaacaatcctttgagttatctcaatccccctctcatgaataagaaatcccaaaaactggccagccgatacaccaaaagcacatttcgttaggttcatcttcaagccatatttcctagttctctcaaaaaccttcctcaaatcggctatgtggtcctctatctctttagacttaacaaccacatcatcaatataaacttcaaccaaccagccgatcagattatgatatatataattcatggctctttgatatgtagctccagcacttttcaagccaaaagtcattacaacccacttgaacaagccgattgcaccaggacacctaaaagccgtcttatggatatcctcttcagccatgaaaatctaattgtatcccgtatttccatccatgaaactcaatatcttatgccctgaagcagcatcaaccagctgatcggctactggcattggatactcatcctttggggtagctttgtttaaatccctgaagtcaatgcacaccctcaccttgccgtttttcttgataacaggaactatactagaaacccactcaccatatcggcaaggacgaataaaaccaacatcatatagacgtttaatcttagccttgataggttcgagcatatcggctttgcatcttctcggaggttgttgatgtggtctaacccctggtttgataggtagccgatgttcaacaatcgatcggctgagtcctggcatctcataatactcccaagcgaagcaatctctgaactcctttaacagctctatcaacttggttctaaattctgaagataaattcttactaataaatgtcggcct

SEQ ID NO: 11505 - DNA, 1479 bp, Oryza sativa
aactctcttctttgaaggctatccgtcaacatcacctggatcatctcgtctaatcttgtatcgtagtgctttgcaaacatggcatgcttctaggttttcgtactcctcaccgcgatagaggatacaattgttcagacatgcgtgtatcttctgtacttccggtcctagagggcacactgccttcttaccttcgtacgttgtttcgggcaattcattcccctccggaagaatgttctttacgaatttcaataactcgccaaatgccttgtcactcacaccatttttagccttccattgctagaattccagcgtggtacccaactttttgtgcctctgctcgcaacctgggtacaacgatgttatgtggtccgctaacatgcgctcttgtttctgcacctccttttcactttcgcggtcctcctgtacgtcccacaacatttgaccaagatcatctgcaccgtcattatcttcaacatccacgtccgcctcgcccgttgtgttttcttcaaatccccaatactgagcccagcccggaatgttctcgtcttctacttcatcttcttctcttgcaacccctagctctctgtgagagatccaacaattatagctacgcatgaacccccactgaaacaggtaggaatgaatagttcgtgctgtggaatactccttctggtttttgcacttgttgcatggacaacatataaaaccgttacgcttgttagcattggccacactcaaaaaataatgcatgccgtcaataaactctttcgaccgccggtccgcgcacatccattgctgatccatctacctgaaatgcatataaatcataaaaataaaatccatgaaagtcaaactaattaaataatcatacaataatttaaaacatcatccttaaaatcaaaaccgacgttcgttacacatttttaatggatttggtatgatacggaagaaggcgccgatttttaaattaacttacatttgtattcttttatcttaattttctatactagttttttactttgtcatttttaatttattgtaattatttctagctgatttaactattttccaattaacttagttttcaattattttatataaataatcatataataattccacatagtattcattttttcattattttaaaatttctaaacatactttcattgtttttcaatatttatatatatttttccttttttcctataacatatttatccaaattattttaacctaattttccctctacaagttttctctctcatcatttcccaccatataccttattggagacaatattgaatacaaacaaagccataaatgtaacatgctaaacatacatcattagatggtgttgctaaccttttcgattcctccgatttgtatattatcaataaaaatttcattaaaaattttggtagcacctccctccctcaaagctccattttgcagcaatggctcgagctagaggaggaa

SEQ ID NO: 11506 - DNA, 1205 bp, Oryza sativa
ggatattgcattaataaagacttcatctaattcataacaactcaatgttgtaaactgattggcgtactgcttagctgttaatactaatgactaaaagtatatctccttcggacttgtctcaagtgcccttaggggagtttgtttaaaacatactcaacgtttgtttaaaatatagctcactcagtaagaagcttctttcatccttgcaattgttcttgagttattttttttagataatggatttatattaaacccggcctctacacttgtgagggtgtatacagccaaacaagtttccaagagtacataagactcatccagttatatgggagacaacacaaggtacgaagtttacataagactcatcccgatacatgggcaacatcacataaagataaaacccaaaataagaatcaagaaagctaagctttaattcttcttctaaaattccagccataagtagcataaaactccattacccgtgactccaaaattctacaatgaacttggacggcatctccatcgtcctctttaagaagcaaggaccaaagtcttgcccaatgagcccccctgaagattacctgcatgaaagaaataggattggagccattaaagactacatcattcctactaagccacaaagcccacaaaattgccgcaatgcccatataaatttgtcttttaagtctaggttcaaaaccattcaaccaatttccaaacatatgagccatgctacggggttggctaattccgaaagtaaagaaacatgcactccaaatgtaccttgccatgagacagtcaaagaaaagatggtgcatcgactctttagagttacaaaagcagcaacttagactacctctccatcttctcttagctaggttatcctttgttagaataaccccttctttaagataccacaagaatattttaatttcagtggaattctgagcttccaaatcaaagtctttctaggtatcactccattatacataagcaccttgtacatggagttaaccataaagagctcatccttgtttgctttccaaataaattgatccttttgatcagacatagtgacattcactgctttggaaactaaattataccaatcttgcaaatttcttccagttattgctcttctaaaggccaccttcaacggagttcttcccaaaacctctgccactactgcattcttattcctaacc

SEQ ID NO: 11507 - DNA, 1007 bp, Oryza sativa
tagtgttcgaccataggtacatcccgtacctaaaggcggccgggttgctcagggtggccttggtcgtgagcagaggaatgccagtgttcaacgctcctgcgttgacagcacttgtggacagatggaggcctgagacacacagcttccacctccccagtggtgagatgaccatcactctacaagatgtggctatgatcttggccctcccattacaagggcatgcggtgacgggtaggacagagaatcctggatggcgtgcacaagtggagcagctgtttggcattccactcaacattgagcaggggcatgggggcaagaagaagcggaatggaatacccctgtcttggctgagccagaacttctcacatcttgacgacgacgctgagccatggcgtgttgagtgctatgcccgtgcatacatcttgcacttgttgggaggggttctgtttcctgatgttgggggtgacattgcttcggccatatagattcctttggtcaccaacctaactgatctgggccgtttcagttggggcttagcagtgttggcgtggacatatagacagctctgtgaggcctgttgtcgtcaggcaccatcatccaacatgagtggttgtgtgctattgattcagctgtggatgtggttaaaactaccggttggaaggcctaagtggaggcaaagcttcactccttggctctacaatgagccagacatggagaagatagtggcctacttgtttgagagtactgccactgcacatgctcaccgggatgtggcatacaagcattatgtcaatgagatggactgcttacagcctcaacatgtaagtacttccaatatcacttctagtttgacatttacttctttaattgagatactaaccaacgacatctcttcaacttttgcagattgagtggttaccataccacacaaatgaggcttcaagcctgaccctgaactcaatgtgcaatcgagactctgactacttcatgtaccagtgcccattgat

SEQ ID NO: 11508 - DNA, 770 bp, Oryza sativa
atcgcttcgatctcctcttccctcttgttttaatcttcaaatttgggtcagcaataaattcttcaccattgtacggtggccactgtgtggggtcgaggtatggctcaaagcgacttgcccatgtgttcacaacggctcttgaagagaactaatacggcattcggttgggagattcctcatcaattgcatgaatcagatacacgtggatgagatgtgagcaaggcatatggtagagcaatggcctttggcaagaacatgagttcccctcaccttcaactttgaagactcttgcgccgattctaacaccaccacgcgttataccacccctctctgtgacctcgtatgtctttttctgcttatcgaaacaccttgaagtgtgtttgttcgccttacttttttgcatcttcatcttactagtgaccttggtggaccaacgctcccttaactggacttgcttcactgcttcatcatgtctgttcacaaagtaatcattgcacttcatgaaggtaaatgatactatggccgtcattggaagcttacgaacaccaactagcacgctattgaattgttcggccatgttggttgtcatgtaaccccaccgtcggccatttctatcgtatgcacgagaccacttatctttatccaacaactcatcttcaagccatttacgaggaccttcgggaatacgctgtcttagtgcctcaacatccctctcaaatatccacttcttgtcaatctgacatatccttaggagcctctttgtctgatgc

SEQ ID NO: 11509 - DNA, 934 bp, Oryza sativa
tcggcgattcaactcccatcaagcaaaatacatttgaatgctcgccgccgaattttctgatcaaccctaagactaggatctttcaaatattctatcaaagggattctccagttttcttctaactcttgggcacaaatatccgaatttacaactaattcggcctctaaatcaattgtctcatgccccccagcttcatgtctgggatcggtaatgccggtcaaaccgccggtcatccgcagttagaccggttataatgcgtcggtcagaccgcccccaatatggaacttcgccaatttatcccaaagatttaaaatcaaacaccggcttttctaatataaaaaatactcctttcttcacattttagccagatgcttggtgtatcaaataactggacaaaaattccttctttctggatatatgaaaaattataacacccaactaatatgtctagatgaataccaattcaagtggcttttgaaacaataatcaaggtatcaaaacacttagccacttgaagtatgatcaataatgaatcaccaaagtcataagcctcacacacatgaattccaataaactacaaatgtaagtaatcggcttgagcatgtatgcaaaatattaacaatgccaatgatcctaaagaagacaactctagaacaaatcatcacattggccattgacattagccaaattactaataagcaaaactttcttggtgcaataattatgaaatctatatcttatatggtgatccataaaaacacacatgatttggcttttaataaatatcaaagactcactagccaaatcatacttcaaataatttatatgccaacttgacaattccaccacttagaactggcatttgcaacatgcatgtataatatcaatttaatgagcaaacacatgtgctagatagcaagcaatgttctaacat

SEQ ID NO: 11510 - DNA, 3737 bp, Oryza sativa
ctgctgctgctgctgttgtgcttgctgctgcatctgctgcaacacctgatggtactgttgttgtatctgttgcatcatcattgtcatcatctgagtctgattgtccaacacctgagcaattgttgggttctcgggcggtggagatgaactgttgctagatgcatcgctagcacgtgctctactgatctgctcttcgctgccactggcgttgtgggattcacgggaaccattccttgtcttcaccatctggagggggataggtagaaataagagaaaagggagaaaaacagatggcttagaaactaatctttcttataaatttaagtgcaattatcttaatcttgattaaaacactgaaaaggaagcaaacaactcctaattaaggcagtcataccactcacacgtgatatcgaccgccgactaacccacaagcaacaaacctaaacacggaaactagcaagaaaacaaactaagaagacgatgaatctaagggcggcgactctgaagatcggagcggcgcttgtgatcagagaacaagtctaacatctaagatggacaagggataggaactaacgcatgctcaaatccaaattaaacaaagcaacaaatgactcaaataaataaccaagcatcatgatttttttatgcataaaatttttttcatgaaaccacacaaaagatacttatgcaactgactaaaccataaattaatgcataaaatagatgcatagttataatgatacgcttgaagctgccccatcgaacctagacacgacttagtgcatatcacccgataaattcccgactgactgtcgaataaactccaaataaattttttctaaaaccctagactgagctaattttaaagatccgatctgaatgaacgaataagattttttccgcaaaccaaagaggcaaaaccccaaattttcccgaaacaaatccaagtgaaaaaggcatatgcagatgaaaaggggttcagaggtctcttaggtttccagttggcttgtcctacggtcaacctggctctgataccaacttgtcacgcccagaaattcccgaatagaattccagaatttctaagcttaatgtgcattaaacctctgtccaggaccagccagggtacacaaacgacaattgttgacatatagatccacgtcttacaaaaatataaaagattacaaatgcagcggaaaaaggtaaaacgagctagacttggaatcttgacttctgcagcgggtgattccactccacaggcaatccttgacggcagcgacgaaaccaacctctctgagatagctccaactgggaagaactccagctctagtgtgggggaaaagggagcaagactgagtactacccactgtactcagcaagtcataccggaagaggaggtatgatgcaggatataaccaaaggaggctaagggttcatttgcaataaagcagcaaaaccaccctcgccgacccaactccatcatgcccaccctcgccaacggtgcctaggaaagggtcgagctatacttcagatcaaacagtaacccactcccgcttgtggtaagcacgataagtctcccagggtttcccgtgaaccggtccttaattgccatgggtgcgaccagcaaaaccatgcacccacgacccaccattcagtgtattttaattaactaacatcattgtggtaacaccaatccaaagctatgctaatagtcaaagtctatgtaataatgtgatccccatttgtgtactagttgaactaagcatggctaagcatttcctaaaccaacatctaaacattttgatacccaagttatcaatggcataaggtaaataatatatggctgagtagtaggacccatcccacatgacattgtaaaagaatgtaacatttaatagaaatgcgggatatttgtaattgggtacaatatgatcaattgtaatgcatgactttcattgctctcgcattgatgagaccacagcaacgtcttcgagaaaccgcggatcgacgaaacggccaaaatctacgcgacaaacaaagcacataagaaaaacatgctataagactgctgaaacaggaaacaaaaccatttttaatggattctagggatttttatgaatttactgagacttgaatggacttaaacggaggtcggatgaattagatataggggtgaaatcgggtcgggttcggtcggatctcactcttcccatatcctaacccacattttataatcggaatcggcttggatacggatagtatcgaatacggatacaagcacggataatatcgggcacaaatatgagacgaatacgtacctagacggatacgaccactatcggttatggatatcttttcggatatcacgtcaaagcaacgatcatctatactatatagacaatagctatatattcaaccatccccatatatccataatgtgactatattattagggtttaagatatacgagcaatacgacaaggaacaatcgatttttaactggaaaaattgaaagtttggttgaaattgaaacgatgcgatggaaaagttagaagtttgtgtatgtagtaaagttttatacgatagaaaaattggaagtttaaagaaaaagtttggaactaaactcggcctgacttgtgatgagctgctgacttcctattcctgaagagatgaggatcggctggcagcaaaggcatgtagcggcggtggccacggctcaacggatgcagcaggtggcggtgcgacgggtgctgcagcaccggtggcgctcgtagtctcggcgtcattgcttagtgggattagtgaacactgaacagtaattagtatttttagttgttgggttgttaagcatggtttactggttgatggtggttattgtactagtaggccttttggccactagtgctttattgggctaggcatgttatccgggtattatccggatatttaaccgggtaatacccgtatttttaccggataatccgtatccgtcggataccgtcctcccgaacccgatctcatatccgatagaaaatacccgtattcgaacccgctacccgtagaaacttccgggtacccgaattttttacccgaaattgtcccgaaataatacggccgggcgggcgggcgggaaatacccgccccgttttcacccctaattagatatgatttttagaagattctctgtgtttttactaataaagaaaagtccttaatcaattttactgcgcaatattacccagggctgacgtcagcgaagggggggagggggcggcgccgacaggcgggccccgcacgtcagcggcttgagggagagagggagggagtgccggcatgcgggccccacgagcagtggctcaaagggaaggggggtgtgcggctggcggctcagcacggctcaagctggccagccatggggcggcggcggcggcgcgcggccaccggtggcggctggcggtcggtgaggcagcggcgactggcgcgaaggcgggaagggagagaaaacgaggcggagggagtcctcacccgagggggcggcggcgaccggcgtggaaaacgagggtagcggcgacgaccggcgatgccgaggcgcggacgggcggcggcggcaccctaggagagagcagagagggattaggagaggaggcgacgaccacggtggcttaaaacgccggcagaaaatggaaacaatggcgagctcaccggcaaacgtggggaacggagctccggcgtcgttcggc

SEQ ID NO: 11511 - DNA, 2322 bp, Oryza sativa
cgagcgcggtaaagaacacgggagagcgcggcaagagcggaaagagggagagaaggctcggtggagtgatttatagggcatgggaggggagaacgtggctgggagaacccccgattttcccagcgacgtgggaaggagacagagggagggcaggggattcaaaatgaatctcgcccatttcatgcgcttacgtggggcgggagacgcgggggagagggcggcgacgcgggcacgacgcggagtggggcgcgggagagacgggaaaggcggtggcgtgggcggttgccggcgtgggcgcgggtggctggaggttggggacgacccgacaggtggggcccatctatcggcgtcccgaaaggaggaggagggggcgcgggccggcccaagaaggagtggggcgtgcgcgggcgacggggtggactgggctgatggcccaagaatagggaaaaaggaggaaaagaaaaagaaaaagaagaaaggatttttcctgggattctttattgcggttaatgaattttaattggttaaaattacttatagggctctgaaaattccgctaaaaatcctgttaatatattgcgacacgtggaacccaagaaaaatcacataatgccaattccaattattaaatgcatttattaattagggaattaactctaggttaaattaaacaaatttcttcgaatgatttatttaacaaatttttaaagcaagaaaaaggggatacttcagggcgtgacacgcaccacctgacagggagcgatttgtcacatccaaaaattcagtcaattcctagattattttgtgtattaaatttctttctatgcatcaagtcaagatatacaaaaaataacaaattgatatgcaaatacaaacgtaaatagtgcagaaatgctttttaaacccttgaaagaaaatgacggtgtgacatgactggagtcccatcctagacgtcctctacactcagcaccgctgggccacctccgtcgagctctctccacaggccccatcaccatccacctgcaccatcgggtggctgcacgtctccactctcgtgtcctctggcatcttctccgttgggatctgcacctccatatggatccaccttcggctcctccaaatccacgttgtccatgcccctgtcactacaggggtcctatgcgctgcccgccgaccaagttagcgcggccctctccacccggctagccacgttgtccgtcgggacccccggtctgtcccacattgttttctcttctcctgtactggtaaggagagagagggatgggagatggttggtggttgactggttgtgcctccgtggtctatgctctcagccttgttcctcgcttgctgcgatcttgtgcgtagctgccaagtgaggagggagataacagatgggtgtggactgtggatatattctgcctgttctttaacctcatcatggcgactttgcgtcggagggctgtggtgtgtaataggttttccttatcatttgaaggggttatcgcaccccatggtaagatggtaaccgttgaaaaccgtgtaaatttcatcgacaaacatttgaatacaaaaatttagcgttttcgtggtttggtcgcggttaccatatggtttgatgcggtcaccacacggtttgacgtagtaaccgtgagttgtgtagctgaccaaaacaatgcttaaaaaattttaaaaacatttaaatgtgtgtagaaattatggataattagaagaatatataggatacttgttgtaatgccctgtaaataattagattttttttttgagaagggtacaactcaggacgcacactaacacacactgcactcacacacgtgcgcgtccctaacacacgctaggaatgagattggaggcactaggcctcagtgcacgggaaacgtgcagtcccactaaacacgcacgtgtgtgaagtcagtcttagggaaacggggaaaaacccctggtgagacacgcgagttgcgatcccagggatcgagcccgcgcgggctgctcgctcacctggcgacgctagccaaccgagcaacgctcggttctctgcaaataattagatagaaaaagagaatgaagagagaaaagggaaaaagagcaaagctagctagcagcccagcacatgcagcccagtagctagtcggcccaataacaaaaaccagcccaagcatgcaagcagaagaggagagagagagagcgcagcgctacagtaccatcgcggtactgtagtaagaataatcccacctcgccaattcaacctgagggagaccagcttaaataggaaggtcactagcaactctatttttggaattt

SEQ ID NO: 11512 - DNA, 8260 bp, Oryza sativa
ttcaggtatagaatcaaccagtccaactcctcgggtataaaatcaaccagtcctactccttgttccttatcctctcaagtcctactcattgttcctttccttaccttgtttctttacttatcctctcaagtcctactccttgttacttatcctctcaatctaagtgtttactcttagactccttgttccttatcctctcaatctaagtgtttacccttagaaaacccaagtggtatagaatcaaccagtcttatcctcttatatccttgcaagttttagatagtatcatatcttgcactactccttgttccttgtgtttgtgaaattctcttcacgtatagaatcaaccagtccttatcctctcatatccttgcaagttttagttaaactagacattttggcgcgctttgcgcgccctatcaggaagctaataacaaaacaaaaaaagaaaagtttttcatgaaaggtaaacaatatttttaaacggtaattagtgtttacatgcattgtatagagcgaaaattgccaaccatattggctagctgtagtacacatgtaacatagtaagataccatatgttgccaaaatcagtacacttgtcaagattagacaaaaccatatggcgcgacaaaatatgccacaaaaatatagcggccgattagatggcatagcatagtagcatgttcaatatatagagcaaggcatagtggctgattgcgtttttctttaacaccatttaaaaagattggaccgctcccactgcatatagtgcacccttgagttgattctgtagagctgaatgaagatagtcaattgcttaccatatatatgaataacatgcttcatactatggacgacactaaatattgcactcattatcacataaccacaatcagtacagttgttcaaaatcacaagcagagtataacatgaagcactgttatcttttaaagattatcattgataacaatcataaattcataacactgtatcgctaatacaaataacattatattgcagtataaataaaatgaccaaaatagtttcaaagcatatactattcatacataaacagcccagtttatgcttgcaagacaactttttgggtgatcagctatgtttcaaacatcacagcaaatagcttctccagcaaagttcagcaaattgatatagccatatatagactgacaattcattgcattatctatactcataaagaacctgctgtgtacaactatatatatgtggtatataaagtgcatgtccaataatatacgatgcccaccaccagtctcgcccctgttggtctcctaattgccgcatcttcaccctgctttgccaccggtcatgagaaccaatccaagcaaaagtgtaacataatggcgattacttacccaaatccaatatagttgcaacaataaaactaatgcaaaattgcaaagtcggtcatagttgggttataaaaattaggccttaagctaaaatgccaatgaatagcaaaacacaaaacagcaaggtcttgagaaatctaatgatataattttgttttgaacaaaaggttttcctccctatgcatcactccttttctttctgaaattaaactacattgctactatcctctaatcatcagctagcacgaaattgcttatattgccctttaaagcttatattgcaatgaatgaatctgattcagaaaaatgtcgctcatccccagattagctacaaatctgactgcaccacaacttaatacctgtccatagagggtggcaaacaatattagttttgcctggatcggtagttaaaaaaaaaattgtatccctgaacagaacctccctaatttgcatcctatagaaagaaatcatcacagtttaccttaggtatttgcttgtgacaaatttcatctttttcccagcaggtcatatcacctaaaccctttgaagctaatgaaccaatcatcattgccaaaaggaaactaaggtcagtgcatcaacgacaaaaagaataaaaagctgtgcagtcattcatgcaatccttaacatgaatggcaaggcaccaaaaaaaaaaatctacagcactcattcatgcaatccataacacgaatggcaaggaagaaaagccacagctacaatttagtttcaagagaagatgttaaccgcaatttgtataccatacaaatctatgattaacatctagcaaaaaaaaatgctatccctatttgcagctctggaagagacatacaaggtcagacaatgggagtctctatcacttgacagtaaattgtaaaaagccactaaatttgatttctacataatttcaactcgtgcaaccttcgtgtatatattttacaaaaacgcgaaatcaaagttggggataaagtagccggaagacacaggaataaggggatcatttcaaaaattttgcctaggcaagatatgccctatttgcaagatggaacgcctgttgatatggttttcaatcccttaggagtaccctcccgaatgaatgtgggacaaatatttgaaagctcgcagttacctctgggtgtgtacacagaattgcaagaaatatagcaagccagtcaattgatcgtccagcagccaccaccttttcccatactaatttgagccagaggtgctaagttttctgcattgcagagcatgtcttgcaccaacgggtctccaatctacatgcactaagaaagaaggaacccatgatgacgatggcaacggactactaagaatgaaggaacccatggtggagatggcaatggactgcttggtgatggatctgctgttctgcaacaaattgatccatcctaaccatgctgaaacctagtgttatcagcagaagaatcattgcagggggtaaaacatttttgatcagattgattgctccattgcaggcacaaaccataaggccggaaagggaagaaagtatacatgtcttttttttcactaaataccagcagagtggcgtcacagcagaaagtggatgaaagcaaagatccactcgctagatgcagtgctctcagaatgccatcaagaacgaacaagttccaggcagatccactcgctagatccattgctcttgaggatggcaacaagaacaatcaggtggctgggacttgagggtttactttggagaattacctctgcacatctgtccggaccgcccaatttcctcagccgggatcaaccacctcgccgtcaacctcaagctctgatctcgcaaatggggtgttgcgctgcgaccagattagtggcatcccatcgatttccaacctcatgccaccgcacctgctttcggccgccgccgccgccgccgtttccccaggctccttctccctttccccgacgagcttgccagatccagcgagaggcatcggtgcgcgggcagttgcggcacggcgaggctcgggccgcgagccatcatagcaggggagggagggggaggaggaagcggcagggagagcaagggaggacggcatgggaggaggaagccgatgggggatgttcattttttcaaaagagcccctttctgtttgatatttcgagcgcggttcttttttggggtttttctcttcttcttacaaagttttcctgaatgtgaagggcctagaagtaagaatgaaaacgtaggatcgtattgtattgagacctaaaacaaattacaaataacttgaagggtctttttgcaaaatctccacccttatcatcctgccgttcaatcaagctgatcggacggcgcgcgggcgcaagagggaggccgcctccaagagggcgggggcgacgtggatagcgccgcgtgcgaacacgcctctgcaaaacgctctcagctcggcacggcaactccaggcaagttttaatataaccgataatctaagtgtttacccttagaaaattcaagtgtctctgtaggtaacctatctgatcattcaattataaattcctaccgctgtcatcatccaccaaataggctcaaattctgtagttctattgaactgaacatgaatctattcattatgatttagcgagaatcctgttaggcgcgtacgcgccggcaaacctaagtcgcgctcgtggctaagattttttttacccgagaagcctaattaacgtaactaactaatccgattagatttgataatgatgatagttaaggtaatattttcctttttactttttactaatagattgaaaagaaaacagtacgtgaagttaaattttgaaaacttccaacccatatttgaaattttcaaattgaaatttaaattctttgaactaaaattttgtaaacttttaacttttcatttcaaatttgaaaaactttcaactcaatttgagacatttatcccagatttaaaaacaaaaattgaaaactttcaacctagatttgaaaactttgaactcataatttgaaaactttcaactctagatttgaaactttgaactcaaaagttgaaatccttcaactattgatttgaaaactttcaactcaaaaattgaaaactttcaacccgaatttaaaaactttcaactcaaaaattgaaaactttcagctcaattttgagtctttcaatccaaatttgaaaacttttaactcaaaaattgaaaactttcaacatagatatgaaaactttcaaataaaaatttgaaaaccttcaactctagattcgaaactttctttatattgaaaaactttgaagtcaagatttgaaaacttttaatttaaaaattttgaaaaacacgtgtgctaaaaataaaaaaaatgaaaaagaaaacgtaaaaaaaagaaataacgcgaacagatggaggcgcacacgaagaagaaaaaaagaaaagcgaaaaagatggaaaagaaaaagagaaacgggaaaagaatagcgaaaaaaagaaaatgtgagggggagcgccaggccgccgcgcgcgccagttctgttactggcgcgcgcgcgccaattagcagcacccatgatttagtgtacatccttcaacatttcagtgccaatcacacaatacttaagttttctttccaaactacacccatatttctgttttccatgtctggttggccaaccattctggcaggagaccaaaataaaccacaatatatcatttatgtttcaaaaaggaaaaaagaagacagggacacaaatccttttgttgacaactttttgtgacaagtcgacaaacatgatcacagcacctaaacgtcttgcggtgatatagaatcgccaaccacctcgatctagccaaacggccaaatcaagatgggttgtagaaaaacagctaaaccggctagcggaaccgatttagagatcaaaatcagcctctaggctaatttagaatgatatgaggataactaccagtctcgtgggcaaaacggaaggtttttaggacaaacctacaaggaggtgtcgcattctcgcagcggcggcggacgatttacggcgcaaattgacaaagatggactaaaactagggtaaagtagaaaacatggctaaaagttaagatagaagaaaaaacaattcaagtagattgtgtgttcgggggttacaattaaaccaagtagattgtgtgttcgggggttacaattaaaccagccttgtcccttaaataggggttggtcttgccttctactggccctcctctacatccaattcgggatagaaaccaaaggaaacacgaaacatgccttcccaagcaaggaaacccgagacccaacgaaaataggctcgggcacgaactctgacggtctgaccagccgcatacttgcggtcagaccggagtttaggccgcggtcagaccgctcacatacctgcggtctgaccagccctatgaaggaaacctggcactttccaaactttggcaattttccctattttgtccataggtgctaaattttggtgtaaacacatgctcccctgcctttttggtgaacattgtgaacctaaaagcatagaacatgttatctcagggtgataatccaattactggctccgtgaatccccaagcatcttgcaaatgcgagagaagtatttcttcaagtatttcccaatgattgctctctaaaaatgctgtccttgaagtgtctccatctctttcgaggtcttcaaacgcttgtcactgacgtcttcaaaattgccccccatcaaggtcttgtaatcttcgactgacaagtcatcttgcttgaaacaccgaagagagccaagatttacctcaactggcaaaacggccttttgttcagaagccaactcaaaaggagtgactttagtagcaccatgtttagatatcctatgagcccataatgcttccaaaagcacttcatgccacttcctttgatgtttttcaatcttctttttgactaattttaacaatgttttattactcaactcggcttatccattagcctgagtatagtaaggagaagaactcaacaacttaaaatcataaaattcggcaaaacttctcacctttttggacttaaaagaggcttattgatcaaagtttaaaagaataccgaatctatgaacaatatgcttcaaaataaagtcaattaccttcgtgtaagtaatattcttgaatggcacggcttaggcccacttagtgaagtaatccgttacaactagcacgaaccaatgcccttttgatgacgaatgataaatttgaccaatgaaatcaaaagcccaatctcggaatggccatggtttgataataggattcaatacggcggcgggcgccaattgaacattgccgaaccgttaacaatcttcacatcctctatagtacatggaacaatcatcaatcatcttcggccaatgaaacccattctcctaagcaagcaatttatcttatgggtgttggtatttcttaatgacattactagaaatataattcccagcaatggcacagaaatactcctggtatattatggttacagagttcatccgcaagcgcacggatataccattgtagcatttcacccgagagtattccaaaggtatcatatttattttatcccgtgggaagaagatgtagagagaacttgactaataatttatatatcacttgtgataatcatattctaaacaggggttaagataaaccaagggtagagtgacacacaagcattggctactcattctcataatatattatctaagctaagtggaaagaaaagagaaagataatctattcctatacttctaatatacatagtatacatacattctagttaactgatatactagctaataccctgtatccgatgccctcctggtacttcgagaagccacccctgactgccgagtttcttacgacagcccgtcatgaccatataaccgaggctaaatacggaggagtaccctccccaaggaattaacttaggactatatacacgtgcggaggaatacccgtactgagctgtcaccatcagcgacccacctctcatccgtagcatataaccccaaataatgatatcccataatctagacaccacgtctaaactaccagatactactctaatatcatcgtcatgacatagagaaattgcatatgcaaacattatacccgcaccaaagcatctcccagataagctagcagtatattccgtataacatgaacataatgtaaagtaggcattcatatactcggaaagtatttcaataccataaatgtataaagaagagtattctaaataaagtacaaagcttacaaaagaggaacagaaagctactagagccatacccgaactcttccgaagacttccggactcccgatttctactttattcctattccaccagcttgatactaaactaaacttgagagaatatgagagagctcttgcttgaggtgtgtgagtgaagtgagaaggtgaagtccttatatagaggtagttatgacagttgtggaaggggaattgtccgaagtgccctccgaccgtcattgggatgcaatcctggacgtccacgccgaaccctgcatccaacggtgctaggatgggttcggcccaaccaccaggttttgccgaaccatgggctgggccatcccggcccatcttcggctggcggcctcctctattgcttcactttgtagacttgtgaattttggcccaattcatcgtgtcaattctgagttcttggcccattcatgcataagtctgattctcgacatcgtctgattgatttatcgtttgagttgatgtcaattctcctccactttatggttattctctgcaaaaggttagtgaaccaaacacta

SEQ ID NO: 11513 - DNA, 10248 bp, Oryza sativa
ataggtgaattcactacggggaaacggtgaacagccccattgccatctctactccccctcaaaaggagcacgaatctgcacggcccacacagccagccgctgccgcctgtcgccgccaccaccacaccaccgcctcgttgctgccgtcaccaacccaccaccagaaaaaaaaaccatcgcgcctcgtcttttcctccatttcgtgcgtgagcgtgaccttggttgccgcgtacaccaccaccgcctcgcacttttccgccatttgtccgactccacccgcggcttatccctccttttttttttctttttcccttgctctcctccgctgtttgcttccccgcctcgtcttctcggttttttccgtgcggtcgaagcatcggttccttataccatacctttgcccccgttcttgattcggttcttgccaacagctttgtaacttctcgggcgcctcattggagtttctttgtgagattcgcaagggggagaggaggagtcctttggtcaagcccctgtttctccatttctggttctctgtccgtgcagatttgctgaggaagtagttcttgggttcatcagggagcgagaggtgcgggatttgaaggggaagccgcggggcggccgggcctgggcgccggggcccatggggaagccggcggcagccaagaagccgccggcgagcgcggcggtcgacggcgacgaggaggtgttcctggagctgtcgcgggagctcaaggaggagggcggcaggctgttcaaccggagggactacgagggcgccgccttcaagtacgacaaggcggtccagctcctccccagcggcggccatgccgacgcggcggcacacctccggacctgcgtcgcgcagtgctacatgcggatggcccccgccgagcaccaccgcgccatccacgagtgcaacctcgcgctggaggcggcgcccaggtacagcagggcgctgctgcggcgggccgcctgcttccaggcgctggaccggccggacctggcttgggaggacgtccggaccgtgcttgcctgggagccggctaaccgcgccgcgcgggagatctccgacaaggtcagggcggcattggaggagaagggcgttcttgtcttggagaaggaacccgtgccgccgccgccggagcacaaggctgttagtgcgaagggacaggggaagttgaagaaatctcataaacagtgtgattctgctattgaggggcaggagctgattcatgtcgaagattatgagcaaagtgagaaaacagagctgaagattaatggtcaggagaatggagaaaatcgtgccgggaaggagcaatttgattgtaatgtacctgtcaagcaagaaattcgaaccgaccagccggaagcaaatggagtaggaaaacatcaatatcatatggacgataaggaaaacaagggtttagataaggaaggaaagaatggcaaaccagggaagcacagtgcaggaaagaaaattaggcgtgctgacgccaagaagcaaaagcattccgctatggagccagtgcatcatgctgaggaaaatcgtcatgagcgttacacggagaccagtgtccatgtcaaggaagcaatgaaggatctgaagctggtctttggggaggacattagatgtgctcaaatgccagctaactgcaatctgtcacaattgagagacatagttcaaaacaagtttccatcgttgaaagcgttgcttattaaatataaggacaaggaaggtgacttggtgacgatcacttcatcggatgagcttagatgggcctacagcttggcagatctggaagggccaattcgactgtacattgtagcggttgatcctgcacaagagctaggtgtggatgtggtcaggagacgctcttcatttgcctcattagagaaagcttattatagcatgtcggagaatgggagcagtaggcatgatgatgatcacaactgctctattgatgactggatgatacaatttgctcggctattcaagaaccatcttggttttgattccgactcgtatttggatctccacgaccttggcatgagattgtactatgaagctatggaagacactgttgcaagtgaagaagcacaggaaatatttcaagttgcagagctaaaattccaggaaatggcagcattggctctgttcaactggggcaatgttcacatggcttctgcgagaaaaaggcctcccttgtcagacgatgcttcaatggaatgtatacttgagcaggttaaggttgcttatgaatgggcttgtgcggaatatgccaaagcgggcgcgaagtatggagaagctgtgaaaacaaaaccagatttttttgaaggtcttattgcacttgggcagcagcagtttgagcaggccaagctctgttggtattatgctcttgcatgtaagatagacatgggaactgaggttttgggattatttaaccatgcagaggataatatggaaaagggaatggggatgtgggagggaatggaaaatacacgcttgagggggctctcaaaaccaagtaaggagaagatcatatttgagaagatgggcatagatgggtacatgaaggatatgtcttccgatgaagcatttgaacaggcttctagtatccgatcgcatgtaaatattttgtggggcaccattctttatgaacgttctgtagtggaatttatcttgggacttcctagttgggaggagtctctaacggttgctatagaaaaatttaagactggaggtgcttctcccgcagacatcaatgtgatggtaaaaaaccattctgctaatgaaactactcaagaaggttagaataactttcctgcagcattttgtttgcaatttctcagtttgctttatattgtttatttgcccaatttttttgttctattttgcaacttcgaaaagcaagatgcaatttttttaacacttagagccctctattaggacaaggtcgttctcctatatagataaagaaatatggtatgccgtatgcttaataaatgttgatgtaccagtatttagctgctaactagtagccgctgtgataagcttcagatttcgtgtgaactgtgtatagaacattgtgttttttgtgtgtgccgatcctaagaacatagttttgataccaagttcttacaagatttacctcttttatatttaggactgagttttaaggttgaagaaatagttcaagcatggaatgaaatgtatgatgcaaagaagtggagaaatggagtgccatctttccgacttgagccaatattccgacgtagagctccaaagttgcatcatatgctggagcatatacactatgcttgaccctctaatatatataagaggctctggtttgtcatcatggagaagttatttcatgattttatcaggtaatgtcttgccttgcaaatattatcggcattgacaggctgcaaacagagcttcaccaaggccaattataccagaaaatttatgatgatgtccctctttttagataattggtcctggtttgaagtaatttagtatcttagactacttttcatgtcaaggtgaaaactaaaaatattagcttagaacaagtaagcgggaaaaaatgtctatccttatgtacctggaaattgacttgttatcagttggtgtccaggatttttacttcaacctgtacttttatccttgtgaattggttaaaacttactttgatagaataatagaaaataaatgtctaataatttgttaaatgaggaatgcaagtgccaaagtatgatatattaaagcactcatgttctacaactactacatcttgtgtgtgtgtgtgtctcccttctctcagaaagcacagtccgtttacacaacattacagcttcacctaatacaccatctgtgaaatacaaatgcagggcactagggtatcaagggatcttatactcagttgtttttatctgttactcctacagctgttgaactaaaggagctaacggtagtcagccacccctcaggtgttgattgaatgtactgaaactagattgttgtcatattttgtcgaatttcaatcatcagactattagtgacaaagtaaatccttagctgtgaagtcatggatatttgcatccagtaacatgacctaatggaggaatactttagaaaaggtccaacatatgcattaaaattccaacataacttgcatacagtgacaactaggaaaaactcctccagattacacctctaccaggtgctctttttcttcatatcaggagaaaaaaaacatgaacaaagaagaatttggaatattatttgcactgttatataatatattttctgcatgatatggcattataaatgattttgttttttttcgaggaaacgattgcaattttttgaagatgtaaaaaaccaatttatacataactattttttaggtctctaatttttctttttattaggaatacaaatttaacctgattggtttgaaggaccactagcttatattgtacaatattgcactcaatgtaatctcatccgctttaattgcttttgctcctgatctacactgtgagatagcattaacttgtctaatttctatgcagttcttctacatagtaatataatttgtattgaaatacagttgtaatttctggagaatgattatgcttgtcactaaacatttaattgaatattttgcggaactgtaacattaggaaatatagccctctgtcattaggagaaatacagtgaccaacaaatgatacaggcagtagtcatttttgtttccttactgctattgtttactgtctctgcttacatatctccatgtgcaataccagtattttatccccttggatcctattttatttttctgaccttctctctaatggttgcaggtttgtttattctgggagctgtactgcacttactcgtcccgccaaaagaaaaaaatataagaaaaagaggaaaagaaaaggaaatattctcttcaacttcaagctacagattggttgagagtagtgtgtaggggtttcctcaactgaaaagacaaaaagaaagtgctaacaatgtggcttgcgtttgctgttatatttggtgcttcacgcaaccttctgcttgatgctatatttcctttcaagagatactgtggatattttgatgttgcacttcctcatatttcagtcatggaagtgcttcaagttgttaggtcatcataggaaatttctgaggatacactaattgtatttcacttgtgtagaagatcaccccagctgtgttttacacttttactccaggtcacacatgaagaaagctgaatacagttcgtgtaacatgtagctgaagtagcaggcacagaatgcttgtagtctaattgtgtgaaacagatgcttttattgaagaagttatcagatactagtgattgttggtcattcagtttgttgcctactcgggatcggctttcatgaaatgaggtttgaagaatacttcgttcataaaacctcgaggggtttttggatttctcatttttcacaattgtttttcttctcagggaacggatttctcattgttcgcaattctttttctccgtaggaacctaatgggtgtcaggatattttgtaaaaaaactcatcatttaatatttgggttaattagattcatgccattataaatttgctagttttataaaatgccattactatttacctatttggatctatgccattacaatctcatacctattcaaaataggttaattggattcatgctattggaaattttatggttttgaaatataccattattatttacttatttggagtcacgccattgtaatttggagtagaaatttacgaaatgccactacataccccttccatgcacttaaatatatttttggaccaaattgcccatcgtcttcttcctccatcccacttctctctctgttgggttacacgtaggctacgatagcataaatcaaaatttttctaccgcgtaaaccaggaaccatgcaagtattagatcatagatcgttatcactcgacgctaggggtgggcaaaataagaccgaaccgaagaaccgaaccgaaaagaccgagaccgagaccaaaaagaccgagaccgagaaattcgggtagtaattcggtctcagcatgtcaaagaccaaaatttgttcaggtaattcggttattgggctcggttaaccgaattaaccgagaaaaccgaattgtggcccaatagatccaggaggcccaataagcctaatacaccactgaaccctagaggccaccctcatccatccaggctgcatccccatcccatccctatcgcgccgcactaccaccgctgcctccatcgcgtcgcgccgccgcctccacatcgccggcaccgtctccgccctccacctccactccacctcgccggtcgcaccgggctgccggccgctggatccatcgcgccgcgccaccacctccgccctccgccctccatatcgccggcgccgtctccgcctccacgcctcctcgccggtcacgcgggccgccggccgccgggtccatcgtgccgcgctgccacctccgccctccgcctccacgccgtctcgccggtagcgtgggccgccggccgccagatccatcgggccgcaccgccacctccgcccttcgcctccacatcgccggcgtcgtctccgccctctgcctccacgctgcctcgccggtcgcgcgggccaccggccaccagatccattgcaccgtgccgccacctccgccctccgcctccacatctcaccggcgtcgtctccgcactccgcctcggctcctccaaattcggtctgaccgagaccgagacaaaaaaaccgagaccgaattcatcggtcctgatttttttgggacgaaatttggtcctgacttttcaaaaaccgaagactgagaccgaaattttcgggtagaccgaacgcccacccctactcaacgcgctgtgcagcggaagtaagtgctaagtagccgaaggaacgtcggggacataggacgcatcggtatagaggaagtagtcgatcgcagcaactcgacattctcctcctcgtgtgttctcctcaccgtgctctcacaccgatcagtaccgcaaaccagcggcacctctaccagtatccacacgtacagggatgaaacgccacgcgcagacatgctagcgtctgcgtgcggcaagggttttgctcgggggaggggagtggcagttagggtttctcacgtgatgcaataccaccgccggtcacacccctcacgaatatataggagatagatagtcgggtcatcgctggatccaatgctaggtctagcaccaaatacagagatagataggaggaaggggaacgaagagagaaggggatggaggaagatggggtcaatttggtccgaaaacaaacaaatttcagtgcatggaaggagtaagcagtggcacatctcacatattagttagtaaagggatgaaaacggagcggatagattccaacccctccggacaaaaacggatacggatacctttcggatcggataattctcggatagtttggatacggatatgaatacgtatactttctcctggatacgaatatgcatatggtatcggggtttccgtcaaatacagataataattcggatatccgatgaacaatgctattaggatatccgtataagccatgagacatactacatttctttctaactctataaccttcaatatacctttatagattttaatagtagtttatctcataacactagtccatactattaatattatttaaaattttaaaaatatttataaattatacttcattttatataaaatgagctaattatatatgttgatatttgtttctattagaagttgaattggttttcgtgttccgagaaaaaattgtttctgtattcgtgtccgatcatattcgattcttattcgtatgtgagataatccgtatttgtttccgtattcgagctatccgtattcgttttcgtatccggtaaaaaaatatgaaaacaaatatggtatgagtattatttgtccgtatccgctccgtttttattcctaaattgtaatggcatgaatctaaatagaaaaatagtagtggcatatttcaaaactgtaaaaaatataatggcatagatccaattaaccctttgttaaatggttggcatgaataaagtggtagatgtccgtgtaaaattccattatttaaaggaaagatgtctgaagttctgctctatttccttaacacttgaaactggacagtatttcaacaccaatccacagtaacagtatttggctgtgtcttataataaagattccattgtctaaaaaatccagagtgtcagccggaatcgtagcttcttgttacgtaggcaatttagattcaacacttccaagaatagtctttcatctgtaggctgtagccttttttcttctcttgtattttgatattttgtttcttttgctcccttcatcgaaaatagaaggtgttctcgtattgttctgttcttccaaaaaagaacctagtgcaaaaatgaacgagtaagattgtgattgatgtttctcaaaaaaaaaaaaagattctgagttttttttccagaataacatcaatcaatagagaggacaagcatacattgtaattctgaagcacaagtaaagtttgaaaaccagtttatctgtgtacaaaaggatacctggtgtaaaggctatacgatatgcgaacataagctcacttatttcttcgtcagagcaattctgtgaaaagaaatcctcctcgtcgccatccacccacaaatgtaagtttcttcgaagtctaagcatatctcggcacagtacgtttagttctttgctgcaattatagagttccatgtccttgagcgaagctgggagaccccctaccggcagggaagtaatatgtccacagttgccaacatgtagtctctgcagggatgcaagggatccaagttctgcaggcagtgaccggagttgctcaaggttttccagatcaagaaatctcaagcaggtgagaaatgacagtcctttgacatggttgtctgtcaaaaactccacatgaccatctggatcgtgacgatcctcttcaatggataatatcttgagagaagttaactggctgcatatgggcacacaaaggacatcaatgttatcaacgttgagcttttcaagtggtagtgagaaattcttctcctcgatattaacttcagctgctgctgatatccatctcgttatgaacccaggagacgcttcaactttcaagatctcaagagaaacaagggatttcaaaccttcccatgatgtcagtgccgggcagtctttgatgcatagtttctgcaatgatgtgcatgatttcagttccagagatgctagatttgtgttattctctatgctcagtgttttcagggtgtggagtgatgcgctgagcgaaggcagcaatgcacagtttcgaattttcaaatccctcagtgctgagcatgacggcaaaccttcaattgactgtaacaaacggcaatctataacacacaacttttctagcgcggtacaagaactcaggtcgagacatgccaacttcgggcatccagacacatctaaatccgcgatggaagagacatctgagaactgcagagtgctgtcttggataccagtcatgcagagtttatccaaagatgatggagatatatgagatgctcctcctgaaagcgctctagatagcagagtagggcaattttctataacaattttcttaagagatacaaatcttcctaggcctttcttgctcgtaaagtgcataattgaatttgcatcagatggagctgttgtgaaagagatttgcaaactttccagactcgtgaagcatctgggaggaatgtgccatgagccttctgacattgtgttctgttcatctgtaaacaaccctacaggtaaggatgttaccccttggcaattagttaacttgaaactcttaagtaaatgaaggttcacgaggagttgtgatagttgtatcaatgtaatgttgcatccactcaactcaagttcctcaactgacggaggcagaaatagctcaaagttggtagaaaatatttctgggcacttgatcactctaaactttttcaatgatgtcaactgttcgaagccttcccagaattgacgttggaatatcactgattgatagtcccggatttcaagttcccgcagatccttgagtttctctaatgtgaacaatctttcct

SEQ ID NO: 11514 - DNA, 854 bp, Oryza sativa
caaagcccacaaaattgccgcaatgcccatataaatttgtcttttaagtctaggttcaaaaccattcaaccaatttccaaacatatgagccatgctacggggttggctaattccgaaagtaaagaaacatgcactccaaatgtaccttgccatgagacagtcaaagaaaagatggtgcatcgactctttagagttacaaaagcagcaacttagactacctctccatcttctcttagctaggttatcctttgttagaataaccccttctttaagataccacaagaatattttaatttcagtggaattctgagcttccaaatcaaagtctttctaggtatcactccattatacataagcaccttgtacatggagttaaccataaagagctcatccttgtttgctttccaaataaattgatccttttgatcagacatagtgacattcactgctttggaaactaaattataccaatcttgcaaatttcttccagttattgctcttctaaaggccaccttcaacggagttcttcccaaaacctctgccactactgcattcttattcctaaccaaattatacagattagggtattctttctcaagaggttgacttcctatccaacaatcctcccaaaatcgtacttgtttgccatcacacgttttaaaataaccaagtgattgaaaggattctttagctgtcataagactagcccaaaaatgagaatctcctggatgtttttgtacttgcataatggttttttttttgccagatacttcctcctaagcatattttgccacagtccatcctcattgattagtttaaataaccatgtacttaacatacacctattttggatt

SEQ ID NO: 11515 - DNA, 557 bp, Oryza sativa
agagctgtagctagctatagcattctctctctaggatatagagagagaatacaagggaatgagaaggagaaggagaagagagggagtgtagaagaagggggaaggaggcaggagtccctttccccgctccgcttggctttttgcctaccctcctcttcctctacacctcatactcctagctctctacctctctagctagctagctataggtagctagctagtcctcctgctacctaggggggcgacgccgccggacggggaggaggccatggcgttccacggtcacctcccgcacgagatgaccatgcaggcgctcggcgcggacgacgcggcggtggcggcggcggcggcggcgggtggggtcggggcaggcggggcgccggcgtggatgaggtacaacgacgggagcttcctgcacctgcagaccacgtcggactcgtcggcgtcgccgtctggcgctgcggctgcggcggcggctgcggcggcggcggcggcggccggggtgcagcagtggatgggtggaggcggcggcggcgaggacgcggtggcggccgcga

SEQ ID NO: 11516 - DNA, 1690 bp, Oryza sativa
aatgaacttggtatgacactgacaacctcaatgtcacaacatggattttttcagagcagaggaattgtacttgtgtgctcggtctgccatacagattgtgtaatgctattaatgtttggtgtttgatctccttttttttaatcaaagattgatccttctgcacgtcccttttcggacgtcctacgtaccatgtgacatcttctctttgcatctcctgcctttcattgcctttgggtattgcatctattttatgatattgttttatatatatagtgattctttcaacatacttgatcactacatttgttttagagtttatcacttcatgttagtaacctgtagttgtttcttttcttagacgcactacgtcttgctattatgttcgtttaaagagcagctacagcagcatgtccgtgttcatgctatggaagcagtaatggcatgctgggaacttgaacaaaaccttcagagtttgacaggtacaacctttttgttatctctttcaattttcataatttacaaaagtaaaacttttattaggaaaaaaaatccaaacttttcttggtaatgcaatgatagtaaagaattgactaatggtttggaaatggcatattgttggagcagcgaattgtttgttccttgctcttgcttagtctggcacgatatgctcttgctcttgcttagtcttgctcttgctcttgtttgttcaagatttttgcttcagatagaaactccaagtccggtttaatccattttctaaaaaaggaaaaaaaaagaaagaaactccaagtttgtgagcattctctatttctaaagctttgagtgttacagacacgatcagagcgtaaattgagagggttttagtattttgctaagttagtttttggtagactggtatcaatcaaattgattaaagaaaatgacaaactggaaattcatggacaggtgcctcgcccggtgaaggcacgggagcaaccatgtcagacggtgaagatgatcaggcagatagcgaggcaaacatgtatgatccaagcttggatggagcggataacatgggtttcggccttcccacagaaagcgagcgatccctaatggagcgtgtccgtcaagagctaaagcatgaactaaagcaggtttgaaatggattccaataattgcttttcagggggaaaaatggacatgttgatgaatctcagtactaatcacttggcaaattcagggttacaaagagaagctgattgacataagagaagaaattcttcgcaagcgaagagcgggaaagctaccgggagacacgacttctacgttaaaagcttggtggcagtctcatgcaaagtggccatatccaacagtaagtgatgatgagagtgagacaattcacatgcttagcttccttatgactaatatactccctccgtttcacaatataagactttctatcattgactatatttgtttagatgttaatgaatctacacatatgtatgtgtctagattcattaacatttatatgtatgtgggcaatgctagaaagtctcacattatgaaacagagggattatttgcattcacaggttagtctagaaggagtaaaatgcaccaacggtccttaaacttatcgggaggtttcacttaggtccacgaacttgcaaagcgcacatcgagggccctaaacttgatttattgtatca

SEQ ID NO: 11517 - DNA, 9014 bp, Oryza sativa
ggagggggctcgccgggagggggcctcgccggcgctgttgaccttttccggccagccggcgaggcgggcggcggcgcggtggggcagtggcggtggtggtggcggcggatcgcacgtgggacaggaggaggagggtggcggcgtgatctggaaccgggggaggaggagaaggagttagggttaaggggctacacgaatcttaaagcatatctaatggtccaaaattcgaatgataggaggtgggattttctgtcacatgatatatagacagccaaaaaaaaaatctttggaatccttacttgcgcctcatcattaccagcttagcatcattttcctcggattagcttgccattctggctcaagcttcttgtccgcgttggctttttgtggcaatagccgcatcatatcgtcgtcctggtggcccaagctctcttctccgtaccacttgtaatatgagtctactttctcgatcctataaaaataaatattgtacaagatatgatatattctagtactataaatttaaataagctattcagattcatatagtactagtatatgccatatcacgtatatattatttttgtttttatagaacggggagagtatataggtagtttaattactgaacttcccaacctagtggtaggcatgagacgtcactagtcagatcatttaggccacaacagaagtttcatgtttcttcttgtcatgttttctggatatgctaaatagttccaagagcgtaaaaaagaaaagaaagagtaaaataattaaatagtgttgtctgatatcattgtagtggacacaacagttatggctttgctagtctcgcctaatttcagtaccctacggccctaccacaaccctcctaaactagcacgaaccactgtctcctacttcaaaacattctgaaccaaagtccagcttctagatttttcacttttgatctttttaaaattttattttacaaatagatccatcataacttattatgagaatggatcatttttatggcatcaacatcattagcgtcatggtccaatataacggcgcaatgacagtgatgccatcccctagcttccttgcaaaacctatgggtatgtttccgaagcttaagattttgagaagctgtgggttggtagtcagcttctaagaatttagaaaagctaagttccccttcccgtggatggtcggggcatggtggaccccaccgagacctacaacgtctgcctcttcaaggtttcaaaaggagtgtcgagatctactgaatctacatcttccaggtgtcaataagagtatcaagatcaacaagatctatatcttcaaggtgttaggaagagtgtcgagacttacaagatcatcttcaaggtgctaaagcagacactgacggataccggtgtcttgtctaaagctatgcccaccatgaactccttcttcatcaacatcttcgagaagctcatccaaaacaacaataaaatctatctttggcaatatgagcgcgctcgagtgggcaggggttatagttattgagaccggactagtaattgagccgacaaggctcttggttcgatggttcactggttcaaccggttgaaccattggtccaacctagttcaataggtattaaatatattactcattccttgacatcacgaggtgcatgatagcctggtggttcgtgatcagcttcctctctcacatgtgatcttgtgttcgaatcccatcctagtctcgttttcccctacctgctcccctgcatgcatgtcttctcgcgcatagctgccacaaggctggttcaactacagttttccctggttttatagcagtttttcctcaaaacaggacgctccaatcggttcgattgcatatccagtcttttaactagaccggactggtataggctctggttttggtttttacaggtccaaccgtcggtatggttcggtcttaataactatggcgggggtgccctgaggattcgaggtgacccaagcacggtggctagtcgaacacaagttttcaatcccttggggacctgagcactgattaattagtgccctaaaggtttaaggagagcagatcggatccggtgattacttttaaccaccactttacgtttattatagggtggttcaaacttaatgtacaactcatccacaacttgtacgtggccgcacatgcagccccttgcatgcccacatcacgttggagaacacgagacgtgcgatgtggctcatcttcagcaacattccctaggggtcacctctattggatacagtggctaataggtaggctcggggacagttttaatgaagacttttacctcccatctctacttgtcattcggtatatgtggctatcacatctggccgactagcttggaggtacaacaataatactaaacatatcaaattcagaagagtagacctcactcctacatgcatgcaatggcattgtggactccccttcacgtataaggagaattcatgccaccgagaaaaggttcacactttcatctaagctaggttagctgaacattcagtgagcaagcaacctctccttctcacttagaactttctacatcactttgtagttcacctcaccatccatgcatagtccatcacacaggagtaaagtgctacgcatccgtgtgggccgaatttgtatatccgattgtgttcactctattcgcgtaattaaaacccgaacttagaattggcagcccggccgaactcacaaagagggagtacttagctttctcactagaggagttccgtactccgacaaacgccaatatcatttgcgccatcatgttggaccacaaaatcaatgatgttggcgccacgaaaagagaccattgctagaataagtttttaagtgtctatttgtaaattaagttttcaaaaagatctaaattaaaatataaaaaatccagagcccagcttagccctaaccatgcctggtctggcccagcctggctctcctagcgcagcccaaaccgatcagctgactcactaatccaattccaaataccacacgaatgtactccactccattgatcactcatcaatcatcaatcactgtaatgcactatccatccattaattttcctcccttgattcacgtcgaccgaccgagacggagtcatgtcacacggtcctaatttctttcgccgtgtggaaggcattggatggatctccccagccacggggcaagcgaggggaaaaagggctccgagcccacaaaggacgagccgtctatgccatgccatcatcatggcaagatcacaaacttcacgggggatatatgtaatgtaggactaataataatattgcaacaattgtgtttctgcctttttcgctgtgatcattacacgggtccagccttttagggataacaatagttacctataacacttggagggttgaaaatctagtgtgtccttatatactttatgtgtatacatcttggtaggatatttggattttttttcaagccttgttcagttagtctctccaagagagagggaattgagggaattaattctacatcttaataagtgcgaaataaattaccttaaccctcgaaaaaaatcaccttcagatcccctcaaccttagcgatcaattatcccagctgagcacatacaaagtggacattcttatggtgcgggtgtttgggttttccatgtaattaaaaagaaaggccacgtgtctgcttgatataaagatcgcacgatgggtacgtatgggctcgatggtgtgttcaagggttgatgccatgccaaaccaacaatattgttgaataatagaggattagatattgaacacattatattgatccttgggagcctgtgcatataggagtacaacacttagttctcaagtaagcatagagatatactcccttcgttttaaaatgtttgacaccgttgattttttagcacatgtttgaccgttcgtcttatttaaaattttttgtgaaatatgtaaaattatatgcctacataaaaatatatttaacaatgaatcaaatgataggaaaagaattaataactacttaaattttttgaataagacgaacggttaaacatgtgctaaaaagtcaacggcgtcaaacatttcgaaacggaggtagtagatatataggagatacaccacgacgtgtgaatctcatatgtatccatgttttatgcagtcatacaccacgatgtgtgaatctcatatgcatccaacgttttatgcatctatagtgtatcacgttgtccctttttctggataaggaatgattcaaagtttatgatattcgaggtcacacacaagttaatttaataacatcaaaaagtttaaaaattgtttcaaaaacttttctaaaattgctgataaaaaatattatgagacattgtcccgttaaaaagcttggaaagcgtgatccgaatagtccatctttgccaaacgggtagacggtatcatcgctttgaaaacgtggtgagggaggccctacagagtctcgagtcttctaaactctaacacgagatgtttacagtcgattgcatttcagtttgacttttgaacctcttgtgtctgcacagaaattgaacccgacaagtgtcctgctagatagtttcagccttgatggaagccacatgctatatataaaccaaacaagctaggttagcgatcaaataaccatgtccaagctgggccaaatagttgctaatcctctgtaccgacagaacatgcccccgacacaacaacagttcttggatagagaaaagaagtttctcgtccatcaatgctaaaacagtgaacagtctgacatgaaaaaacatcaaaagatgttgcccaggtaggtcaattctgtgagaagctaatcattagcatcatagtctcaacggttatccaagatgaaagctgacaggtcaagaattttgcacagcactgtaatatatttacttcgatgaatcagagacccgtcgtacacattttgggccagaaacacagcagatgtcagttaatactagatggcatatatacagttgacattggagggagaagaataagtgtaggtacacaaaattgcctctgtggttttttatggcagacttggaggggaaagtgatggtttggtcacttttagctctccgcaatcactgatataaacagtttttagcgggcgatcccacaacgctcgagcagtttgagctctttcatcaccaatcaactgggcaaaatcattgaagaagcggatcctttcagctggtttataggtaggaatagttgcaatgctggttataacattcattcctgcacaataaattaaataaacattacgaaaagattagactaatttagtcgggggactgttaatgcataacaactattttcctaaaattagcatatatttactgggcaatctagtaagtatcatagccaaattgcttcaattgcatgcatgttaagaatggcaggatcatatggtctacggtagtctacaatgtagtaaaaggagaaaagatatggactgcctcaggcagagtttctgcagcactactacagttaacagatacaatttacggaataaatttcaatacagataaactccagaagtaaattaatttatactgaactgataatctgatattcacaagttttaaccatattcaatatgttcataagacaatgtgatctctaaattatttcataagatgtcggtgccatagtacatctttcactgtacatatgcattccaaacagatgaacctaatatctattatccacatgtgataaatctgccacttggagaaaaaaagaagcagcatcaaactatcggccttaaatgtgcatccacatcaccattctcaaccacatatcagtggagtatggcaatgctacccaacaatacatggtcccaaacactttaatgaaagcactattgagaacataatcgttcaccacatgatttgactttttgtattttatacttttttctcatttgctcaagaaaaatgaggctaataaaaagatagtaatggctacctttacatattcacaaaaaaaatgtcatacagtctttctgttttatgtaattaatatatacttccatggctatacggagagtatgctttgttaagaaaaagggggttcttcatgaaagaaagataagtggtagctgattttttttttcatacactgacttaatcagaaatagattaaaaaccactcggtcctctttttttttgggcaaggaaatcaagacagttctctattatgctagaagtatccacttgatttatactattaacacattagctcttctgtaaaaaatttcaaccttgaattgaatggactgccaatcgtgcagaaataatctgataaaaacacaagttgcaagaccaaatagttaaaaaaaggaattgcggagaaaacagttttttttttttttgacgatgaaaacagcaggagagactgctactgcgatatattaaaactatataatagttacaaattacatatgtacaaattatcatgtaaaatctttcgaattagccgctttctgttaatctgaatcaacaatatcatcattaatcatacagtggcaatactagtttccattaagacaacagaaagcaactcgtacaaaattgaagcttcatgtcaattccactggaatatatccaattaatacacttgtttaactcagtgcttgaaagtctgttttagtcgcctatgtgtgcatgtgaatgcagaacttgacaatcaaagttgcttatagaagaagaaaaatggatgcttaagaaaaaactgttggtaataatcaaatactgaaactgagactaagtagctagttcagttcaaatgagtaacactattacacttcaagtggcaatgggtcctaatgacaagcattagtgtgcctcaagtgtcatgtgaatataagttatatagttgtatgtgcgcatgcatttgttgcgtctgcccatgcatgtgcatgagagcatgccgcatgggcatgcagatgcagaacgtgggcatgtgcttttttggggatagaagggccgtgcttttaagttcttgatgcataaaacttaaatatgaactgctttgtagttaactactgccctggttgttgttgtaaagtttattaaattacaaatcaaactgtcaaagcagacatgtcagtcttaaattagctagaagtagattctcttttggggtgacatgttcagtggcagtataaatctcattgatgagttgcttggtttagttcaatctacttctgataaccaccagagatctaataaatcagaacagggaaaaacaatgaagtatgcaccaaatttgactatatgaggatgatacactctctggtgttgtttattgacaatgtggcacattgttagaacaaaccatggcaggaattgatgatgagttatactgtggtgaagtgcagagaagaaaaaaaaaagaattaatcttagtgtgataaccatccttggtgttgagacaacaaaaaggaagaaataaaatgacaatttctttacaagcttatattacttgcagaaattggtaataataaaacatctaactttatgttctgcatggatgaagtcctagccagaatacggacacaactgtttgttattttgttaatactcatgcaaagctgcaaaatttgcattttttttcttctctgttatgtactaatgttgattacttcaatgaaaacatgtttaccttagcaagtgtatataactataccaaaaggagaatggaagatgtcatataattatacttgacaaaaaatgaaacggtttgaaatacattttatttttctctgtttgaaccaaagaaaatagatttatgcatgaatttaatcatgccaaccttgcattagtagattacgcacaggtcaaatcccaacttgttcgagggaaagacattgaaattcttgcaagacagaatttaacacaaagtgtgcaagaaccatttagtaaaagttcagaaaatgaaagcaactaaccttccaatacagttccaaagacaatgttctgtccatcaagctctgggcagggccctggtccagtggtaaccaagaattcaacattgtgataattaggattgagcttgatgtcatcatcgtcatcgttctgtccaaggcacaatgagagggtgccaggccttgcatgctttagttcaaatgctttagggtcaatagtctcagcattcctcacaagtccggtgggaggttggacctcgcccctgtcacgccgaggaccttggcggccagcaacgaagaactggccctgaaggagcttgtggacaagtgttccccggtatgcagcagaagtgcaagcagctttgaagttggcagtagtgagggggaggagtcgaccatacaaaccaaaaattacacgaccaagaggttcagaatcaggacatgtagcaagctcagctcctaaagtgcggtcagagcgaaagtagctagggcagacactgaagtccatgaagatccgatctgtgatggtggtatcaatggcagaggtggatggaatgtttgcgtcatctaaggcaggggatgatgaagcgtatagaagagaagggaggacagggaggaagatgagagaccgtctagaaattctagaggattcaataggtttatgagtattatcatggtttgttttcgagggaagaaaaaaagcatggtggttgttggggtggtggtggaggctgctcagggaaacagggtaagccatggaagaagtggccctggtatttgatgaaggcaacaccatactgttgctaactgaattcttcagttcttgtccttctgacgaaacagcagtagaaaatcactaatatccttccctgcaaatgtaatagttggcttttgagatataacattactgaaattctaaaacctactgttagcctcttcgttgtagggtcacaattatcacttgtgaataatggcaaatagctgacagcccaaacaattacaattttaaaatgg

SEQ ID NO: 11518 - DNA, 13014 bp, Oryza sativa
ctgcagcccctaaagatcgatttttagtcccggttattttacccgggactaaagatagcgatctttagtcctggattcgtagtcccggttatccggttggataaccgggactaaagtgggattacgaactgggagtacaaagggtttctccataagtgaacactaggttgatcgcgagagagagagagagtagtgacataagaaatagggtagagcaaaacgagatgtgaggaggaggaggaggaggaggggaggggggatttaagggttgttcagtttgctactattttcttccacaccaaactttggtattaccaatttttagcaagatagcaatctaaacacatcccaaatactctaccgcaccttaccataccaaattttggtgatcttttagaaacttctccacacaacactatacaatagtagttggcatggtaacaaaccaaacaacacccgcacacttctaccctatcaaattttagcattatcaaactttgccgaattttgatcttaccaaaatttggaagtgttaatttcggcaacaaagtgaacaaaccttagtgcctacaactgtcgaaaatgaggggaaggcgttgcatgtgaaatacttctttcttttttctttgcgattacacggcgggtacgcacgcacaccactatacacgttacaccacactcacacactcacgaatacgtcccctaacacatgcttgaagagacgaaaactagcgatatatatttgatctcactaaattcttgttgaaaacccacttgcgtatgcataatatttatgagcgctatgattcgaactctggtggttgtcccaccacaccactgatgcttctcttgtatgtgtgaatactttgacacactagtagacgcttgtatagtgtacgtagtattggtaggttagcctaatatgagaagttgtgttgatgagattagagaacatataaagacacgtattagaaactagaaagtaacatatccaaactaaggttcgcctcgttgttttattgagctagtttggcttagcttgttaagcttacactggtggagaaaccatctttggtcggtcggccgaaatccacaatagtcccaattccacaaaaaaccgggactaaaaatgatctttagtcccggttggtggctacagtgggcatatttgatctttagtcctggttggtaacaccaaccgggactaaagatcatctttagtcccggttctagacctgtcagaccttgtcaggccccctgggatctttactcccggttggtgttatcaaccgggactaaagatctagaagatatttagtcccggttggtattaccaaccgggactaaagttcaacgcttactatataaggcttgttcgctatcctctcctccacaaccacctcgcacttatcctctcagatctcgatctccctctcctccctctcagatcgatctccctctcctcctccccctccgcttcctccccttcctcctgccatccccggccctctcctccccgtcctcccttcccatccgctcagatcgatctccctctcctcctcccctcctcctctcagatcgatctctctcctcctcctcctccgcctcctccccttcccaacccatccccggccctctcctccccctcctcccttcccacccagcaggcgtccggctgggccgcgcacgggcccagtggcgagcggcggcaggcggcagccactgctggcatctttttttttttacaatttgtgattcactaagatgtataattttatgatttgtggcatgacctgagatgtataatctgtgatgtatttggtttgtgtgtaatttttttaagatttgtgatgtatttgatttgtgtgtataagtaacttaagatttgtaatgtgaatgttttgggatgttactttgatttgaggtttgatttgggatatgtatcccacttgatttgggagaaaatacagggattaaactctagctaaaaaacaatgaaaaaaaaagagacctaatgggactgccgctaccctctctttagtcccggttggtgttaccaaccgggactaaaaatggatctttagccccggttatttcaatcgggactaaagatgggcatctttagttccagattcatagacccggttgaaaaaccgggactaaagggggattaccaaccgagagtataaatggtttctctaccagtgttattagcgagaagtctagctaggcttgactcgcgagctggctcgttaagctcattaacatttattccaccagtgtaattttaagtttatcattttatcatatatgtgtggaaacgaagaatccactaaatagtaaatacatatatatagttggatataattaaataattaattaaacaccagttgtgaagcgctgggtatatgaagatacggtgatgtctagtactcagagattaaaggggtactagataagagagatgggataaaatcgctcccatacatcgtggtgttcttttccggatggttttagccaaagaccaggttgaggcttgactcttgtgaagagagaaatgtttgggcccatatgttagctcctattgtggcaaagcagagagatattttttttattttattttaatatacatgtaactgaacatggtaccaatgctaatctatacacccttcgtaaaaaaacttaaatcttggctatgaacataaacacgtcatttgattacttttttatgatgggatacattataacttctttcatctggtactgacatagatccatatttaatacgtgtgtatgtgatctgcacactattgatgctctaacatgctaaacaagcaactcgaaagctagctcgttaagcttacaaactataagactaatttgacttggcttattaaaactagagtctattcgagccgagctcgctacacaagccaatttaaactactactccctccgtcccaaaatataaaaagttttgaatggatgagacgtattttaatactacgaatttagatagactatgtatttaattaaaactccttatattttttggattataggacgaagggggtacgagcttagagctcttcttctcgcccctggtggtaaaccgaccaccacgggatcgacgtctcgctacgctgtggcgctgcgtgcgccagcgccggtgcaaagcgtgccataccgtacctgatcgcaaccagtgaggcctgcaggctggcagcaactgcaaagcctggggcgttgcggacggagcgcagggtttcgtggaaaaccgaggcacccatccctgtcagtgtctgtcgggcagccagctccagggaataatggtcgcagctttggtactctatggctatgcaccatccactgcaccgcatccgccaaatgccgcccgggaccagctgcagctagacagctagtgctgatgtatatacgcctgttgcaatgtacgattactacgagaggaattagggagtattagtgtactactgtgtgatcctcttgttttattgtaggttgcacttctgcttagatatggcacggttgggttgggcgtttttcattcctggctagcttggtcccgttgtggggaaccaatataacttgtcttctttccctcgactcgatcggatggcttttaagctatggcaagctagatgtgtcgtagattagttcgaaattttgataaattaaccattttcaaaaacttattttgaaactagatcttgtaaaaaaaactttaataaaaactgaaccatgacctcagcacgaatcttagttcctatacttcagcgccagtggcgcagctagaggggttgccatagggtgccaacacccccctatccaaacactaccaccactacacccccatgtttttactctatattaaggttagctaagataagtatttatctagtttattttgtgtagcttgaaagtattatcagtttagttagttagcaagtctaaaaatattagcaagaaacatgatctacaaagttaatttgtgatttctcatctttttcaagtaaaatagatgatacttatttgtgagattattcaatagtttacattaaaagaatttagcaataaagactagttttaaacttctaatgatattattaaagagctaaaattcaagtttttcttaaaggactagtttacacattgcttgttattgacggtgactatttgacctcctttgctatcaatattagttattcggtatcatggtttatcttcacccccacacctcccccgccccgccccatgtgctcacatgacacctgagctgatcccctcgtaaacatggtaggtgcttagcaccaaccgctttgacgttcacaaggcttgttggtgctgaaactggggacttagcattgcgtgcgaccaaccttcttcttcctctcctctccttctgtgtctatgtgcgacaacgccccccccccccctctccttttccccagatctcctcaaatccaccccaaattgaagggatttcagggatttgttgggagattgatttgcaaagtaaactccttccaagacccatctttctccatgtattttggttgttttggttgaaatctaaattggggaatcaatgtgggttgggatgaagtgtggtagttccgtattgatgttgctcaggatgattcatgttgatttttgtgtgggaatgggtagggttacaacttataattatgaaatttgattttgtgtgtgtgtgtgtatgtgcgatgtaatttatagtagtttgaatgtgttaagttgtatttcaatgttggaattatcagtagttgattcatgtatattttttttacttttgaaaacattaggactactagtcatccacccatgcgttgcacgggctattgttattggtacaataaatactaaaattgtaatcatatgttaaagtcattggttatttatgaaattattaagcttaatgtttctaatttagttttctgaaagcaaattgataaaacagtaaacttatagttcgagatcgatggtacattttttattaattaattttgaattttaaaattattaaattttataaaaactaaaactaaataacccttggtaatccaattcaatgttttatataactatggtcattagatatgtacgggttgcatatagatatttttatatgccaagagagcaggtcttttacaattatatattatttgttacaaatataatcgttgtagacaataagactaaattattaatttgtaggaactgttgttctaaataatataatttgaacacatgcaaaatttgtatcagtaactaccgaaatgtagacctacctcaatgataaaaagatgaatctttgtaaatatgatttcatacagtctgtagatatgaatctcttcatctataaattaatgccaaaaaaaagattatggtgaaaactattcaaatttttaaatactttatttagtagttcaatagtaaactaaaaaggtacaattctgaactaacgatcaaatttttcgtgttctgaaaaccaacttttgcaacaatcaatatagaacgttcaaaaaatgctatacatcattccaacttcatgcacctatctttatttagatgcattattagaggttgtgtaattcaccttaattcaatgtctaatttaagtgttgaaggataaagactaatacaaacgatagttattctaaacggatggctaaaatatagtttgtttgaacccatagtagaaaattaaataaataaagaaaaagttattgctacatttcaattgcctgaaattagaggagagagtcaatgccacaggacaaaatgagagtgtgccccaagtgcaagaacaaagaggagaagatatacacacacacatatattacgatggggtaatataggtagctataaaaactatcctaacctaatcaaaatttaaaaacaaaaaacactcagtgcactataaaaagattcggtatagtaaattggcctccacgttccaatttaattttgatttgcatggatcgatctatctttgtgatgttagcgtatttgtgcataatattagtttgtaaacatagcatggattttcccccaaaaaagcacagactaagctaatattgggttggatcaaaccttggttaagttgatcctagctttatacatatcaagagcgaggcaatataatcagcacggctcatggatacagatagaattagtaatacttaatacatgaacatacatgacttactaccaaggtttggatctgattgatggcatgaactatgacgatcgagcctctacaactgctggcgcgcggctacatggacgtcaactgcccggatgaatcgatcatgcgtctttccatgtaggccgcttcttccttgcatttaggctttagctccctattgatgcccatctgttgcatatacccatgctgatggatgcccaactgtcgcatgcatgcctgactgatcgatttccatcgataaattcctgcatcgtgaaacagatctaatcgtgttccccagtgctataactgccaatatcatcttttctctcgcacaatctctctcttatctcctcctccgtgaaggggtggaaaatagattgatttgaaggtagcccacaaagttacacacacggattggtttttgcaatctactgtgactataatatcaattacttaatcaacggttagatttttttggttaacatgggagctcgtagaaagtgtccaattagtataggtatagatatatgtgagatagggtttgttgcaagtaaattaggcatccaattcagagttgtaataggcacgatgtctaaaatgttttgaactactacgctcttacgtttgttagttttccgattgatgtgacatttattagtttacctcctatatgtattattttgaaatgctctatttttatttattggttacatattgtagatggatagattggtacaccttcattttggtggttgtgtggtagagaaaagaaccgatggaagccattttgagatgatgattgttaggcagctagtgctcggtgccaaacccacatatatgaggtaatttttcgtatgaaggacgaattgggtaggatttataagtcagttggtatacaagaaatatatgatgttggagccgatcccatgtcgtataagtatgtgttggacttgaacagagagatggaatgaaaaacctatgtggatatagtgttgggtcacaattcaactcgtttgaggtgttttcttggaagaaggagtgcagggaatccacaaatgaattcttagaccttaatcgaagtatgtgtgtacaatcccccagtattgtcatgaaccgaagaacgatgtgtttgtggcggatcagaaggaagaggagtttaaggagaagccaaggtatgctcgaaaggaagaagtgattgaggaagacgtcatggtaggggaggaagtaccagttgaggaggatgtggaggtataggagaatttgtcagatggtggatgataatcatgtagagaatgagatgggaggtgaacttgatgataggcagatggcttctaactcgaatggtgatcgtcctgtgggcaagctgttggaggaagagaggaaggtgtttgaggaaattgtaggttgcaattctgaaatctctcaattcgaggatcttggcaatgcgggatgggtagttactgacaaggatctagaatactgataaaccctaagcaccactcaagacaatcactgttgttggcctgatctttcgatgagttgatgataactacgatttgggagaaatgttgacgacccgactacaaccgtacaagacattgcgttgcgccttagtgatcgatacacctctccatgggttgttgatcttgcctgtgcaaatcaaccctattcctacaagcaaatcaaagaaataagcaagaacaagataaaagcaatctgatattgcaaataggaattgaatacaaatgataagttgggattccgaagaacaagtagacgggcggtctagccgacatgcgcgctgcaagcaaataacaatggctaaactttaatctaataaaacccgagaaaaccctgaaggggtacctagctatttatagaggtgagaggacgaccaagggtgccctagggtcgtgctccaccagattggggcggcatccaagacaacccacttgggctagggtccaagacaaagttacatgcccataggcccactattggtgatgcagcaccttgtttctttgattgcggataactgagatggagtttggtaatgaggctcgatctgttggaaacaggactccgagatctttccatcaagtactcacaggctgaaaacggaggtcgtacgcatattttgcggccgtttgaagtcagcaatgcaataggtggccgaatcgaattctagcacttggaggacttgaccttgatgacttcttattgatccatgatgtgagcaatggtcgtatcaatggtagccatagtcacatcaacaatggacccattaatgaaatttgggaggaatcgaggaaaggtttggaatttcgatctctagaagacttgaaactatggctgcagagctactctatccgtgtgcaccgccattccttgtgaagaactccaatgcatctattaagtacatggtggcttgcctcgatccaggctgcaaatgggaggtttcttcaagaaagagtagagctgataggtagaggataactggtgtatgtgaagatcacaagtgttgtagttctgaggcattgggcaacacttgtagctaacattaagggtaacagcttactgttgacggtccttaaataacaaatctgaccgataattcctgcataaaatgaaatgaaataccaaacttagtagcagtgtttattactcatttccacaagcattggtgaatatttgtatgcaggtgattattgactattcgtagctgtaagactacgcaaagagccatctgcatgggagccaacctcaactccatagtgaatggtgttgagctagtacacctcagcaccaaatgagctggcgctgaggttaccagctcaactccattccccttagtgtcgagatgttgaatctcggcactagctaattttgcgctgagatgtgggcaccgagcgcgccacccaacacaataccaatgttttggtggctggttgctacccagtcctcaacaccaaatagaatggtgttgagccctggatagtagccccctactttttttccttaaatcctcaggagggtagcacattacgggttttacaatgcaagtgttgacggttcttaaatgccaaatatgcctatcaatttctgcataaaagaaataaaagaaaacaccaaacctagtggtagggtttattactgaccattttccacaagtattggtgaaatatttgtatgcaggtaattttgaatgaaaaacacacctgccatgtgaagaaatacagctccagccactcagacatgagcataaggattggagagcccacaaatagagaaaaccgacttaatcgagctaatccaccatgcaaccacacaagggcccaccaagcagccactcaagcgaaggagcagctgagaggtgggaccaggagttcggctgaccaagggggtcggccgaaccgaccttggccccctctcatcctggccctccacgtggtagcttttcattggatgctaatgatggttgtgggtgaaactgacctacataaccatcataactgcctataaaagagtgtttcatcatcactctcaagacacacatctcaggtggagatctctaaagttcattcaaagctactttctagtagagtattggaaaatagggagagggtgaggggaagttctggaggagtgccagagttgtcggcactctctcctctcttgtacctcggcatacgcttattttatacaagtgagtatttaagatttctcttggttatttaattttcttgtttaagtaagaaatattctcatcattgcatattcatcgcttagtatttaaattaagtgctctagtactaagactctagatgaagaaggatgttcttgcgcgaggctagagtagtaattgataacgtggacatggtatctaggttagaggtttcctttgtgttgttgcgtgctccacgtgttgtagaggtaggcggcaggtggtgacaaacatgtccgtcctttataatcttccatgtttgtgtatgtcatagagctgtaggccacatcacttggcagactagtggaaagccgatacccgaagcaattgatagatttttatcctaacatatttcgagaatcttaacccacatgaatcatctctgtcctaagcattccattggttgtccttggacgaacccatttcttagattctacacacatgttccttgtgatttgatacccttcgaatactctaaggagaaatgctacaacggtatacgtgcgcttgcggatttatctgtgatcgtaacaaatatcaatagaaagcaagacatgtactaatgtcttatatatagatagaatatttcgagttggaagcacataaattagttttgataaatcaaaaaaacaaaaggattgaatagttttgacatatcctcaattttgttcaactacaaatgtttcaacgatcacatgcagcttaggggaattaaatacatcctactaggtgcaacgggggtacttgcccttcctagcggcctctggtccggcttccttgcatgcttctccctagcaacctttctctccctttcagccgcaaggtcctccttctccttctgttctttctccttgacccacttcttttttctattttgaatctatgcattcctaaaccagtagtgaaagtcttcttcccaccaaagctcccccctgcgaagatcctcgacatctttcaggtgggtctccttatcgatccacaccacaaagtcacatagaggaggtggtggcttcggtacctgcatagcagacaacacactatgaattcattctacaaattgcatgcataacaagagaaatcatcaggaagaaaagaatttacctctatcggctttttcgacttttctttctttccctttggctttggcttctctagggtgtatgtgtagttgcagctcaaatacctttggtgaaatgtcatctgactgtcacttattgcaaattgccattcatcgctacaccaacacattagacgaggaatacttgatgaaggttatcaacgagggctataccccaccaaatccatcctagcaaacaaagcatagacaaattaaaaaaatatcaaacacctacaaaatactacagcatcactacatgaactcacaagtattataaccacccccaacaaatcattcctaaaaaacaatcaggtcaagtaggtcaaaacaattgtctcctaatatccactatcctaaccgtactaatatccacaaatgaatcaaacaaaccaagccaactaggtattaaacaaatcccactaaaaaatcacaaacaatggacgataaaactcaaaccctaaccatgaactcgaatttattaaggcatgagagggtaacacaagctcacaagatccaacaacagatttgagatagtgagaggggaagaagtaaacttaccttcgaaattgcctgggctcctcgaaaaccctagtttagttaggcaaaactagactgagatgtggatggcacggggaggaggatacaaagtcccctagctcagcaccaacgggactagcactgaggttgggagcttagcaccaagacaattggtgatgaggtcttgccacgtcagcgaggggatctgctttggcatcacatgggcagaggaggtcaacaccgacatggactagcgctgacccgtatgacctcaacgccaagacgtttggtgctaatgccacggtccattttttgttaaagttttttttttttgtacggtctagttttggaatagttttaataaagggtcaatttgtcaaaattttcggtagattagaactacttgggttaagaaaagttaatattgaaaacacaaattcccttcagaaggaaaaaagaacatcaaacgataattggggatcgatataggtaataggggtaagtttcacgagatccaacaactgttagtgcatatatatttgcaatttcctacatttgttctacaaaattttcaaattaaaactccaatttctcgctatttccttcgctatcccacttttctcccatctgcatgtttatcttgtgcctaaaaaaacctcatccgcgccaatggactctcctaccattagggagtagctgaccatctctccctctctcttgccggcttcttttttttttattttattttcaaaactcatgcattttgtttataaagcagtctaaaaatatatgctgtatatccttaggtacaacaacattacatctgattaaatgaagcaacaccatggctatggctgatctaatcaccatccaaaaaagagtactttggaagcaatctagaaggtgaagctctcaattggaagcagaccgcagggactaatgcaattgattggggccaacagcaatgccacaaagccaaggtgattgcgaccaaggtcctcttcttggaacatgcaactcgttgagggttcaatcggcgacccctactgcctcaaacttggcacttgttaaggatgattactgtgggctgtagatttttgtgctacatttttggctattctaaaatatttttttacaataattgtttgtaaaatattttttaaaagggacattatgtaaatatcttttcttataaatatgttgccaagagcctatttgtagaaaaaaaatatttatattttaagacttttaaaaaaaacttttacaaatggatcctcaaaggcggtctttttggtagcgacccccttcacatcagcgacttaggcttaattcggcagcatgggttccaacccatgtaactcgtatttcgcgcgcacgcttttcaaactattaaacggtgtgtttttt

SEQ ID NO: 11519 - DNA, 969 bp, Oryza sativa
ctacatatcaaagagccatgaattatatatatcataatctgatcggctggttggttgaagtttatattgatgatgtggttgttaagtctaaagagatagaggaccacatagccgatttgaggaaggtttttgagagaactaggaaatatggcttgaagatgaacctaacgaaatgtgcttttggtgtatcggctggccagtttttgggatttcttattcatgagagggggattgagataactcaaaggattgttaatgcaattaagaaaattcagcctccagagaacaagacagagttacaggagatgatcggcaagataaattttgttagaaggtttatttctaatttgtttggaaggttaaagccttttacaccattgttatgattgaaggccgatcaaaagtttacttggggggtagagcaacataaggctttggatagtattaaggaatatcttagctatcctccagttttgattcctccacagaaagggataccttttagattatatctgtcagccggtgagaagtcaatcggctcggtcctaatttagtagttggaagcaaaagagagggttgtattctatctaagtcatcggctcttggatgcagaaacaagatattcccctgtggagaagttgtgcttgtgcttatatttgtcatgtacaaggttgaggcattatctattgtccaacgaatgcactgtcatatgcaaagccgatgtcgtcaagtacatgttatcggctccaattttgaaaggaagggttggaaagtggatattttccttaacggagtttgatcttcggtatgagtcaccgaaggcagtcaaagggcaagctatagccgattttattgttgaccatcatgatgattcaatcggctcggttgaggtagtcccatggactttgttctttgatgggtcaatatcctcttatgggttgaggtatcgggcttggttataatttcccc

SEQ ID NO: 11520 - DNA, 710 bp, Oryza sativa
  unsure (1)..(710): unsure at all n locations
ttactaagtgcagaccaatcgttaatggtaacgaacagcaacgctcgtaggttaaatttctcatgtttgtcctcatcccacacagggacgccctctttcctccacatcactttcagatcatcaaccaatagccttaggtataaataaccaatggtcttaggtacaaatcaatgtcgttaccaggttgctttgggccttgaataataatcggcatcatgatgnacnnnngcttcatgcatagccaaggggggaggttgtagatgcacatggtgaccggccaagtgctatggccgctgctcatctctccaaaaggattaattccatctgtacttaaatcgaacctcacggttcatgcatcctctccgaagtctttaaatgttgtgtcgatatttcaccactgcgacccgtaggtgaggtgtcttagcatcccgccttgtttacgttcttctgcatgccaccgcatcattctagcatgtgatttgttcctgaaaaaccgcttcagccgtggtattatagggaaataccacatcaccttagcaggaactctcttctttgaaggctatccgtcaacatcacctggatcatctcgtctaatcttgtatcgtagtgctttgcaaacatggcatgcttctaggttttcgtactcctcaccgcgatagaggatacaattgttcagacatgcgtgtatcttctgtacttccggtcctaga

SEQ ID NO: 11521 - DNA, 666 bp, Oryza sativa
gggctctccatcttcaattggctgtatatcagagtcggacacttttagaaaatctccatcccaaacttttctagataagcaatcgagaccatccatctcccaaagagctaaatcggcacttgcaacgttgactgacctgtcggctggcacgatttcaattttgtcgccttgccactgaatcaagcattgatgcatggttgaaggaatacaacaattggcatgaatccaatcccttccaagcaacaagctattggaacccttcccatcgatcctttccattgatgacaaagaatgttgtagggatagttttgctgccgactgtcagttctacattcaaaactcctttggtttctgatggattaccaccaaaatctttgagcaccatgtttgtcttgatgagatcctcagcattccttcccagcttcctaaacgtagcataaggcatcaaattcactacaaccccaccatcgaccatcatcttggacatcggcttcccattgacatagctatttatatacaatggtttaagataccgattctctatcccttcaggattctcaaagactgcttgttctggtgatagcatcaatttagccgattcttcttcaacttcatcaacatcggctctgcttgaccccaaactcagcaggtaacgtgaaaaccatg

SEQ ID NO: 11522 - DNA, 1988 bp, Oryza sativa
ttgcagttgaaatacaggcaagtatctgatagatacttttttcactgttcaaacattatgattttggttttaccagtcctcacaatactgatattttcttatgtgtttcaacagtgaaaaagatcaagctgagaacttgatgattgttgacctcctaagaaacgatcttggtaaggtttgtgaacctgggagtgtgcatgttcctcgcctcatggatgtggaatcatataaaactgtacataccatggtaagtaccattcgtggaaccaaaatgtcggacctaagccctgtcgattgtgtaaaggctgcctttccaggaggttcaatgaccggggccccgaaagttagatccatggagattcttgattcacttgaaactagtccgagaggaatatactcaggatcagttggattcttttcatataacaagacttttgacttgaatatcgtgatcagaacagttgtcctgcacaatggagaagcttcgattggggcaggcggggctattgtagcattgtcagatccagaagcagagtacaatgagatgctgcttaaagcaaaagctccaacaaaggtggttgaagagtgcagtcaacaaatatacaacccagatcgttcggattcaatgcagacaaccgtaagttagaatggagggtgaaaacgagtcttcttatgaaaacacaaccagcattacaaggtttggtatacaatgaccatcagtttggatctgaaaaattcgatctccgctgttggtgcacatattaatggctaaactacaaggaagtcgcagcacacctattctataattgggaattctaaaagcaacaaaaggacattttgctgaaagaaaggtgcctatgccaaggtggtgaaaagcacattggagcaaaattcatggtgtactacaatgtagagttagactagattacagctgacatgccttctccacaaaacaacagtgcacatgattttattgattgattgattcccctattgtggtgattgcactgtgtaataataataaactgataaaagaaagaaacccatactgaaatgcatttcatagcagattcatatatatatatattggcatgtatttgcaagattgcacatgtctcacctgagttcaaatatctgaaatttaccatgtactgtttctcaattcatgctagtattgatcctactggtgattgccccatcttgaaatttgagatttgagggcgagatggctgtttgctaatggcagcacttggttgagcatggctggcatgagcactgaacaccagatgtaagcaagggttgtactgcaaccagatcagatttgtgagctgaagaaatcgtctaagattgcatcttttcaactgattccaattccaaattacaatgggcggccggcctggcacgccattattccaatagtgtttatgaatcaattgcgcacgtcgcattatcggattgtgtcgtgccatcatcccagaatgtttctcatacgcaaatacacccctgtgagtttcacaacttttcgtagcctttttatctctgctcatgaatatttgactttaggacaagatttgatcaaatttttaaatgttgataataatgactcatatgtttacttttaaaaaaaacaaaaaaacgtgtggaatttctttgaaaaatgtaaaatttgctagattttacaaatttattttagtataacatcaacggcaaaatcttcaaaagtttcaatctttacttaaacgtcgattatttttggactgatagaacacttgcaattttggatggcttatggttctaagtttgggaataatgaaaaggtgagggagtttagtgtgattttgggaggatgagaaatatatatatggaggcgaaaatttaaaaaatggagccactcgcgagccacgactcgacctcgccgcggcggcgacgacgacgacgaccagcacgcactcgcaccggcggatcgccggcggcggcggaggaggaga

SEQ ID NO: 11523 - DNA, 8513 bp, Oryza sativa
cgcccccatcaagagctgttcgtcgccggcgcccgtaagcagcgtgttcagggagttccgcgacgcggcgccgtcgcccggaacgcccgacgccgacgccgacgtcaccgacgacgactacctcggggagcttgatttcgaagacgaagacggattcgacgccgactctttcctcgccgtcgatgacggcgtggccgagggcatcgatagaatcatgggcaaactcagcatggagaagaactccgcagccgcgtcccgcgccgacgccgtcctgtccagcgccgccatacatccatacattagaagcctcatggtgctcggtctcgggttccggcaaggccggctcaacgccggccaagcactgaagcggcatgacgatgagagtgattggtggatgtgccctgccataccagtgaaggaaatcgcggcgcctcctgcgccatcggtggctatgccggtgccagtgccgatgccattgcaggcttcagataagaagaagaagaagagtaagaagaagtcactgaaggaaatagaaagggataatgccattgctgttggtgaatgtaagtttggtgatgagggaactctgggctttgatcatggtgatgctggaatttcggcgctgaaggacccaaagataggattgggcctgaatctgaacactgaagaggtgctgaaggcttggtgtaacagtggttctgttttcgctggctgcgatgcacttgaatcaccaagatcctcctctgatttgcatgtaagtatttctagctcatttgacttaaatctcttttaagatgataagaagaaattttgaagtgttgtatacttgtattataccttagttcagaattatgtttcatactgcttggcatataaaaactttaggcttttgtgtggcatatgttgtacaagtgcttgaaaaaccatttatgatttggttagtattactctcttcttctgggactattattttcttttgaatcaagccagcagttctattatgttatcctcatgtgtaccataattttgtgtcaatacacttctttaggagaaggggaccatacgtagattttgttcgttcaaatttctgctatataaatgtaaaaggaaaacatattatccacaattccaatcatcctatttttatgtgaaaatataaacttatccttgataattgtaatgatgtggaaattctcaagatggtatatgaaaagcacaacatgaaacttgataatggtctcatttatagagggaattttcaaagcctataagaagaactataagaagaacagaaaacttcagcacgataagtgttatatggctcctttgtttgtctatgtctgaagtaaatccttcttcaactaatgggttattacaattagtactaaccactctgaaaatatttagaacaaggagatgccagaacagaaaatcaagttttttttattctatcatgggggagtgattatgtgaaatcaacttttggtctgactgctaattactattacctccgtttcaggttataagactttctagtattgcccatattcatatagatgtttaatgaatctaagcatgcatatacgtctagattcattaacatatatatgaatgtgcgcaatgctagaaagtcttataatatgaaacggaggaagtaccaattttgatgaacatgcactgtcacgttaaagaaaactgctgtttcaccctttacaaaaaaaaaaaaaaaaaatctgctgttactgacaaactttaacattcttcatcgcaggctaaacttgcagacattgatctatttttagataataatacaagcggtgttatccgggaaggaagcatgctgaaattgcggcacaagcagaagcagtgcactcccctcctctccaataagacccggtatcaatcgcggaaggtgaatgctgaatgtcggcctcgggtcaaggcaagttctaagaactcattcctatgcaaacaacttatgcaaaggcaaaattgataactgttccaaatcaatttccacaagttttattccccatctctctaaagtttcttatgtatttgtctatgtttttggttctttgcaggggaagtatgttagccaggcttctcttcttcaacaagcctcagagaaagagaggtagaaaatgataaaagtcctcccatggacatttttggggcctcactctccccctcctaaagagaagcaaatgtgcttctctctttttcatttctgcactttaatcatgtaaagggtagagatgcctgtagagtggcatgttgctatggggatcagataatctttgtccagttctccagctataaaaatgatgaggttatcacccccagttaatggagtagtagtattttctgttctgttctttcatcttaatcctctgaaaggcaaaagaagagaaaaaaaccaaacagggagaaatgattatgagatgaaatttgttagccatcatgtccatatgacgcctgcaaagccgtcagagaatagaagctgctaaaacacctctgatgctctaaaattgtcaaatggagtaaagtttatccactgcgcctgaatctggaaggtttcctgtctacgttcagagattcccctaatcaagatttccttatgtcttactccaatcgaaatggcttgtccaagttgcaggctttcagcttggaagggaccaaaatgctgtagggttggtgaagattgggtatttgggttggtggagattgaaatcctgtgctttggccatttctatggtctcataaatatttgatgcttattagatttgttttgagaagtacaattatagtatcatagtaataaacttagatagttagagttctacaaaatacagttctgaatgtcaaatactcaaatatttacaaccagatcgagtacaaaaaatagtttgattgaatggaaaatgaattaaaaattcatactgaaaaaaaaatgatgacctaagatccccttttgttctaattaagatatagattttaccttgattttcattagcacacatttcaaactgtatttcatacatatagaagttactaaccccatcctgaaataaattcatttgtcagccatctcacaatatcacacatgccaataaacacaaaatgaattagaatacctcagttatatcatatcccaatacaactatttttatattttatatactcccaatataattattctatatttttataaactccaatacagtaattacaataaaaataaacttgttttaaaataaatggtactccctacgtcctaaaatataagcaatttttagtacagtagcaagtcaaatatttttaactttgaccattaataaaaaaataaaaagatcaatcatataaaattaatgttactatgtttatcattaaacaaattattataatatatataactttttttcatttaaaacatcttacttttatagatattgacatattattggtcaaagtagcatctagtagaccgtgtcaggtctaaaaagaattatattttgaaacggatggagtagaaaataaaacaattctaaatgaacttgagggaggaggaagtagcatctttggggagcgagctcctctaacgtaaagttagtgtggattccttagagcaagtttaatggtatagccaactactagcttcaattcatttatagccaatctaatagctcgtccatacaataattacacagtaatacactattaatatctggtcccacctgtcatatatacactgcgtcttgtagtctgtgctacagctagctacaaatctgtagcacgctgctcttctctcttcttatttatcttcttaaaatatatttgcaactggcttatagtctgctattgtagatttgtagccagctgtagcacggattccaagacgcactgtgtgtatgataagtgggaccgggtattaatagtgcagtatgtaactattatatgaatgagctattagattgactataaatgaattagaactattaattggctatactattgcccttgctcttataggtgagtcccaccttcatagcccatatgtcagtggcaacgctgtcgttctctctggagagggagacggcgacggcagtgatggcacagccgccaagacgataggaggtgcggtcgccaaaaaagcgcaaacccagattctcacccttttataaccattcccccccaccaaaccaaccaccgccccaaaaaatacccgccgccttttctcccctccccgccctgatccaccgcacggccgcgcgcgcgccacgccggtgtggagaacgatggccgccctccgcctccccaccccgccgccgccccgcgcccccgcgccgtggctccattcttcccaccgccgtcgggttgcggcgccgcggggcgcgggcgggggcgggggcgggggcggggcggtcccgccgccgccggtgaggacgctcctgatcgacaactacgacagctacacctacaacatcttccaggagctctccgtcgtcaacggcggtgagcctccgcctcgccttccctctcgtgaaaccatggcttgtgattgtcactgcttttgctcaacgtttccatggccggtgttttttttcccagtgccgccggtggtggtgcgcaacgacgagtggacgtggagggacgtgtacaggtgggtgtacaaggagagggccttcgacaacatcgtcatctcgcctggcccgggatctccggcctgccctagcgacataggtgagcatctccacttcagttcaatcgtgtggaatcagaattagaaattgctgcttgtgcttgttcaccatttctacgtttgtatctatgcaggtataggcctgcggatactttgcgagtgtggagatatacccatcctgggtgtctgccttggccaccaggtcgattccttttttgtgttaatccttgtgaactcatgatcagtcctgtaaaatggaaaattcatggacaatttggtggtaggttgaactgaaatggccgttttgttttaccactgcaggccctgggatttgtccatggtgctaaaatcgtccatgctcctgaagctatacatggccggcttaggtaaggccttgaactctattacatgcttaatactttcagctttctgacctgtacagcatttattttttatcttgtgcaattgctatggattagtgtgtgtcatgcataatcttctaagttctaggtgttctttcagttaagtagttaacacatgtcttgattttgataccccttttttttatgtcagtgaacttgaacacaatggatgctacctctttaatcacatcccatcaggtataaactctggattcaaggttagtgtaccactcatgttgctagccatattattggggtttcagcctctatatgcaccgcaaagaacactctacttacagttgttatttttcaggtagtgcgctatcactcacttgtaatagaaccagactctctatctgaggatcttatatcaatagcatggactgcttctccaaaaatgctctcattccttgaaagcgataagcctgatataactagcagtaccttgtggggatcattggataacttattcgtaacaaaccagtcagagtgcagtaccactgatggaaaaatgcccagcataaacgatgcaagtgagttagatggctacagggttctcatgggcgttaggcactctaccaggcctcactatggagtgcaggtatactgtctatatctctgcaatgttttttatttctttttttcactattcttatatttgattaccgtcaaattcagtttcaccccgagagtgttgctactcattatggaagacagatatttcaaaacttcaagaagataacaactgactttggattacagacaccattgcttcaggaaagaaaggttcacagtattggtaaactggaaagatcccaagtactaaattttttgaagactacaagtactatatgtgaacaagtattttccacgcatctcctttagactccaccttattgactttcttattgtactgcagatcagttctccagatctcaagaactttgttgcaaatgacttgttacattctgcaaggttgaaactttgggattctgttgggccttgtgctcttccaaagcgaagcagtggggacaaatgcttacggttgcaatggaaaaagattgataacttcctcaatcgcataggtggctctgaaaacattttttcagtgctttttggccatcatagcgctgaagatacattttggctggatagctcatcagttgaccaggtgctaattcagctagctcttaatatcgtttagttctgtcctgtatagattttatctgatgttaaacgaagattgaagggttttgagtctattaacaaaaatgactagatgatcatggacatgtggaacttcactgcatgaagaaacaaaaaaagtattcccctgattcaatatacttaatttcttcattctgacattctggcagatatagtctgcagaaattaaatgagataaagttattgataatgatagttttttatgtacatgaattgagttggttcaaaccagtgcctatttgacagagagtagtagatgtgtcaaaacttatcactgttatcctgtcattttctccccctcatgaaggcaatgcatccacttttatgagttgagaggttttttcttcaaagttgtgatgtggtgctacttgcagaatagggcacgattttcattcatgggcggcaagggcgggcccctttggaagcaaatgacatttcaccttgccagtcaacggtaggaaggcactttcctgaaacagaagaaaaacattctctatgtatttatataaaccttcatgttatttctgattcctcctatttcgttctagagccaattgtggaggaaaccttactattcgagatgcttatggttgtactgtcagaaactttctcaaggatggtttcttggatttccttgacaaggtataggttgaaatctatgtatcctaggacctagatatagaacttcacattttaatctaaccttgtattctggtactatattcaattatgtagtcagtttcatactttcattttgctagtgcataaatatgaagtttgttttatgtcatttgtagataggagaccactttttttttataagagctatattcaattatgtagtcagattgattttgctagttcataaataagaacttttatgctacttagaagtaggagaccaactgctgtgctataagaaagtgggttatggaagtccgagtgcaaatttctcaccagcacgtatgagtcatctcggtccattcacatatgccagcacaatgatgtgtttgactattatcggaaatgttgggggaaaacatgttgttttgttctgggcatctcagtataattgtattctgcacattatcctatccttgagcttatcagctaagcagactctatctagctatatgtgtttgtgttgtttaaagctttataattccaactaatttacaccacaggagatgcaatccattcaatacattgaaaaggattatgaaggacttccatttgacttccatggtggatttgttggatacatagggtatgcagatttgtttttgcaattcatatgctcttttgtaacttgtattggatatatatgcatagttaattggttattatatgttgtactgtcttgttttatccacagctagcttattttttaaaattaacatgtccactgttttttcctggatatgcgtagtttgttactccttccgtccacttttatagggcttgttttgatttggcatagtcttcagaattaaatttgaccattgagttatcacaaaatttattgttaatagctacaaaacggtgcaatacacgaatctattgttataggttttgtacactaagtttatgtgtaatctgattattgttgttcaaaacataattagcttgatttttgtaagtacacatatgctttattttttgtggatgaaggagtattcaactttttttctcaatctgtgctctttcacgtgtttgacttacatggttgcttcacttttttcttacatggttcattacatttccacttgtaccagatatggtcttaaagttgaatgcgatgcatcatctaatagtgcaaaatcaagtacccctgatgcatgcttcttctttgctgataacctagttgtggttgatcacaacaatggggatgtgtacattttatcattacatgatgaatattcttctggtaatggagatggagattaccaaaactcaatacatagtttatggttagcaaatactgagaagaagcttctcaggatggatgccatggccccaagattatcgatcaatggaaactcgtcgatcaatgggaactcatttaccatatcatccagtgtgaataagcaaagatttgtcatcgagaaatcaaaagatgaatatatcagagatgtgcagagttgcctggattacataagaga

SEQ ID NO: 11524 - DNA, 13542 bp, Oryza sativa
tccaccccacaaaaccctaatccgatcgagagggggcgcagccagtgacgggaaacgccaccgccgcgccacgcctcatcgccgggacgtctacgaccaccactgccgcagccgtcatcaccgtcgacctcaccggcgccgcatccacgtcaagccgcgacgacaacgacgatgtccggcgcctcttcctccacgaactcctcaaccggtcggtatctaaaccctctccctttcatctacaatgtcgttcatcaaacccaaatagaaccacccgactagatctaacctaggtgatcctagagcaaagtctaacaaaattgttttggcttattaaggaataatgggcaaacaataagggcaatcccaaccctccacttaggatggtgtatatggcattaactatattgccatgtaggacttttagcttatgtgacactatattaattaagagagagtgtgaagagaggaagaaactaggtctcatgcaagacacagcttcaacacgagaacctatacactagacactatcaagttttgcattgggagagaatagtgtcttcataatagatgaagaataaatatgattggtagagaagagagatgatatatttattaatggcccactttaagaaaccatggattgtagagtgtagtttctattatgatgtcttattgacatggcaccatagacactacttatggacactatgggttgggactgccctaagtactccctccattccataatataaggcacaatcatttttttagatgttcaatagtactccctccgtacttgtaaaggaagttgtttaggacaacgacacggtctccaaaacacaactttgacttgttgtttctataaaaatatttattgaaaagtgatatatatatatatatatatatatatacttttgtgaaagtatttttcaagaaaattctattcatataatttttacattttcaaactcaataatttgagagttattcatgatttatattcccaatgtttgacttaaacattgtcctaaacgacttcctttacgagcacggagtgagtacaaggtatgcatgcatgtaggcaattaactatgaccaattttccattaaattattactttttaaaattctccactctcatgttctctaattctattggatgcatgcattgtatttattaggatgatccaaactacaagatgataataattattttcttgatctttaggttagggatggttatgtcttatattttggaatggagggttacctagcagtacagctaataaaacagtagtactactgaagctagtagctaagactgtctccaacaagtgacccataagggcacccaaacccaaaatgagtctccgatagtactatttcagcctccaacagagtacctatacagaagacccattttgcgtgttataagaggcataacctaaatctgagtatcctctctcctgaagacctatttgcagtaagggttctcttttaggtcttattgttggagaagacaaaaaaaaagtattaaactctttgactgtagtgctatacaaacgtgaaatgggtcttgtattttgggtttcatcgttggagatagcctaagaaggaatagcaacggcaaagctgtcatcggttcgaagctgcccaactctgcacgttcactccgatgtgatccagtgccaatttgccattaacagtactccgtacttagcttcgtcacatcacccatacgtacggtacggctgatgcaatgcatgcaccatgcagcactaagtggtgtgtttccttaatatacttgttggacattaactagatcatcgaaaaagcggcgtaaccgcctgccaaatcgagcaaaacgtcccttggatgcattgcatacatgcatggcatgcatactctctcgtctcgccgtcatcatcgccggtcgacgccgccgccatcaccacatatatactcttcgctcgatcgtcgtacgtttcgatatctgactagctccctaacaatgacgcaacgcaaattgaatcaggtgagccgtgaacgaaacgattaacatttacggtacgaattaggaattaggcatcgttcgtttaggggtgataggggagattggctctcgttttccgcgcgcacgcttttcaaactactaaacggtgcgttttttacaaaaaatttcaataggaaagttgctttaaaaaatcatattaattcatttttggaatttaaaatagttaatacttaattaatcatgagctaatggctcacctcgttttgcgtatcttcccaatctcctcaatccccttctcctcaaacactcccttagtatacatacattataaacctaacaacaaattaggtttatactaatttgttctataaagttgttggagaaaccgtgtttttcacgcatatatataagagcaggtacaataacagactattagccaggtacaaacatattttataataagataaaagatgagagaaaaatacagactttaagacacaatgtatgtatgacatgtggggccatatactaaaagtatagtaaacaattatcgtaagaattggctgttagattggctataaatgaattggagttagtagtgggctatactattaaatttaatttgctctaatcctcgcggcttaggaaaaaattaacgggaacggaacaggaggccggtagctcgccggaggaagaagccaagaggcgcgggcggcggctgcggcagaagaagacggagtcgctagctggaggcggagacgatgctaggcgacgtgtcgggattcggcgcacgggaaagtggacaattaaatcaagcgatgatgtggatgtggatatatataatcctactcctactccactattgctagtagtaggagagtacataggccgcggcgacggcgagagtggcaagtgggggagtccgtgcggtggtcgctccctcctctcgcgcggtgacatctaagtgccgcgtgttctcctcttcctcttcccctccacctccatttcccattccacccccttcccttctctcgtcctcctcctcctcctcctcctctctctctctctctctctctcttcaaaataggtgggcggtgctctcgcctcccctccccgccggcttccgcctccagatccgcgccgcccgccgccgccgcgctcgctcgagcgggagctatagctgccgccttcgattcgacgctgcatgtactggcgagaggcgtagcgcgtggcgtgctctccccgacgcgcgcctcgcctcctccccgttcatgtaagtgggataaattcctcgccgcctcacctcctcctccagtacttctgtcacgacgccgcgtcggcgaggtgggtgggtgtgcttttcgcggcgagccgattcgatccgtcggcgtcggcgtcgtagggggagggggagggggaggctctgtcccgtttctacgcttccccgggtgggatttgcgcgcgcaatcaatgcggatggggggagggggtggttattggaggccgttggggaggggttccatttccgtactaccgtactcgatctgaattttcgggctagctgtgcgtcagacgtgatctgcagcaggtgccgaattcaactcaatttcgccacgaattgacaccacccccctcacctgctgctctggaatttctttcctcggttggattggaattcaaggtagcagcatgcaacttgcttgaaatactccaattagtgaggcttggttatgtacacacttcataattgtcgtgttaattgggaaggattatgcaggattacgagcataccgctaacaatttaatacttctaaatcagctgatgtggctagaggattaactttgttttattacttcctctgttcttgggaatagaacaggagaacataagtatagttgggatgggatttgatatggaaacgaatcataggtgtcactgtctgaaagcattgaatattacagttattgtctgcaatatccaaagtagatttgatcatatccaatgtaaatgatgaattgttcctatttacaaactctgctcttagagcacccgcaatggtaaagtaaggtgctatctataaaacatgtacacctcaacaatagactagattaatagtaaaccacttcaatggtatgtctacatgggtatctatagctctctaatccattgcctcgtttttctctatagactatctccatgttagtagatagctttgctctctctcttcatttaatctcttccaagtaggaaaatatgctgacatggatctcttgtagagagcttatagataaccattgtgggtgcccttaggtgtttcagatgccatgagatcttgtcttgctctaggaagcaaggatagaagtatgtggctgtaaacagcaagcatagaaccatctcttttatgcggtttcgataagaatatatataatctgcattttctccccttcctgattttgacaaattatcttctactgagttatctaaatgtttattttccttagtacaagatggcgatgatggtggaccctcctaatggcatgggaaaccaagggaagcattactacacaatgtggcaaacgctatttgagattgacaccaagtatgtgccaatcaagcccatcggaagaggggcttatggaatagtttgctcctctataaaccgtgcaaccaacgaaaaagttgcaataaagaagatcaacaatgtctttgacaaccgtgtggatgcactgaggaccctaagggagctgaaactactgcgacacttgcgccatgaaaatgttattgccttgaaagatataatgatgccagtacacagaaggagtttcaaagatgtatacttggtttatgaactcatggacacagatctacaccagataattaaatcatctcaacctctttctaatgaccactgtcaatatttcctttttcaggtaaggctcataccattgtttccatttttattcttgtttacttcctgttcacataatatttcatttattaattgttccaaaagaaatgttataagcagcggttccaccatgacgtatgatattgatgaatgtgatgtacttcttgctcctgagaagtgaaaatgagcctgttttgatggttcaaatccatctattagtccagtaggttgtcattacctattgcagctgctggcatgttgctgttgctgcctagtttcatttcttctattatcagataaagatacaagtgagccatatcccttttttttagtacagctgttggtacactctggcttttaggtcgaatattcatgataatatttagtgcttgttatagtgttttggccataatctaatgctttccaatggattcattaactagctactagttttcatatctggggaaattcacagcatttgggacgagtcagcatttatctacatttgtttctgaaataattcacccctgaacttaggcctgaatcggataatgcagcatttgaagctattgttctactgtgccattagaaaaaaaggaagacaaggaacagcaattgatgcgatgcacttacggttttaggatagaactccactagtcagaatctgggaactagggactagatatcctcaggaaaccaatgctaacctggaccatagctttgaaatcagaaattatgagaggtcataatgacactaaattgtttgatattgattagaaactacctgacaagatgtattatgtagtataatgattgtgaagtgtgagcaaaatagtagtcagcttcaatatgcctgatagaagcttctggtactgcttctatatggtgcttttgcttaggaatactgaaataatattctgaaatcaattcaatgctctactatatgtgtgcaaggagatttgcatgaggttggcatttaaacttcttatgtgcactctttaaggcaagcttttgcgtgtgaagtgaagttagactttcttgtaggccaaaagcttcctagtcaatctgccttttaaattcttttaccttgctattatgagaatttttacattttctgcctattcacgttgcaatttctgacatactttttcctattaagtgttttacattttctgcctattcttttacatttacattttcttcctattcttttacatctattaagtttttcttttgggttgattgttgtagctactccgaggtctgaagtacctccattcagcagggatactccatcgagacctgaaaccagggaacctcctggttaatgcaaactgcgatctgaagatctgcgactttggtttggctcgcacaaacaacactaaaggccagtttatgactgaatatgtcgtgacccggtggtatagggctcctgagctgctgctctgctgcgacaattacggaacctccatagatgtctggtctgttggctgcatctttgctgagcttcttggccgcaagccaatatttccaggaactgagtgcctcaatcagctcaagctcatagtcaacgttctcggcaccatgagtgaagctgacattgagttcattgacaacccaaaggcccgcaagtatatcaagacccttccatacactcctggcatccccctcaccagtatgtacccgcaagcacatcctcttgccattgatctgttgcagaagatgctcgtctttgatccctccaaaaggattagtgtcactgaagctctggagcacccttacatgtctccactgtatgatccaagcgcaaaccctcctgctcaagtgcccatcgatctcgacatcgatgaaaatcttggcgtggatatgatccgggagatgatgtggcaggagatgctccactatcacccagaggttgttgcaggagtgaatatgtgacaggcaagaacgaacatgtgaaggcaacgtgctacactaagatcttcacatgttggttttttgtataaatcttattcgcgattgtcgcgcctatcaagcttaagctatggcgatgtcgcccaggtgacctcttatgtaaatatgtgcgaataagacagcattctggagttgttcttcctgtggacctctacttgtagtatatggactaatgtgttgtatgagtacgtgaagcagaattcggtattatcaaggcttgtaatgttagatgctcttatattacactatgaagtgtcaactttcaagtggccacgtttacacatatatttgctatgctgacttgctgagacatgcttggttttagggcggtttgcagcttaacatgtgttcctttcaaagagcagtagatctgcagtttgcatggtattcctgtccaaactgtctagtatactctatactgatactctggtataaagctccctgcagtttgcaactgatgtattctggaaactgctaagacacctcagctacctttgtttgttttaaagactatctcaactacctggaactctgcattttgtttagtacggcaattaaggactgagttttcagcaaacagacttcgatgctatttttgattgaaataaagcaggcaaagttcggtctctcacataaacgaaacacattcatggatgatgtcgaaagtgcaacggaatgatacacatgacatgtaacatttagccttagaattttattgattcgacgcagcaatccaacttttgacggacttggcctcagaatgtcgacccattgaaccccaaattgaatccctgtaagaacaaaaatgaagttaaaatgcagtggagcaaaatgttgttcagaccacagcagcaagcagtcgcaacgggattaaggaaaaattgactagaagcagtgtcatcagtcatcactgtgtcagtattagaacttaagctcgagtggaaggagaagttagaagaggaaaaatggggaaacaagaagtgagctgaagaaagattgcaaccttgacatcgtcaaatttgacgtagaacctagacctgctgacggagagcttggtctcgaggatctcggcgagagcggcgctcagctttccgttgacgccggggccgatgccgccaatggacatgagctcgccgtaggccgccggctcctcgctggcggcgaacgacatgggcaccgacccgctgatcgacaccatgacgtactgcggggccatacaaggaaaaagccacggaggccgcggcatcagcagaaggaaggcaggaggagcagagcagagaacggccgcggcattccgccgagcaggtggggggcgcgtacggattcgggcttgccgatgatcctggcgagcgccttggagcagtccttgatgatgtcggcggcgacgacggcgtcgacgggcacgttggtggtcaggctcagctgcggcatcgtcgctgggatggtggcgcgcgcgtcgccggccggctcccctcctccgccttggctgcttgggtggtggtgggagaggtggagaggatagcgaggcaaccggaagatggaggagagagaatggaataattggggaaagaattgtcggagagcggccgggccaaataatccaaacggtccactttggtgagaatgtcggcccaagaattggcccaggagtattcttgtacactcctggcccgcttagtatattcttatatactagaggatgctccgcgcattgctgcggacttagttaacatcaatttattagataggagttaccatctcatgaaaaaacaaatagttttttttggagaaattctttttagcagccctatccaaaatttgtagatatttaagtagcacatgtcaactgaaggggcgttcagccataaagctcttttatacggattgacaggctggatacatgtagatgtgtatagaaatgagccaatgtgttcatgtgagctatatttggcactgatgaggcgaagagactcacccggtgactaatgggttgggctctatgctgcattccatccaacgtctaagaagtgatctaatgtattcatcaaacgattcacaatttgatgatgatgtggaagcacgaggtttgagcttttggccactttatagaaagaagggattgggaaaactaaatttcacaaacggaattttgctatattactgtcgacggttttaccttacgcccttagttcattgaggaagtgtgctaccaccacgccaattttttttttatgatagttgtattctagtcacatataagttacatatgagttacagtgtagttacaatatagttatattttaaaagttttataaagaaaaaacttgcgacatttttttagataatccctttcacaaaactatatgtactttgaccaaactatcataaaattgcaaatttagcatcttttttttttcataagacgatagatttaatatcaagtattataaaactatagatttaatattgatattatcacaaaactacattatattagagtttaaactcctagcattaatgttatttttaatatataaatgctatagttttatgataattttgttactaaatatgtagttttataccactttatcttaaatctatagtttcgtgataaattatgtattaaatatgtagcttgtgatataccaatttaaatttatagttttacaatagtctggttaaattaactgtagctttatgaaatttacttttggaaatctgcaatgcccccactcgcttcggcgtgagcggtccgcacatcccctctgcttcggtcacgcaattagtcgaacaccatggcagttcacatctctaactcatacccaactccacatctctaatttatttttgtgagagcacttcacctagctccactctcattctctgatgttcactgtgccaattctaaaataaaaaaagttttgccaccgttacaatcatcaagggaaaacttccctgaattgggtcattgctttctagttatcatggaattccttttcatcataggacattacgaattgccttgtaataagcctatgaagagaaaataatcaataaactttattagtggatgataagctagctgttagccattggtggcaggttagtgctgatacagtctagcctaataaatgctcctttatagtataaattttcttgtttaggattcctagagggccttgaagagacctggctattttaaggctagatttagcgtgtggtaagaacatgattgaagttaattaagaaataataccacttagtcaatcggcctcaaatctgcttccctggagattatatagtaaataatggatttggcatctgtcatcggggtaaggaatctgccagcaaatcatgaaaaataaacgagatttgagtgagaaacgtccctccaaatattttttttaaaaaaattatgagcgtgttagagattaaacacgaaacctcgaattaaaaccgcataccccttgtcactgcaatatcaagtgcatcttaaactgacctaagctgacctatcaagaaaaggaaatactacctgctaatacaaactgacctaagctgaaatcaatgatattcatacttctggaaaaggtttaatgggtgtcaaatgtacagatacctgggtcaatggagtaccattggaataacaattatgaatgctgtacaatttggtggtattcagaaaaaaagttgtgcaatttgacttccactagaaactgtactaactgtgaatctgtacatcatgttttcacaaaaggcttgaccgcttgacttgtttataaggtttaggaggttgctgtgggggtgatatttgggactaactgctttctatgtgctgctaaccctgtggtatactgttatgatgatttggcaaggaagtcattaggacatgggttgcagaagaccaaaggcctaattatggcagaaaaaatattctcaggattgatggtatctgaaaaatattgagcgccatggtggctacgcgattgtgacaaaaaacgtcacctccaaagtatgtggactgatggatcattcagattcgttggttcctcctgcctgaatttgttaatctcggcagcagccggcgtgctatctcagccgctggctggtggaaagaatattcaatggaagaaacgagtaccttctgttctgttgtgttgttgtgttgtgttcatgattgtttccatgatcatttgcccagtacttgtggttaattgaatggtgacaccatgagcccatcaggggaggagaagaagaccccaggcaactagccaactaccataacatgattaatcagtaaacctatcagtgtcagtaggagtagtgctactaatctaatctaaatggagcgtcctagtcatgctacaatgcaattctgcaaaccacagtttacaactctgtttttcagaatacaaatagtctatcatttaaaatttatattaaaatataaaaaattatggagtactggagtactgtactattgaccacccctcgtttgatttctctctccattatcctcgatcgaccacattttcctacttatttaagaagttatagaagaactacaatcttttctacttaattttaatctaaactaaaatcttttaaatatgtccatattattgaacgaaggtaatcttcacctttccactctgcgatgagacattcattctatctttccgcttatatttatacttataagctaaattttaaattttgaagttttttttatcataatttatttttcagcttttaccttttagattgttataaaaatatatatataaaaattttatttatatattatttttcgtttacaactatgcgtttggatagagccgattgcttgagctaactactacttcattcgtctcataaaaacgaatttataattagatgtgacgtactatagtacgataaatctagacatatatatgttaaatttatagtactagaatatgtcatatttaatataaggttagttttttatgggacggaaggagggagtacgtgcctttccatcctcccctgttagcagcagtacgggcaaagcaagtgagagccgcattggccgtgggatggtgtactaggtcagtcacacgtactacgtgtgaccgtgagagccagccagactcgcagacgcagtgtgcaaagtctcacacgtgtatctcatagctttggaccagaagaacacatgtatgtaggggtgatgctaactacactacgcatgaggtgtgagggtagaatagggctgtgggtgtgtttagttctaaattttttctaaacttttaactttctatcacatcaaacatttcatacacacaactttttagttacatcgactctaaatttaatcaaattttaaattttgcgttgaactaaacacagtcagtctagaatggtagagggaagaagaagaggagaaatgtcgtgagaggaggtggggtccacagggaggtaaggtgtgtgatagtgacaactgaaagagaagtttgtcccttcctatggcactaatggtgttaatgtcttcagagacattggctgcctcttctttctctgatggactctaaaccctctcgattctactccactccttaaacctctccagtttttgtgtaattctgttgtcatacggtttattgtgtggttgctgaatcttgaaaatttaggatccaatggttaggagatttttatcggccctgctgtctccagagttttttcggttgaggatcccagttgtaaatttgtaaccagtttttttgccctgctttctccgccggccgatcgatcgattatcgacctgtatgcctggtggtgtccgtgagctgctcttgatttcttccaagaatacaaaaaaaaaaaggattacagctttgccagtggagtttcctttttgtgctcctcgtgtttgttcttgggcagaaagcctgacgaaactgaatcctccaacaaaagcaaatggcgaagcgtgggctttgttgttaattatactttttgagtttgcccattcctcgaggttggtagtggtgaactggttggtgttggtgttgttgttgatgcttctttgatgagcgcactgttgcttgcagggctccttaattaatcgctttttcccaagatttcgtttttaatttatatttatatactcttctttttttctccggcttctaggtagaagcagggggagacagagcggccagtgtctttctctacaagaaattcctcggtttccacgcgcgctttggcatttcttttcttttgtttttcttttttttacctttcctttcatctcttccgctggttttgtgggatatttgtggggggttttgggggtttagaatctctttgatttcttgtgctttttcttgctttttctcgtgatgttggagtggtgtgttttctgatttgatccgcccaagtagcgattttcttttttcttttcttgttgtttgtttggaggggggaaaaggttgcgatcttggtggcgcgccgatggcgtcgtcgtgcatccccaccggcctccggctggacctggagatggtaaaggcggcggcgccgcccggtggctcgtcggcggcggcgcactcgtcggcgtcgtcgacgctgtcggaggcgtcgaactcgtcgtcgtcgtcggtggcg

SEQ ID NO: 11525 - DNA, 2207 bp, Oryza sativa
ccgctccgtcgactcaggaacgtttttctctctacctgctgatgttgtgcctgcaatgcctgtcattgaggtaccagcacctgttgttacccctcctgtggcaacaatgaatgagagtgaggaacctgttatacaggattcaacagaaatggttgccacaccagaggaggagctacaacagcctcaaatagataatgtgccagtacaggagactcatcaagagcctcaggtacaggatgtgccaaatgtgcaggcccctagaaggtctgaaagagtcagaagatcggctatccgtgatgactataaagtttataatatagaagagtcgcatatggaggatgatcccacctcatatgaagaggccatgagaagcgctcgctcatctgaatggttggaagccatgaaagatgaaatgaaatcaatgaaactaaacgatgtttgggatttagaagaaattcctaaaggagccaaaacagtaggctgtaaatgggtctacaaaaccaaatatgactccagagggaatatagaaaagtttaaagcgcgacttgtggcaaaaggcttcacgcaacgagaagggattgattacaatgagacattttctccagtctcttgtaaagattccttcaggattataatggcactagtggcacattatgatttggaattacatcagatggatgtaaaaacggcatttctaaatggagatttggaggaaaaagtatacatggcgcaaccgaaaggttttgtcatgaaaggaaacgaaaatatgggatgtcgtctaaagagatccatttatggattaaagcaagcttcgagacagtggtacttgaagtttgatgggacaataaagaaatttgggtttcaagagaatgtcgaggacaactgtatttattcaaagtttaagaatgggagatttattttcctaattctgtatgtggatgacattctactggctagtagtgatgtcagtctactgcaggaaacaaagaaattcttgtcctcaaactttgacatgaaagacctcggtgaggcttcatatgttttgggcatagagattcaccgagatagaacaaagtatgcattgggactttctcaaaagacatatatagaaaaggtgttgaagaaattcaacatgtacagatgcagtgctacacctgctcctataatgaaaggcgaaaagtatggggcatcgcaatgtcccagaaatcagtatgagctcaatgaaatgaaaacaaagccatatgcgtcagctgtaggaagcctacagtacgcgcaagtgtgcacacgacctgacttggcatttgttaccgggttacttggcagatttcagagtaatccaggcctagagcactggaaattggtaaagaaagtcttgcgttatttgcaaggaacaaaaggcctcatgctgtcttacagaagatcagaatcactccagatagtggggtactcagattctgactttgcaaaagataatacaaagtcaacatcgggatacgtgtttaccctggcaggaggagctatttcatggaaaagctcaaaacagactatcactgcagggtctactatgtatgccgagtttatagcatgctatgaggcaacggggcaggtgaactggctaaagaagttcatacccggtttaaaggtggttgacagtattgagaaaccactaaagttatactgcgacaacgaacccgcagtaatgtacgctcacaacaatcagtcaagtggtgctgccaaacacattgacataaagtactatgttgtgaaggacaaagtccgggatcaaacaatcagtctcgagcacattaaaacagaaaggatgctcgcggatccgctcacgaaaggcctaccacccaacgtgttcaaggaacatgtagccggcatgggtttaagggaagccttatgaatcctggactacagggcccaaaagtaaagtatctgtttctgaatagagatgtgtatagtggctgtcgaatccatcggcgattgaccgtgacgatgaaacatgctctatttacaaatctgtgatggaatagaaaaagctaaaagaaaaagtgagatcaagggggagaatgttagatagatatctctccccttgagcccaacggctcaagggggccttgaccgcgccctgatcgggggcgcccagcccaatggctggtgggcccccgtcacactgcgccatataaaagaggggtggaggccgg

SEQ ID NO: 11526 - DNA, 4324 bp, Oryza sativa
cggcggcggcacgcgcgcgtcgcgttgccggcgacggcatccggcggtggaggcgacggcgcaaaagcgacgcgaaagcggcggcagcggacggcggcaacgaccgaaggcgacggcgagcgcgagcggcggcgacgcacggggaattggggaagaaaaggaaaggggagggagtcctcaccggaggggacggcggcgtccggcgacgaggagcgacggagggaggtcgacatgcggcggacggcgaccgggacgacctaaagaacgaaaagaaagaggttagagaggaagagaggggccataggagacgggaatgccggccgaaagcggcggacatggcgaccctcaccaacgcacgatgggaatggcgctccggcgacgaacctcgacgaaggaggggtggacggggtggatctcggccacgcgaacccgacggcggcgacggcgcggtgcggcggcgagcctagcggcggctaacggcggccggagtagcggagacggcggcggcgggtggttgcacggcgcgggagcgatggggagcacgagggagttcggcgaaatgggaaaaaagcgagagggagcgacggagaagcttaaataggggaggggagggccggacgtggccgggagaggcgggacttcgctggccaacgtgggaagtgggggaggagagagaggcgggattcgaaaatcgaatcccggccatctcgggcgcgggcgcgagcgggtgagagaggggagtgggcgcggggaacgcggcgcacgcgcgggcgtggtcgacgtggcccgaaggaggcggagacgtgggcgcggcggcggttgcgggcgcggcgggaggttggggaaggacccgacaggtgggccccacctgtcggcgaccccgggagaggagggcggcggggcggcctggctgggcctcggcctgcggccggcccagcagggaggagggggaggaaaggagagaatgggccggcggcccattcggaaaaggaagggaaaaagaaaaagaaaaaggagaaaagaattttccctggaattaaaatattgcttgctcaattttaattggttaaaattatttcgagcgctctgaaaattccactaaaaatcctgttagtgaatttcgacatgtagaactcaagaaaaattccacatgcccactccgattattatttgcattgatttaacagggtttactcttgctttgcaccggtattttcttagggtctcttataaattaaattttaggcttgggaggagaacttcggggtgtgacagttgctcagcctgagcttggggtttatatagcatgccagctcgtgaggtagatggacgaggtgtcaggtgtggggtagtggctgaggcgtggacccgatctcagccattgttccattggtgtactttgttgttaacggagagatgatgggtgtccagaagattattacagtagaagtataatagatttaatctaatcttccattcaaaacattgcaataaagcaaaggagaacgttaatcgttcttcattcatggtaagtcattcataaatcatacgtacattacaccaccacaactacattagtagaagtacataatccatacatcattcgtacattacaccaccgcaagtacattagtagaagtacaccacaagtacattagaccccacacgtcacatactccataccgctcccgaagtacacacacttctaatctctttacattcttcattcccgaagtacccacccctctaatttgagtagactacagtcctatacaaataataatatataaaaatacagaatgctccacagaaaacatatgaaacataaacagaaatcctaattcccacacccaaacacgcaaaaatagatgctttaatttctatcaagtaataaaaggtaaatgcagctaaaacagttgatgctaatgaagttgcgactgctacgaacattagcaccctaagcttcaccctcgtaagcagaggagagccgacagctctccatcagctttgagatgaaagcggacaaagcaaatcaataaaccacaaataaacattgtaagcaccaaaaagtgctcaagaaacggtattttttgaaaccgagagtttccacgcactggctttgctgccctcctacggaggtctgctgcagcggtacgacccctgtgccaagaaggaaaagaccgagctacaccaaaaggatctgaaacagctcggtaactacatgttcaaaggtggtcgccatgggagcaaagagtgaaagagagatggaacgagcaagaaacacgcaagaagatgaaatctgcaatgccaagagtgaaagagagatgaaacatgtgatgatgcttgtgagagagactggcttgcttgtgaggcagtggtaggcataaggacgggaagagatgtgatgaggcagcatttaaatagctacagcgacaggcataaggaggggaagagatgtgatgaggcagcaacaggcatgaggaggtaggtagggtttctcaaaccgtcgggccagggttaccgcaccccagtggtaagcacggttaccacgcggtaaccgtggcaagccgtaccaaaccatataaaatttataacaagtagagatggcggccacgggcgtagggcggaggccaaggacggacctagagtatactcaatggggggccttggcccctactcaattctagatagcacggggggcaaatgcccccctatcatatttttatttacttattctaactaggagtagactatcggccccactcattttgcttcctgcattcctccctggtggaggcgagagctcctcgtcggcgcgatgcactgcctttacgtgttgagctggggcggcctcggcctcgactacgaggggctagtgagggtgatccctacaatggaggtgacggtgattccgttctgtcgaacggcgtggacacggtggcatggtgcattcgtgtgacttaaaccattgtgttatattcggccataagtgaagtttacttaccatgacggtaagtggggatgtgtacatgcctgtgccaataaggatgatgatgatcccaattatcatggcacggattttgtgggtgtgggagagggagaggacgagcgcaacgagtacaccgacgaaggcaacaatgtcgacgaggaggaggatgaggcggcaacagacgtggcgagaaagagggagatgtaggcgagctgagttaccatgccaggggcgctaatgatgatgggcatgttgtgcggttgcacgccagcctgcacgatcatgtacataggttgaagtgaaatgaatcgaatatttatatacacacatgaattttgattcttacactggggacaagtaccgaacgagggccactacattacctgcaagatgagatcgatcgaggaaaaagatcaacacaaagttaatgaaacgcgggatttgaagaaagctaaaattaagatgccgatgaggcgatgacgcacctaggacgccgaggaccgtgttggcggtgttcggcgagatcatagtcgcgtggacggccggcggttgcctgtctatgccaggcaagaccgaggggaatgcgagagagaagactagtagaatgtacgctgtgttatttgatttgagtgctatttataacatagagctggtttgttttgtgacttaaattgaacttaccaatttttgtcaatatcaaattttgctaagttttggtatggttaatcttggcaaggtaaagttgtgttcggattgaagccaaaacaacccaatttcactattaaaatagcctatttctttagacatgtcaaaatttggcttcaaactaaatagacactaaacactattgaaattgttaaatattggcaaagccaattcaggccacaaaccaaaccagcccataataacacctctttgctcaaccaagggttgtcagcctaagagctacatgccacgtaacatatataacactgatcgagtttattaccatctacttctactgcacgcaacagcgaggggtgtatatatccagttcgcgattagagaaggatagggcggagtcagctgtagggccccactcgtcagttgcagcacatgaagcttcatgtgtcgtagatagaggtgactaccacatccaattttatgcatgacataaataattaaatgcacacaatccctaatatctctaacactctcacatgtatattgaagtttgtgtaggggttgcctcttgcataagaggtgactatttctctctcatctttcttctctcctccacctcattatttagtcctatgtttcatcttgtggcttgtgcttggatgccatattact

SEQ ID NO: 11527 - DNA, 8975 bp, Oryza sativa
gttggctatactattaaacttagctcttagcccttaggtgtcgtaaatctgaaattgtactatgattttttattaaaaaaaaggagcaaaaacgacttatagatattttgcttcctttttaatcggattctggaatcattgacaagcatacatttttctctggaccgcatcatagatgccacccagaccacccggtgtggaacagatcaagtcttttttttttcttttcttttacatcgtgagcacacacagccggggaactattctaatctctcgaggggatattccctcgtttgcttaaaaatcatctaaacggttatgaaaaattctaaaaaaatttgacaacattcatacaacacatatatacaactccataaaattttaagtcgaaactcaatttacacgttgagatataaaaaagacaaattcaacgtatgaatagtagcgtattgtttatatctaaatttgtccttttttttctcgatgtgtagattgaatttgaacatgaattttggtggactagtaggtatcattatactctccattgacatttttttcagatttttttcacaactatttgcatcgaatttggaagggaaaaaaaatataagaggataccctcgagggattagaatccactccccacgcagtcttgtctggtttgatagtggaggaaaccgatggagatggagtagaaactcagggaagaggcaacatgccctggccgtggccgcggccggcggcgacgcgagaggtaacataacatggccgtgggcattattccactcttatatctagtgaaataacccaacgttcccagcctagaagatgaaggacattgtggtatccaagtccgggccaccggtgctcgtcaccccgtcgtcggagccgacaccggcggcggcgaccatccgcctcacctccgccgacaagtcccgcctcggactgtcattcacggcgttcctcgtcttcgagcggcggcggcggcggagtcgtgtccaccgcccggccgagaccgtacgacgggcactgtcacgtgctctcgttcactactaccccttagccggccacgtcgtcgccgccggcgacgacgacaacgtcgtgttgtcgtgcaccggcgagggcgggggcctgccgttcgtcgcggcgacggcgagctgcacgctggaggacgtcgacgacggcgacggcgacttgccgttggccgaccttgctatctggtatggtggggagtcatgctggatgtccgatccgctgttgatgatgcaggtgaccgagtttgagtgcggcgggttcgtcgtcggggtgacatggaaccatggcgtggctgacacctacgggttggcgcagtttctgcgagccgtcggcgagctcgcctgtgggctcccgtcgccgtccgtcattccggtcaggtacagggttggaacattcccctccgatacgatattacttcagtcgatttttttatttttttataattttttgtcatatttatttaaattcaactaaatgttgttcaataaattttcgaaatttcgggatttcagtaacctccgacacgatcggcctaaccgataaagtgaaccctggcctggtcaggtacgatgagtccatgcctgaaatccccgaccagctggctcccgtcgcactgaaggcgccgcttgccgactagaagcacgtcgacttcgcctactgcgacattatgatcccatggagcttcgtcaaccgtgtcaaggccgagttcgtgagccggaacggtggcggcggcggccggcggcgctgctccgtgttcgacgtggtcaccgccgcgatatggcagtgccgcacccgcgcgatccacggccgccgctgccgcagtgacgctcccgcggtgctcttgttcgcggtcaacgcacggccgcacatcggagccaaggacgggtactacggcaactgcatcacgcggcaggtggtggcgtccacggcggacgcggtggcgtacggcgacatcgtcgacgtggtgaagctcgtcaacgacgccaaggagcggataccggaggaactcctccggaacaagctgagagggaagcagggcgtcgacggcggcggcggcgaggggctcttcgtcggcccgatgcaccgcctgtacgtgtcgagctgggcgggcctcggcctcgacggtatcgacttcggcggcgggaagccagccagggtgataccccgcatggaggtgacggtgatgccgtcctgcttgccatgcctaccgtgctcgaggtcgaacggcagcgacggcgtgaacgcggtggcgtggtgcgtgacggacgaacacgtcgacgtgttccgggctgagttggcaaagctgcagtgaacttggataccacaagccaggaacaattcgagattttctgagttggcaaggctgcctgttcttttctgatttcagaattttcatttgcacatttcacaagctcctaaacagtgtgtttcactttcatataaaaagttatgagaaaagtatgttagaatactttttttaatataatttttcaacattgtactagttaattcattcgttcatactcacaaatgactaactataaagctagtccatcaatcattatttcaactatctcaaaaatgacccaaagcgaatgtattcaaattcacgatgttgaaaataaatactatctactagtcataaatattgtacgcttaggataagaatttatcaaaatttaaaactatggccatcaatacgttttttctcaaatatgaccatcaattttgtattagagtgagtttataaaatctagtatatcatgacaacacttctctagacaaatctatgcaaaacattctttttccttctacttaactagtaaatatttaagaaagtattggtagtcaaatatttataacaagaggggtgtaggtatctgtgagctcactgaataaacgacgaaatatatacacattttcagggatgaatatagtaaaacacaaggtttattcatatacaacttcatgaaaatgggagaaaaaagtggccatttggtagaactcatgggccgatacgtcattagctttgtggtatacaacaaaaatcgaacatcatacaatatcaccaaatgtgaaacatgtgcatggcaaaatcagttgccaataatcaatctactcgcctacaagaatgaaggggttgtactacatgcagaatgttacaacatgttgtgttcacagatgcacatacattatacatagtggtcataatcatatgctgctgtgtctccaaagaacctgctcatcaattttagttagtttttcatcatctaacagcttccaggtgtggatcgactcgacttccaccaatgatttctgccctttcttgagttcagtatgaattacccgagctcttcttggccaatgaggtcttccataggcatgataaccaaagccaccaccataacagaaccatatcccattaaggtcgccacaaaaatcattaagatggtcatggccaagaaagacagctttcacatctcccatggaggttagggtgccaagaacaccggagtttacagttgagcaagccaccccttcctgatactggcccttgaaacctgtataccacagccctctgacttctggaattgggatgtgaaagaatgcaaatgcaggagcatgcaagttttgctgtcaaaagtaccgtgagtcagaactcagaagcatagattcaaaagtactgtatttgtaattcgaaaaaaaacactgatatatgaaaaccaataatctgagattaactaatgggtgtgtgttttgctcaggcaaatgataaaatatttgaccagagaatgcagctcaatgcagatttacatgtacatcataagtttgtaaaagaagaaacacagaagtaatgaacaaaggcattttccccctttcacaatgacggagatatattccaataaaatcttgggtgctgtgattatgctagtaattatcatcagcggtacctgaagctcctgtgaggtagcacgaagccaagcaagttgagattctttgatccatccataggtttttactccattgaccacttcacgatcaccactatccaggaagtaaaggttaagtaaactagtattgacaaactcagaaccaaacggcccatgtatgctgacatgatagttgccaaacccatgtaccaaagaaccaggagggtttacttgagataccgagtaatccatcagggacatgaacaccatcagttcctctctggtcatagtggactcctggtcatgatttcctaaaatggcagcccatggtactttatactcgattgcagggctaattgctttgagtagtgactcagctgcatcagatgcactgcccccaaatatattgtctcctgattaaaaacaacacaagcattcaatgcaaaccagattgaccccctttttgttggtgaaggaaatttaaaaaaacacgtaacgtagagattcaaaaaggtaacctctttacccccagaagaagagatgtagtcaaacttttttggaaactgcatgtgattctactctgccactaattcagtaacagcagaaaacccaaagcatggattcacagaactttgctagttgctaagtaatttcatttgggtcgtgaaaatacacgagtggattgccggagatacttctccacaattgcgaacataggcaaacaacaagtgatttggcgagatattccacccaacccctctgaatgtaaacacaattattcagacattctgccagctaactctactaagctactactacatggagcattaactaatttgtttttgttgtgagtaactgttatgttgcttgtaaattaacactcacatttagtactagttccatgactttgagagtgaaaaaaaaaatcaaccaatcacatatcaatagcactaagttttgcacatgattagcaaggaccgccactaatgggcagcgaccagatgagcaagcgcgaagcagatcgccaccaagagcggagcggggataggagggggaaaaacgcaccggtgaaggcgatgaggtcgggcctctcggcctcgatgacccgccgcaggaaccgcgtggtgttgaggtcggagcagcgcgcgccgcccacctccggcgccacgtcccggcaccgcgtggcggcgccgttgccgaagtgcatgtccgccacctatagcatagcaaacacacgcacagaacagaagccgcgcccggtgagcaaccagaggtaaatctcgaaggccatcaggcgaagctcgctgagctagctagctagcgagtggaggtgagcttgaagcgacggacggacctggaggatcttgaaggcgccgtcatggcggaagcggagggggaagggaggggtcctcttgaagcggggcgcggcggcggtcgggtcagggttgaggtgggtggagaggcggatgaggagcaaggagaggaggcaggggaggaggagggagacgagggaggtggaagacgaagaacccatcgatctcgccggtcgccgcctgccacctcccaccgcatcgcatcgcactactcaacaactcccctactgttgctcatagttttttttttttttcagaaactttcggctgtgtcctttcctccgcctttccaacttccacaaatttttgacaatttaacccttttcgaaaactaattttacaaataaatcgtgcccaaacttatttaaaaaatgacgcttttgttcagcgtcaaatcgtatggcgctgaaattagacacctcaacgccaaatagaacgacgctgaatgcacgttggcacgccgactcagtctctcgtccgcggtgacacgatattctgcgccaattgacgtagcactgaggtgtctaagtttagcgacatacgatttgacgctaaacaaaaagtgtcatttttaaaataagttttggccacgattcatttgtaaaattagtttttggaaagagtcaaattgtcaaaatttgtgttccaactcttgtgtccacatttttaaaacaaaattatagtaaagtttatttttaaaatacatattaatctattttttaaaattgctacagctgacatttaattaatcatatgttccttttagtccgcagagatttagttttcgacctgatttgccgtacactgccagaaatttcgtgagagagcttgatttcgaaaataatcattgctttccgaatagtcttgtcttaaaagaaagagctttttttttacttggttgaattagctacagccttatagttggtccattgggccctgcagagatggaaattgtgcctagttgatgtgggacttgggcccatcgtgcttagtgccaaaacgggccaggatttttataccgtgtgggccgacgtgacttgggccggcccgataaagtacagcccaagtcccaggtctacctagtgttctactagatgaataggaaatacagtagtgcagtgcaccaacctctgaggcctcactgagttggcgcgtaacctcgtcgcgccagctcagcttttggtctacgtggagcatgcgcctgggacctcacttggcgacttgtccctaagctaaggagcgcgaaacttcgtcgaagcgaggaagcgcgcggcgccgaaaaagcaaggcgcgtgcactgtgggcatcgttcctggccgagctctgccctcacatcgatttcgcctggtgaaatccccgaaccgccctcctgggggcggcgggcttggcgcgggaggctgggtcggggtgccgacgacgagccggtggctgccggggaggggcctagaacacttccagttgcttcaacacaaatacaaatcaaaatcaaaatcaaatcagaaccatgcaaacaaatcgaagaacacaaatagatcaaaaaacaaagagagagagagaatattatgttttttctgtgtacattcagctgtggcaaagcgtctctccgatggcgttgagtgtgacgcgggcggcggccgcgccatgacgccggtgccagtgccgctgtggtggtggcgatgaagaccatgacggcgcaagggagtgaatggatggatttgcaacgcaaccaaaccatggcccttcaccatcgccgcgacggagtgggaaagggagaggggaggggcggcagacagagagggaggggaaggaggcgcggcgagggagaagaagcagagcggcggccgtggatggagcagctgctcgagtccgcctccgccgagtcttcgccgcgcgctgccaagaaccgccagccgcccacacgatggtgagtcgttgccaagaatgccgcagaccgtgccgccaaagaccgcgccgcggaagccgccgccgccgaccgccgtagaccgccccatctcctgctgctgctgcttgggaggagaggagaaggaggcgcggcggtgtgggaggcgaggaggcgcgggagaagcagagcggcggcgcggcaggagaggtaggccacggtgatggagtggaggagaagacgagtcgctaggtggaagggtaggtggggaataaatttcgtcagtgggcttgaggtaacgtatttggggtaacaggcactgtgggcttcgtttccttcacctgtctccatccaattaagccacacatatatggatgcttacactgtggggtgagtgtcttggggtaaattttttaggctaggggtacgagccccgtagcttacactgtgagaggcctgaaaaagaaaaggggaagtagcagtggagtggtgcctgcggcctgcctgtagctgaaagcgaaccccatttctcgtgccttttttcttctgacgaggggagctgaaaagaaaacttttttgctgtggcaagtaggagtagtactaggctactagccaagtaagattattaaattttaagtacttttatagaattattgtaggaactgaatcattagattttttttttccattgtatgtattgttcgttttatagaaatggacactaccaatttcctgaggattgtagtcttgcaaatttatttcatagattcttaggataagatgagagctcttggaaaaatttctgaaggatggagtgtaggtgacatcttaatcctttacgttttctgttcctttgatttgagaatcataagccctatgaatatttgctgatgatttcaaagtttagattgaattttcggtagtactacggatcgaattaattaattaggccctgaaaaaactggccattcagagggtgtagtggctcggacatggagtcagcaagacgtcagctgtgtgcccattcactggcatgatactggcacatgtatggcgtgacagaaagagctgaaaaaatatgttctttttttgacatggaaagagctgggaagctagctgtggctgatgtggtgagtgccggctgacagagacaacaaccgcatttgcattaccgcaatctttaacacgactggggcctcgttttgggatctaaagaatactacatatattcagaggattttgtttttgcacaagccaacgaaaggaaaaaacaaaagagatctacggagacaacagcatcaatgcctttccatcttcattttcatacgatctactcactgtctcaaaataaatggacagtgtcatatttcacacctaagtttgtttattttgatcgttgtagcttcatgggcaatgacatcactagtatgtaggatccccattgaatgccctaataagtcgaagccaaagcaaaatttaaattgtaaatttaattttgatgtcgattttaaggtactttcagagtagtttatttcagcgttgccttttaaatcactaaaacacatatataaatgttttacttataaattattttttattccttgataaatttgttagatagatctctctccccttgagcccaacggctcaagggggccttgaccgcgccctgatcgggggcgcccagcccaatggctggtgggcccccgtcacactgcgccatataaaagaggggtg

SEQ ID NO: 11528 - DNA, 3124 bp, Oryza sativa
ccaccccacaaaaccctaatccgatcgagagggggcgcagccagtgacgggaaacgccaccgccgcgccacgcctcatcgccgggacgtctacgaccaccactgccgcagccgtcatcaccgtcgacctcaccggcgccgcatccacgtcaagccgcgatgacaacgacgatgtccggcgcctcttcctccacgaactcctcaaccgatcggtatctaaaccctctccctttcatctacaatgtcgttcatcaaacccaaatagaaccacccgactagatctaacctaggtgatcctagagcaaagtctaacaatggtatcagagcaaccctagtgtttagatcgtttcggggaaagaaatccaaagaaagaaaagcacaagatccgcacggatcaaaagaaccaaaaaccctaaccctaattcttacctcgtcgccggccgtcgtcgacgccggcaacggagggggggaggggcaaagaggcgccgcctaggagccactcgacggccgcgcgcgcacctgcacgcgcgtgccggcgagggggcccgcggcggcgccgccatctccgtcgtcgccatctctctctcacacggtgggggttagagacggtggggggagcggagaagagaaaagaaaggagcgccggccatggcgcagcggcgcgagggccgccggcgtcggcgacgccgctcggcgcgaccgcgcccgcccgagagagagaaagagaggagaagctagggtttcggcggccggccggggcacgaggggttttgatccccgttttcggcgcccggccgtccgatcgcaaaccctaagatcggacggccggcggcggccggaccgaaatcggcccaagtggggagcgcgcggcggcggctttcccggcccaggcccaggttgcggcctgggggaggggagggggcgctcgcccgcgcgcaaggtggccatgggccgaccggcaaaggccggaaaaagtccatataaggtccctccggggccgaaaatgaataaaagagaacagtagcaatttttccattttattttgtcaatttttcatgcaaatttcaatagaattttgaatagatttttgcatgttttacctctgtttaaatttgaaccaacgggagaattttcacagagagagaattacagagattttgctactgttcatatgattttatatagtcttccgctgcaaatagatgaaattgatgaaaattagtgtttctaaaattaaatttcgaaccaacgggagaatttaattttaggaacattaattatgtgctatgatgttgtaattttctgaccaacgttgttaattgcaatattatagttatggttatatgtgttatgtctaattctgcccaacggtgatgtaggcttaatgcataatattttaatgttaattttgttctcaccgcacatgattatttcaggtggctactccttgatgggttgcattaaagatattccgaccctaaaaggagataactacgcagaatggaaaagaaaactcgaccttgcttttatcttgggagaggtggactgggtattgactaccccatgtcctatagaacctgctgaccttgtcagaggtgaaaatgagtcagatgctgactggcaaaagagacagagggacaatgctcctctcgtcatgtcgtatgacattgaacaaaagaaatggtccttagccaacaagaaatgtttggctgtggtaaagaatacgattgagcctaccatattgggctcgatcccagagtgtgacgctgtctcagagtaccttgaaagaataaagagtcagtttactggctcttcaaagacttatgctacacagctgatcaagcagcttgtgacagaaaggtaccatggaggtggtgttagagaccacatacttagaatgagcaacatggcttccaaattgaagccaatggatttgggcataacagatgactttctggtccatctggttatggcctcattgccaaagcagtttgacaattttattgtcaactacaacataagtccagagaaatggaactttgagaagctcattgctaattgtgtgcaagaggaggagagaatcaaagaatcaaatggtggttcaataaactatgttaaagataagaaaaagaaccacaagtctcccacctcaaaaggtaaacagtctcagcatctgcctcaacaacaacagttcgctgttgagaaagatcaatgtctccactgcaagaagacaggacactacaagaaagattgtcctgactttttgaaaatgatcatggcaaagaaaggtgagaacattattacatttgtaaatgaatctcattatgttggttactctagatccacatggtggattgattctggagcaactattcatgcttgtaattgtttaaaggcattccgttcgacgaggactacgcaaagaagagaaagcaccattagagttgccaatggagttgaagaaaaagttgaagctgttggagatcttcctctagagctcgcgaatggcttcatacttttacttcgagatgtcttttatgttccttctttgcaaaggaacttaataagtgtatcaaagttggattttgatggatatgattgccgctttggaagtggcaaatgtgaactatggcataataatgcatgtattggtcttgctgtgttgcgagacgagctttatttgttatctctttctgagaatgtgaatgttgtgtcctcgttgacaaaagaaaacaagaaaagaaagcgaactcccgatgtctcatcgaaattatggcactgtcgtttgggccatatttcgagggggagaattgagagactagttaagaatgaaattcttcctccattggagttctcagacttagaacaatgcatagaatgcattaaaggaaaatttgtaaagagcatcaaaaagggtgcaaaacgaagcgcgggaattttagagatcattcatacagatatttgtggtccatttcctgtgaaaagtgtggatggctatgactcgttcataacattcacagatgattactcccgctatggttatatttatccaattaaagagcgatcagaagcactggataaatttaagatattcaaagctgaagttgaaaatcagcatgatataa

SEQ ID NO: 11529 - DNA, 4055 bp, Oryza sativa
ctaactcgattgccgtcgccgtcgccgcagagatcatcgccgccgcgtccggcgcccgcccgctcgccgacgtgtcctactgcgtccacgccctcgcccgccgtctctccaagacgcacaactgggtggtacgccgccatcgccaatgttttcctcatcgctcgccgccgcgtgatctgctgacgacgggggtggatggatggtgatgcaggtggcgctcaagacgctggtggtgatacaccgcgcgctgcgggaaggcgacgccgcgttccgggaggagcttctcagctaccggcgcggccgcggcggccattgcctgcagatgtccagcttcaaggacgactccaccccgctgggtcagctcccaatccaatctgaattcctgcataaactgaactggattaacatgaactcaatcggttcaaaaaattttgtcaccgatcgttctcatttctttgtgattgcaaatttgaaatctccaattgctttgctcagcgtgggattgctcggcgtgggtgcgcacgtacgcgctgttcttggaggagaggctcgagtgcttcagagttctgagatacgacattgaagcagagcgtctgaggacagcagagggagctccaaaggtttgtgaaattgtgattatggcttctaaatttcagggaatgattcggtggtgatagttcggcatgagtgatcttgttgcttgtgatgttttgtttgttccatttggtgagaaatatgtaccaattgaaatatgatgttcagggtcagagtagaactagaagcttaggtaaggatgagctcttggagcaacttcctgcactgcagcagctgctctatcggctagtcggctgccaggtaatgtacacacctaactttgtggtatgttatctgcttgatctagattagtttctgactcatttttaccaatgctgtaactgtgtgtgaagcctgaaggagccgcatttggaaactatcttatacagtatgcattagctctggtattgtggctgaccttaattctgatatctgaacttcagatactactagttagaacaatttatccgaattgctcttgctcatgatgaatgaaaatgttactcaggtgctgaaggaaagtttcaagatttattgtgcagtcaatgatggaatcattaatcttgtcgaaatggtaccttttattatttaccagctttctctgcatttgaatcatcgatggatctaatggatatgatcctgatcaaattaaatttctgaactgttgtagttcttcgacatgacaaaaattgatgctatcaaagctttcgacatctacagaagaacaggacatctggtacgcgtaatcacagtgtgctttcattattctgtagagttgcatgcattttgattctctagaaatgtatatggagagctaatgagctttagaatatcaggcaaaaagcctgtccgacttctacgatctctgcaggggtttggaactcgccaggaatttccaatttccagtcctaagagaggcaattacctttatcttagcctatcattgttttgttttcactgagaattctaatgccaaatggacttctctgtactttcttcagccgccgtcatcatttcttggaacaatggaagagtacatcagagaagcccctagaactgctcctgttgcaaataagaccgtagtgagtcattaagctaatgtatttaatcccgaaacaaatcgaacagaagattgagtggcttgatgaaactgtacaggaatatcgacaacttgaattcattccaaacaaggaagaagaacctcctcaaccgttacctgaggtgttagaagaacctgttaaggaggagattttacctgaacctccagaagaaccccatcatcctgcagctgaggttgatgatgaacctgaacctaccacaaccgctgatttattggtaactcctggcaatatgacactgtattcatatcagctatttactgcaataaatggtagcagttgatccaatttatggtggactgcagggtttaaatgaagtgaaccctgctgccgcccagcttgaagagaacaatgcactggctctggccattgtatcaccaggtgattagcatgcatctgcctatactatctcccgattagataattcaagaatcactagtaattctcccaaatccatgcataatcacatccttttggattataacaggtagcaacacatctgctggtgcaggcagtggcttcggtggcatgcttggatcgtcaggttgggagctagcgttggtcactgaacccaccaacagcagcagcaaccaactactgacagagagcaagctggtaagtcaacaactctctattgcttatttcaagaactctctattgctcaatgccattcttttgatcatactgtgactgagagtcatttccaatttttgcactcaatgactcttgtaggctggagggttcgacaagctgctgcttgatagcttatacgatgatgcatcaaggaggcagcaaggagcccagatggatcatcctcgggatccgttcgccatgtcgacaagtgtcgcgccaccgaccaacgtgcagatgtcgatgatggcacagcagcagcaatatttccagcaggagcagcagcagcaaatggtgttagggatgccacagcaattctcagggtggcctcagtatgctggtgtttctcaggcgaatcctttcggtgatacgtattcaggtggtactctccatggaagcagcagcttgatctgaacatttttttttctgattaaaagtagagtagctttgatgtgataatctgagaactgccattaattcagcttgctcttgttagcaaaacgttgtatcttcttcagtcttcacagatctcacttgtgcacagtgcactggcaatttacaagactggaaaacagaaattcatttgttcatttctcaggacatgcttgtatattaccagttaacgatgacattagataaacgagtacagttcaaaggtaaatttgtattttgggtattacacgccgtggaggatgtccaaacatatatggacaagcattgcgcagctttgatagcatagtgccatcatgtagtagctggcgtatacccatcaggatatccccagctgtatcctgtattcagtgcaaacatcacatgaagtacatcgtttctgctagacactgtaacaaaggatccaaacaaaaaacgatcaatccaaagaaaaaaaaaaggaggggaacatcagacaagcgagtagtcgtacatatgtacatggacgtggcaacaaactctcgggtcattttcattctggtataacgagtcaaaaacattttcggccatgccattacacccaacgattctattcctagttcttataaagttctcctgtcatattggccccattatacctgaactcctgttaacccagccctcaccgtatctagtatgcatcgtcttcatcgtgctatttgttcgtcgctttgtgtgacaattagatattgatccaagcctcttcatagtactccaggccttaatcttcatggtattctgggttcttccttaggatcacaaaaccctcaagaactggtgtcagtggaagatatctgcacatagaaagagcataagcataagcataagcaaagatcaactgacaaattagaatattgtactccagatgttatagtttacttttcagttgccagctctgctcgctcccctgcagcaagtaatacaggcgttgaatgtgtctggaatccagtgattgtcttgggtctacctgcctgaccgacgacatcaactgcttggccaacacgtaccggaacagagaggggcttgagatcctcatccacagtcaatagcatcctaggctgttacagtagagagaactgagaatccatgtgactggtttagctatatgcccactaccaagatctttgaacgagatatatacctgcatagctagggtaaggatataaagcatgtaatggtacttccccagaatgatggatttcatgtcaagacaggcatgcagaaccgtcacaagaccagcaagtg

SEQ ID NO: 11530 - DNA, 955 bp, Oryza sativa
aaccaatcacaaccattctttttcacctactttctcttttcaaccaatcacacaccttcttcaatcattctcacatactttcttaatacccgtgccaacctaaaaaatgcttacattttgggacggaggaagtattgcatccccaaaagtgtcagtgtgtagatatcatggatgccatctgtaggcagaacaccatgagtggagtattgaaaagctgcagattctaatgttttttcttttatctggaatgtttttcttttatctggctacgtcttatgtaaacatgaactagaaaaaactatttatgtagcgtagtggattgtatagctcttgtgtaaccatccatctagttttggtgtctgttcagtgcccacaaactattctcgtatagttgtcttcttttttagtcgagctactctcagaaagtcagtcccctagaatgtacatgcttcaagagcagtgacatgaattgtatatgcctgctattgtaggatgacatgataattgaatagtagggaaaacctatgcatgttagttagataatacgttttttttttgatatagtcaggtgacattagttttggttctgtaggatcttatagactactacaactcttctacaataagagattgggcaggaagggccacgaccttccaagcaacagcagctattgcagatggtttggcaccaactctatacaactctgccccccaggttgccttgttctcttctcgaggaccggatgtaaaagattttagctttcaagatgctgatgttctaaagcctgatatactcgctcctggcaatcttatatgggcagcatgggcgcctaatggaactgatgaagccaattatgctggtaagctttgctgtacttttatatcccttgaagcatacaaagctttttaagcatgttatggttgcattgaaattttccttgcatgtttgattgtt

SEQ ID NO: 11531 - DNA, 1177 bp, Oryza sativa
aaatctgaactgttgtcacatttaaacttgttttcaaatattgttccctccattcattttgacgagctaaccgttctaacatattgagcagaggattgggatatagtttcatgagtttctcttagtgtatttctgttatcttatatgattatgcatcttttcagggaaggactgatgacttacaaacagttcatccaagttcttgaggatgatatttcacctgctgaagctgagaaacggtaaatgcacaacacttactgattatatctttgtgctacctttttagtattgatgggctatgtctgtttaaaaaggtatcaagaatacaggacagagtacatcactactcaaaaacgtgcttattttgaccttaacaagaatgatgatcggtaagtcaaaatgatttagctgtacacaactaggaacaaaaatggtccacttgctttaactgacatttcatttgctttcacttgcaggttgaaagacaagtaccatccgaccaacttgtcatctgttattgacaggtggagttgaattcctttttattgagcctgttcccttatgcattcataaacattattatgttgtggaaaaaattttcttgcagaacaataccctttatactgctcatcttaactccttttacatttttgttaagtaaatttcagaaaactacaggtgctttgaccaaattatcacaaaagtatagatttaaggcgctgtatcacaaaactacatatttgatttcgaagttatcacaaaactgcagatattacaatttaaatccctagtactactgttatgttagagttataaatgttgtagtttcgtctaactgcaacttttccatataatgcaggaggaatgatagttgtaaggcaacagcaaaggatttctttcatgatttgcaaaatggaactctggacctgtgagttatatctgcacagcttgtgttatgatgatcttctggacttcttgtttataccttgattttttactgagcagtggccctggaataactgcggctgcagcaagtggcagtgatggaaattctgatgatgatggagacagtgacaagagaagaaagcatggcaggggttcctcaaaagaaacagaccctctttctggtgctcccgtggctcatccagttagctctgaatctcgacgggttcaagtt

SEQ ID NO: 11532 - DNA, 2250 bp, Oryza sativa
tctaatacaaccaatattaatgccgctgactgggaaaagaaggtggatactttctggcaagaaaggctgagaggtcaggaccccatggtaatattagcagccaaggacaaaatcgatgcagcagctgtggaagttctggaaccttatgtcaggaagataagggatgaaaaatatggttggaaatatggctgtggagctaagggttgtacgaaacttttccatgctcctgagttcgttcacaagcatttgaggctgaagcatccagagcttgtgttagagttgacttccaaagtccgagaggatctctatttccaaaattacatgaagtatgtacatatgattttctgcctgtgctacttttttttaaggaggtgttactgatctggatgtttctttatgaacagtgatcctaatgcacctggtggaactccagttatgcaacagtctgcaccagtaagaacctcatactctattacttgcttaaataaaacagaacaattctacaagtgaattccatgcataattacataccagtatatcacatatgtgctatacacatgttacattataacttcgaataaaagttccctgcaaaaaagaacttcaaataaaatttgcttttgcttttatcccagctgcttcctgtaggttgtttctttttcatttgtcagtaaaccccagctcccttttaagaataatttgtatgcctgtgccttttggttactagtttgtgtacacatggaccatataccattccacccctttgttccttctacagatttttccttttaggtgctaagcctacattagatgaactatacggtatcagtcagacagtcacttatgtggcctaaccggtgacgtgagagttaaaggagggttggcttatttgagggaatgatcaggcctggacagaatcagtggaaggaatctgactaaagcttttagtgatgggtcaataccctactgaagaatttagctgacacttctctaagtatcattaatggataaatacattgagtgcaggtggaaactgcagttacatggattcattgaaatccttgacaaatatttatacttctgatttgcaggacaaatcaagacagagacctggtatggataatcgtctgagatatgaccgtgccaatcgtagagaatatgatagggcagagagagatggaagcagatatggtagaggtgatcgttctccaagtcttgatggcgctgatgatcagatgtttgatgctttccgtgggcgaggtccaaatgctccttttgttcctgaacttcccgctccgccaattttgatgcctattcctggtgctgggtaggtgctgtgagaagatatgatttcaatttttgttctgatagtataaaagactgctaatgagcgtggctggttttattttcagtcctttgggtccatttgttcctgcacctccagaaatagccatgcatatgctgagagagcaagggccgccacctccatttgaaccaaacggacctcctcatgccaacccaggagtgcttggaccaatgatgggtggtcctgcgccaattataaccatgcctccatcttttcgtcaagatcctcgccgtttgcgaaggttagtaattattcattcataccattgaattccatgatgtctattctcctattttgcttggattggcttgattatgccacattctgaccaacaatttggccacctagggcttgccaccaagccttacaccttgctttagtttgtatatgattacttctactcgagggcttaaccatactgtctttattatcatagaggcaaaaatagtatgttgatttactgtgccattgtactatattttacaaccggcaacttaacccatccatgatgacgattcttctgcagttacaatgaccttgatgctccggacgaggaagttaccgttcttgactacagaagtttgtagagcttgccctggtgtaattgtaatttgccaatcacaactctagcatctccggtctagtctaggttggtgatgtattctttttcagacataggggatgtcatgaacaatagagcattttttgaggtgtaatgcgtcagaaactactgttgtaatttcaaatggcaacatctgttattgaactgtgcaccacgtgcacttgtagtcccaagaagtgttgaacgcagtttgataaaatgtaatttttgagactttatatgacaacgttttagctgacaacattttacttctccattggaa

SEQ ID NO: 11533 - DNA, 628 bp, Oryza sativa
gcagtggtgcggttaacccaaaagccgccctggatcctggccttgttctggatgcaagtaagttaaatttttcgtatgcaattttttaataaattcaaactgctccatgttattcagacaataatctgaagaccattctaagtttgaatttttttttgttggtagctcatcaagattacatcacatttttgtgttcgatccccgacgtggaacacagtgaagtatcaaacataactggttcaacttgcagctccagctccaaggtgcagcagcgcccctatgatctcaacatcccctcaatcaccatctcccagcttagaggcacgcagacggtgaagcggacagttacaagcgtggccgccgaggccgaaacctacaccatcatgacaagaatgtcgccggagatcgcgctggaggtctcacctccagcgctgacagtgctccccggcgcatcgagagagataacggcgaccctcacggccaggtcagtgactggcacctacagttttggagagatcaccatgaaaggggaccgaggtcaccttgtgagaatcccagtggtagctatgggatttaagtagactaatgtaagtggctccaggtgagctagagctatgtctgcctctga

SEQ ID NO: 11534 - DNA, 1396 bp, Oryza sativa
tgaacaactaagaataatgcacaaaatcacctcaatgaatgtgagcccttgtgctagtgaaattcacttccttctatcttgccgttattgttaatcaatatctattattcccctttgcttttgctctccttccggattgtgattttcctgagtttgtgattgacaggatagccgtgtacaaagtcctttacaggctttttggtggttatgtatctgatgttgttgcagccattgatcaggtataacatatgagttacttatctgaatttctttccactgtaatgcaggtgctgccatgttagtacttagtacctgacaatagtgactcaaaacaattatttctggaatctgccatagtagttgttttcttcatagactattgcagaaatgagtgaaacaacatctgccagttatgtaatgcatgtcactatcacaagccttcaatatgtaggaactaatgcatggatggcaatctgcattttgcaggctgtgcaggatggtgttgacattctcaacctttctgttggcccaaatagcccgccaactgctacgcggactacatttttgaatccttttgatgctgcacttctttccgctgtgaaagctggggtgtttgttgcccaagcagcaggaaatggaggaccatttccgaaaacactggtatcattcagcccatggataaccactgttgctgctggagttgatgaccgcagatacaaaaatcatttggtgctaggaaatgggaaacttcttcctggacttggtgtatcacgtaagttctgtttattcatgtattttagctcaaattttggttttctattactacatgtatggtatatgcattcatgggcaacaaaaattgtacaaaatgaattaaaatgacctaagctaagtggcctaccttttaacttcgcccccccccaaaataaataaataaataaaaatcactcaatgttgttgtctgcgcttagggtgtgttcggaacccctggttcccaacactaagtgcccgcacggaaacggagcagcgattagcgggtgattaattaagtatttactattttttttttcaaaaatggattaatttgttttttttaagcaactttcgtatagaaacttttgcaaaaaagcccgtttagcagtttgaaaagcgtgcacgcggaaaacgagggagatgggttgggaagaggggctgccgaacacagccttagagaagtatgaatgatagggcagcatcagctgcacttgatttttttttgttatgtagggtgtaggactgtaggtagatctttatacgaaattgtgtttttttatctcattgtgaaaatactttgtgtgaaagagacaatcctctgtttttcttcctttgtaattccactgtcatatgttactgcatc

SEQ ID NO: 11535 - DNA, 692 bp, Oryza sativa
atgtcctgcttctttgtaataataacttgagaggttccgaagcatcccagctatacgggcattgtttgtaccagcccctatcaagcccagggagatgattgcagcctgcatgtaccagtttgatcaaattaaaatcaatgctcatagaaattaatatggtaggttttgctggtgaggttactaaccatagaaacttccgcatctgcatcatggctcagtctactcattgtgtccataacatttacctaattgacaggcaagtggtagaaatgtagacatcagaaaactagataagatatttatctagccaaatgatacaatctactaattttcctcgaataaccaggatcaaataatagtcatctgacaaagcacattctcaagagtattgaattgaaatagatgatgcagcagagtacaaaactaactgtcacggcatgctattaaatagttctttctcaacaattcaattgaatgattgtgtgcaacggcatgaagatagcacacatttaatgctactagtatacaaaaagaactgttacctttggattggatatgcaaagcaaacccagagctagaggaaccgcccttctaatattctgctcgccatactgtaaaagacgctcaagggaacgtacagccatttccgcccctaattcttcagccatggcaattagggagattccaagaac

SEQ ID NO: 11536 - DNA, 759 bp, Oryza sativa
ggaagattcatcaaaaacaaataggcgctaaaaaaatgtaatcctacaacctatgcacaattcttctgttaattgggaatcaccttaagcacgttccctgtcccagcatatgccagtgacatcaatgtcacgtcacaataattccttatcttctcatcaaaggttttagaaacctctgcagtcgcctccacactttcctgagaacagtagtcaagaatgagtataatagtatattaacataaaactggctaaaaacagacggtgtaggttcatgaagaggttgcatgttacatatgcaagacaattgacagtgcttaatccagagaaaaaagcaattaccaaaagaataaaattgtacttgggatgaatgaactaaaaatacatttgagccagttcaactacttgcatggtgcacgcgaaccaaggccaaaatagtccacgttagcgaatctgagcgttatgctgctgaatgcatgcataaatcttgtgatccagaaaagatagggatagttctcctatgccttttggaaattatcttgctaggggaatttgcagaagattgatagaagtgcctgatgttcctgataatgatgagcagaatgagtcaccatacataccaaattccagtttcctttatcctgattgatctccctcctcactgcgcaaatccctcatctcacaactcagtggcctggttgcactattggtgccgcactgcatgagtgggccccacgtgtcgcatgaaataattcaaagaga

SEQ ID NO: 11537 - DNA, 2718 bp, Oryza sativa
aagctctggttcactacgctccattaagacgcatatgattgtctgtgcaacctcttcattacaggaaccaacgaacaccaaacctaaggagatggcagagaagaccaagacctccagaggtacttgggagtcagtcagaaaagctgtgagattctctctaacctgaaatttttggaaaccatgttaatacaaaataacacatggttaatattttttaaccagtgggatagcaagaccaagaccaaggatttgacctcctctttctgggagccagcataagcaataccaagaccaaggattgctccaattcgtataattgactcatccctgctgaaatactcagaaatgagagcaaatgcctggagaagatgtcacaacatcagtacagagacttgtgcattagaagttttagaagatgtggagagaggtaaaagatggacataccggatcacagtcactcttcacaccacaagaaacaattccaatccctagcaaagccccagcaacaacatgaatatcattgctgtgcaggtacttgtcaagttgggcaagtcctgaatcagaatcccacagaagaatcattccctgaaaatgattgttttatcagcaccatgatcacataataacctaaatgccatgtatatggaaataaaccaagctgttgcagttgcactaccaggctagcggctgcactagctttcccatgttccttgttcttgaataaccagtttccagaagaaccactgcttgaagaatctgatggtgtggtcatgagtttatcctgcaacaagaatgttgagaaccttgcttgccctggaaacctttgatgaaattcgcataactaacctggccaaatccagcattcacgaatgcattgacaaatgttgccgccagattctgtcttgcggaatcaagactggagcttgtagcccctcggccatcaatcaaatgaacctaatgaattagcatgcattttttaatcattaatagcaggtccataaacaaagaaataagtagaaacatgaaatcagcagataacatttgggtaaaaaaaagttaaccttatatatgtcttctggagattttggctccatgacctcaatatctcgtgcaagtgtaaggtacccctcactcaatttaatattagaaattatgtcctgcaaagcctccttctcattttcatcagcagctatgtcatcatcaatctcgatgcttaaacccttcagcaaagagaaaaaaaaccattgaccacataagcaaagaggaaatgtgaacaatgcaggctaccaataatactgaattgtagacaagaacacaaacagaaattttgcttctgttgaatatttgtgtgcatgggatgaggctcacatggcgtgctatgataaacgcgaattgcttcttcagttgaaaatcatcagttgctgtaaaaatcggcttcaactccagggactacaaatcaatgaaatatttgtcagtgccctaatgtactggacagcaaataggacatgacaatattcattcacccaccttgtcataaagcagaagtgcaatacgcaaagcatttgcaaaatctccaaatttcatgtaaatctcaaaagctattttaagtgccgacatgtcatcaggagcaggaagatatctgcaagtttgcatcccaacacaaaagagtaaatgaagttcaattaagtaaaactagataatactaagctttaatcaagtgagaccaaattcagtggcatacttagaagaactagtgaggtacaagcaggtccttttgtagttcgtggagtcaacgtgcttaactagcaaatcaagcttttcgacctatgaagcaatttgatatcacacatcagttgtgaaccaatgaacaaataatgaaaactcttaatacaaagaacgaacaatttttcatatgtttaaaaatagaagtttcacttacctccattagaagatccacagcttcaggttcagcattatgctgcaatataaataataatcaatatcatcagtccatccattgatactagttgtttattggctactacctccatcccgcaatagttgtcgctttgacttttttctttcaatgtttgcccattcgttttatttgaaaaatttgtgtaaatatgaaaaaggataagtaatacttaaagtacttttgataataaagaaagtcacaaataaaataaatgataattttaaaaaattttgaataagacgaatgatcaaattttacaaacaaaaactcaaagcgacaagtaatatgggacggaggtagtaatatttaatgcattacacagagtgtaacaagacatctgtgatgaaataagaaaaacaaatgacacccatggactagactcagaattgaccttcatgtggaatgaaacgatttgctccaccagttccttcagggaatcagttggcatgccatcatcctgcaaagtggaaaaaaaaagttaggattataaaaatgaggtccacacacctaaactttgtgttgtcttagtccatgcacgtgtgataacataattgacagaagaaatcatgtgtgtggcttctaacagaacaaaaaaaaaattatatagcaatcatgctatctcaattcttgccaaataacaatcagtacggtatagatgtgggatacaaaagtcaaaagggtctcagggaagatcacttaaaacacttgttattgaaatcaacagcagctagacaagacat

SEQ ID NO: 11538 - DNA, 7294 bp, Oryza sativa
aatacttctttcattggggtgaagaaatacattatgcaattcatatgatgatatggattagggtccaacctggcgcttctggaattcctgtgcaatttcaccagccaagtttctagcaagcgagacattgacattgttagaaaatccaattcaaattcaaaagacaaacatatgtattccaacagaagacctgaaaagaataactttttatcaataatttcttgagtacaattcaatatttttttaatacactgagaacagttaaatatttgaccacaccataaattctaaataagctgatatgaaggtaattgtttggtaattcatcataaactacctcaggaataaatctttacaattaagattcacaagcagcaactgtctcattaataaaattgcaagctaaacaatttaggaggcctggaaattggtgtcacctcacatattcatgaccccatgaaccaatgtcaccttcagagcctatcattcggtagttgaggctctcctgaaacgataaaagaaggcatattagccaattcttgaaggattgatactgtacagttaatggtgagaaaaagttgaactctatctgtctatcatttaaaacccacgaaaaaatgtatgactatttatagaagtaaatcattctcagaagttagcatgcaagcaaattaaaaaagcactgggaaattgacacaaggaaaagacatcagaatggtatttttcacatactctttctccttcagcggacattgtcagggccaatactgacaaaatatcagccatatacttctgcagaataattgaagaatatcatataagcatcaagtagtatttgaaccgtgactcaaccgagagatcaaggattgattgataccttcagatcagattctggcattgtctcaaagtaagccttgagagttccatagtgcgggcgaaggaatttgagaggctttgggacagaggtcattgaacttgtcgcagaacggatctcctgcctgttaagcataaatcaccattaacaagagaccaataagagaaatgtgaaaactgtctatgcactaactggttgaacaatgcaaagtgatgccaccaatagcagcagtagccactcagatgcgacattccagctgagcagatcaaacaatctcactatgacgcggtagagattagagaaattgaacagttaaagcatgacctcatagtaattgtgattaagtagtattatacccaagatttaagggcaaaaggataaacaagcctccaacaatgtgccgaagatctacattcttgcaacaccagcaattaagcagccaaaccaataactcgggcagaatttatgtggattttcaattctcaggactgtaagtttgcagaacaacaaactcttgcacaggacaagtaagcagtgcaaccaaaatacctagcagttaataatagtctactagatgacatgatcatccgtccaaaccatactatgaataatgtatggaacttgtaataaactaataggtagtgtgataaatgcatccacccaaacgaggtaccagatgacacaaaacagaaatccctgaactacgcatcacgcacaatcagaattatacagttccacaccatcagaacaatcctcgttacctcatgctctcgagggcgagcttctggacgccgggatcggtgtcctgcgcccgcaccacgtagagctcgagctgctccttgagcgcctggtcctcctccgactgcaaccacgcaaagcaatccgtaagagagagatggggggagggaaggagatggcgaatcgggggtgggcgggtgggtagctcaccaggtcgtcgtccttcttctcatccttcttcttccccttgcccttggccggctgcggctgcggctgctgcggcggaggcgggacggggtccgagggggaggcggaggaggcgtccccgttggggtcctcgcgcggcggcatggcggagggcgagggcgatctccccggcgcgcggcggcgcggcgaggtagggtttaggaatcgagctccgcgcggaggcgagagcgcgagatgaggggaagggaagagaagaggagttggagactgctgctactggaacacgccgcaactcttggggagcgatgaatttcgctccaagaaagaaaaagataacgagagagaaagagagattcggtttaataaaggttttggtaataaactttcagtttgatgaaattgcattcttacattgttttcttattattattgtgatgatgattagtcgacggtttggctgattacatgttgggaatgaaaacataacatgggtacaaataaaataaaaacataacataggtaagtaggaaaatgagcattgaaatatactcctccgtttcatattgcaagttattttgactttatactagtaaaaatttcttaagtttgattaaatttatagaaacaattaataaaataaacatcaaattatattcattaaaattaacatttaatatatttttataatatgtttattttatgtcacaaatgttgttatgtttttttataaactttgtcaaacttaaatattaagaaaaatatcaaagcgacttatagtatgaaacgataatttttttattattttttgaaacttttgattttttttattttaaaatcaaacaattctaaaacttattttcaaaatctaaacattttagcacgtcaaccctcgtggtgtggcaaaatagtactgtcacgtcacccacaacgggcacgacaattttgtcatgccacgccagacaagatgacgtggtaagacaaacgttgtcacaccaattagaccgcgtagaaaaaaaaattgctagcatggcgaaacaacactggtactcatccattccatgttttttttaaccttttgaactttttaattttaaaattaaacatttttaaaactttgattttaagacctgaatcttttttagcgtggcaaaacaataccgccatgacaatttcagagaaaacgttatgccacatgcataaagaaataattacccgtaaacacggacacatatataagtcgttccattcgtaaggaatctaaccaaataaattatgctcaaattgtaaatgtttttcattgttttatgagattattggacaaattctctaggagaaaggttcgaggtataggtagcaaattgtactaaatccaaaagtagttcaagcaagctataacagtttgcacgccctgggcacttagtgacccttacataatttctcaggtgaagacaagactactttgagttttttagtgatttttaaatctatgatatgttaatctcgtgaactagcaaataattagtgaaattagggtaaaaatatcactggctgtctccatggatgcaataaaatgcaaacatttaattgatagaaaggatttataacagtagaatttcaatatagtagacactacatatattgtggcctatcatcgtctacgaccaaaatttatttatggtaaaacttttatactctattcatatagagttagcgatttaaaaagtcaaaaataagctagataagaaaaattcaaaatcaacttaaaatgaagttttaaattcaaaatttgccggtgaaagataagccaaccagcgaatgacggagctgctaacattctcatgccccatcgggtgccctaatcagccaaagataaaaccaaaaatagctaatcatgtccccatcgaatgccctcaaccttaatttcgagattgatttcaaaatattttcaatatagttcctttctcagtattggcttttaaatcaccaagaaacacgtatataaaatttttacctataaattatttttttctctaataaaccaaaacggttttgtagtgaatatggcaacccatgggctttcaaacattctacattctgtcagcctagtttggtttcaacctaaaaaagaaagcctgatctgatcggtgacagtcggagccacatgaaaacaacctcgccaccaccaccggcgcagcgcgcagtgtcgttcacgtgctgttgcttcttcaatgccgttgctgaataatcttgcgcctgccgcgaggtcactgacatgtcggtggtgatcagctcatcagtgccctctgcccatcactgaaagtctgaaaaaactcatccataaaagcagagccacttcaccagaattcaaagctaaatttatatattaatttagagtattaaatatagactacttacaaaactaattatataaatgaaagctaatttatgagataaattttttaagcctaattaatacataattagagaatgtttactgtagcatcacataggctaattatggattaattagactcaatagattcgtctcacgaattactccaaaattatggatgggttttattaatagtcaacgtttaatatttataattagtgtccaaacatctgatgtgatagagacttgtccaatctaaacagtgtctaagtaccctgacattaccaacgttcatctccacggcactgcgcccccaggccccagccaccgccggccgccgccggagatgtcgccgacgaccacgtccgcggcggcgttggcccccatcgccggagcaatggagcatccagttctacggtccccgacacttgttcctcgtcaatggcaagagtccaaaacctaccgcacctctagactccagggggcccaccacccgctactgccatctgggacccacatccgcggatgtgggcccacgtaagcagtttccatttgcgacggacacggtccatggaccgggagacactggcatgtggggcccactagggctggtccacgtgagccgcatgcgccacgtatcacgcgaaaaaaaacaaaaaaaaaggaaaaaaagaagagggaatttgaggttccttgcttggttgcctcctccattaaagacaacaaaagcaacgccattagcacacacctccactccactccactctcccaccactctcgcttcccgaggcgcgcaaaccctagcctcgtcgcgccgcgccgcatcctcctcctccccccgcctgagtagcgccgccgcatgcggctgcgcgaggcgcggcgaagcgactgacggggggtgatccgccgctttcgggggctgatcgaggcgggaggaggagcggcggcgccggggaatgcccgacctctcaggcgatctccttcgtggtttttggtaataataaacaggtttgttcatctctcgttttacatttttctttctctccgtgacgcgcgtttttttttttgctgttcctcttttggtggtttacctggtaatagagctaagctacagtaggataaaggaccatactgtttagagattccttttgccaatttttaaattttttcatcggtattttgtttgaaggaaaacctttttttttttccttcttttagttttggctgtattttttaccagatgatgatattattcatattgatctttgattttgttgtttcacccttttttagcagcttgcagtattggttacagtgagataatatttgttcagcctgttctagtagatcttaactcatgcttgatcctttagcaaagtggtataaatttttagtttcatttcaaaatcaatctgttctaaagaaaatgcagctattaaaatgcatacggagtacacacagactagccgtttacagtacgctatattgtagtgtagactgtagagtataatcgttctgaagagccatttaatgtcatcggccgccctaatttaataaggttccgtaaatgcgtgctccatgagaggcttgtgaggtgggcaactccagtatcacaaagaaattgtgggcactgccgggaccagtagtggatgactagggtagtgagtgattttactcagtcagtagtgcagtcctgtactcctgtagttgttgtactcttgactctcccaaaccatcaaattgatgtctagtgtcatgcatacttgtaacttgtaagtgcacttccctgacagttccattctttggaagattctgtggtgtggcaattcggatattgctgaagatgaaggcgcttgagctcgcgtgtttgcttcttatcattgtaccacaagtggttcttggaacacatgatgtgtacattgttacaatggaaggcgaacctgttgtcagctacagaggtggagttgaaggattccctgcaaccgccatagatttggatgaagatatggaaattaccaggtagtttactattgatgatgttttttcaccatgccttcgaacatttattttgtgttggctgactcttggtgaatttgtggagtctatgttgggttgcatggcatattggacttgttagttcttattgttgaattgcatttcacatgtcttgttgcacttggagcttgctactgaggaagtgcacctcctaaatgtttcttgaaatggattccattttcttcccattatgatatatcatatatgtagtgtgtgaggtttgagctgttaagagtcttccaacatgttaagaatatctgctcgaaagccttcattagaaaaaaaaaaggtcaccactgttactgtctttcagctctctgatattgaaattgattatccccccattaagtttttaatcacagcttgcttgtatttgtggagttgtggtggaaacatgacaattttgtatatgttccaatttactgatttcagtgaggctgtgacttcatactcactccacctacgaaggtaccatgacaagcttctagactcacttttggtagaaggaacttatgagaagctttatagctaccatcatcttattaatggttttgcagtacacatgtcacccttacaggtatttagcatttttatatcttttcttctttcctggtttaagattattatcttggctgaacacagcaatctttcactgtgttaggctgaattcctaaggaaagccccaggagtaaagcatgtggagagagatatgaagatacagaaattgacgacacacactccacaatttcttggattgccaacaggggtatggccaacgggtggtggcttcgatagagctggtgaagatgttgtgattggctttgtggattcaggaatttacccccaacatccaagcttctctgcccacaaaactgatccttatgggcctgttcctcattacaaggggaaatgtgagatggatccagtaacaagaagaagcttttgtaatgggaagatagttggtgcccagcattttgcaaaagctgcaattgctgctggagcgtttaatcctgatgtcgattttgcat

SEQ ID NO: 11539 - DNA, 1187 bp, Oryza sativa
acactttgcaggaaaccgtccgacatagatccaactggaaaagatcctgatccggctgtgacagagccaaatttatccaaagacgctgagccgtctgccgaaaaccagccgactgccaaagccagccgactgccgaaagccagccgactggcgcccatgcttcggatgacaaagccgatccgagtgaccagccgccaactggagaccagtcggcaacagctgaaactgcaacaacacaagagcccccgactggaaaccagtcggatgtaggtcccgatgaagaaatccctgaagttgaagcgcaaacgacaacttcccaaggaccagaggctggtaaagactcaatgattgggtctctaaataaagaacaaggaccacctcatgttcagccaggaacatcctcaggtaacacatcttctcaagtgatgccgatttaaataacttcagcttactcgtctaatgtcttggaaatacatcaggaacactaggcgatgacgaagaaacaattcctcgcataaaggcggctgatgactcccgtcctcctatcttgctcaaatggtgggacgagaactcgcaagttgccggcattgttataaatcgtcaaaaagaagatgaggaagtgtgccagctgaagaaagcacttggagaagccactcgcattgtgaatgtaaatcttccgggtgactgcctttaataactttgttctctctttagcagaactgaaccatgatccatcatgcagagaatccatcttcgcaatgaggccaagactacaactttggaaaagctggttcctcatttgggaactcttgaagcagttagggaccaactgcatgaggccaaggagtatgctaaaaagacagagaaggagttaagggaccgaattgcccagctccaggattcaaacttcgagctaagtggttcatcaaaaggtaaccttccagatctattccattgatttatgctgtcataactgtatcctcaaatatttggatttcaaacagcacaagctaccaggatggcacaaatggagaaacagattgaagccttgaaaagagacaaagtagaactagctgtgcaaagggactcagccttgaaggaggttgaaggtactgccagctgacaatttgaactttcctctctttaatgcagcaaattcttattataaatgtgttttgtagaccgta

SEQ ID NO: 11540 - DNA, 729 bp, Oryza sativa
gtttgtttcctgacttgtatatcaaggaaacaacttaagacttagtcggtcacgactgtatttaatctgtatctgtgtattccgttagggatatagattatcttttgtaacccggactccttcctatatataaggggggtccgggcgcctctaggggcagttgttggattttctccaaatcatacaatcaataacacactcggcggattcatccccggacaggagtagggtattacttcttttataagaaggcctgaacctgtataaatcctttgtctccaaacccatacactttcctagcttgatagccaccccttttattattgccgaaatctagtttcgacggccctgttccaccgaatcttctttctcaaaccccaaccaaacaagagtaagccatgtgtagtcggaggggccggatttcagctgaggggaactctgagccagaaatacttctcaatgcccttcaagacttcaaacaaaggatggcatgcgaactggttttatgttcagaatcctgagcctgctcttcccgaatactcttgtcttcccccggtgtaccaagatacttggaactctcttccaatcggagatgaagctgcccaagccttggaattgttggatcgcatgttaaaactcaaaaaacaaggcttgcaaggagagcagatcactcggcatttcatcaaatgccgactagcgccaattaaagaaagatcccgtacagctttt

SEQ ID NO: 11541 - DNA, 3611 bp, Oryza sativa
gaccggctaaaacctatgccggcaaatgggtgcaacaactgccatcggtacttgggtctttgcgaactacacccagtcgggccacaggccagtcaccttttttccttgtctatggggcaaaggcaatgttgccgagtgaagtcgaatttgagtctttgcgctttcgtaatttccgtgaagaacgctacgaagaagaccgagtggatgacttgcaccgattggaagaagcccgcgaagcagctttgattcggtcggctcgatatttacaagggttgcggcgctatcataatcgcaatgttcgatctcgtgcctttttagtcggtgacctggttttgaggaaaattcaaactacacgagatcggcacaagttatctcctctatgggaagggccatttattatctctgaagtcacccggccaggttcttatcgactcaagcgcgaagacggtactcttgtcgacaactcttggaacattgaacatcttcgtcgtttctacgcttaagtttatcattgtacttccctatcttgactgtcaacatcaagttttcttcttgccgttgtcagtcgggggctatcatcataataatggagtgtgattttttatcaatttaatttgcttacttggtatatcattgccttgtttgattttttctacttagtctgcgaggactgaaagtttttaatagcttctttgggttttaggctcaacaaagcttgataaaagcttttaagaaatcaaagacttggctagaactatcaagcacagcataaatacaccagtattgtacaaattgagcctccatttgctacatttacactcagtcagaatcagtcctttcatcatcagagttattattgctcggctgaaggtcgttgttgcggaattgctctacaacatcacttgcaatcttgtcagccgcactttgagcattactgataagatcaagagcagcttcttcacttgtcccgtctgcaaagccatcaatggtatcaatttcaattctcgggtacaaggatttggtcattgccaatgccatgctagctcccatacttccagctttcttgatgttcttgaagtacacatccggtgcaactcttagcttgtcaaagatctcggttgcgtcaagtgcactcggaccactgttattaagaaacatagcttggacaagtggtgtagcgacattggtgacttcgtttcttgctccttcaagcttcttgatcttaccaaccaggacatcaaactgagcttgagatttgattttacggtctacaaaacacatttataataagaatctgctgcattaaagagaggacagttcaaattgtcagctggcagtaccttcaacctccttcaaggctgagtccctttccgcagccagttctaccttgtcttttttcaaggcttctatttgcttctccatctgagccattctggtggcttgcgctgtttgaaatccaaatgttcgaggatacagttatgacagcataaatcaatggaacagatctggaagattaccttttgatgaaccactcagctcgaagtttgaatcctggagctgagcaattcgctcccttaattctttctccgtcttttttgcgtgctccttggcctcgtgtagctggctcctaacggcttcaagagttcccaaatgagggaccagcttttctaaggttgcagtcttggcctcattgcgaagatggattctctgcacggtgattcatgggttagttttgctaacgagaaaacaaagtcatcaaaggcagtcacctagaagacttacattcacaatgcgagtggcttctccaagtactttcttcagctggcacacttcctcgtcttctttttggcgatttataacaatgccggaaacttgagagttctcgtcccaccatttgagtaagataggaggacgagagtcatcagctgcctttatgcggagaatttcttcttcgtcgccgcctagtggacctgatgtattcccaagacattagacgaacaagctggagttattcagaacggcatcacttgagaagatgagttacctgaggatgtgcctggctgagcgtgaggtgatccttgctctttatctggagacccaatcactgagtcattaccagcttctggtcctcgagaagttgtctgcgcttcagcttcaggagtctcttgatttagatctacatccgactggtttccagtcgggggctctctggttgttgcagtttcagttgttgccgactggtttccagtcggcggctggtcactcggattggccttgtcatccgaagcatgggcgccagtcggctgactttcggcagtcggctggctttcagcagtcggttcagcatccttggatatatttggttctgtcacagccggatcaggatcttttccggttggatctatgtcggatggtttcctgcaaagtgttctttcgatattcagcgtaatctctatgagagaagcatatcaaagggagatggtaccgagaagtttatacctggaagatgttctaatctttggcatttgacggccggccagttttttcctgggcatggtatgctttgggagtttgttgggcgtgcccttgtccccagatttgttgctgtcatcgccctcgtcgtcattaagcaccagctttctcttgcgaggacctgtctgaccagccggtttggaggtttgaggttgtgagtctgacctgattgtcggccctccacttccctgaatggtgtgctggcgaggagatcggcgctgagcaattgggggatcagatttcatcaatacgtattcctgaatgagatgcttccacagttagctaactcaacatgaagacaagatactattttggtcataagttgaagatttcagatacatacctgcggaggcggattgaatgcattatatggcacaactggcagctggtgtgagtagctaacgacaatggcatttgagaagattttatacattctctccttcatgattttgaaatccagagagtctggttcttcgcgattaggatcatgcttgccgtcaaactcaaaagctgtacgggatctttctttaattggcgctagtcggcatttgatgaaatgccgagtgatctgctctccttgcaagccttgttctttgagttttaacatgcgatccaacaattccaaggcttgggcagcttcatctccgattggaagagagttccaagtatcttggtacaccgggggaagacaagagtattcgggaagagcaggctcaggattctgaacataaaaccagttcgcatgccatcctttgtttgaagtcttgaagggcattgagaagtatttctggctcagagttcccctcagctgaaatccggcccctccgactacacatggcttactcttgtttggttggggtttgagaaagaagattcggcggaacagggcgaagtggggtttaattcctaagaaggcttcacagacatggatgaaattggcaatgtggactatggaattcgggtttaggtgatgcaagctgattccataaaagcttaatatcccgcggaagaatttcgaggtcggaagagcgaagccgccatagaagaaatgcgagaagactacgatctcatgtgtatca

SEQ ID NO: 11542 - DNA, 15946 bp, Oryza sativa
cggcagcggcgcacaccaaccgtggaggcgatgaacccaatcggcagcgacggaggcaggccggcggtgaagtcgtagacgcccaacagcggcggcataataggccagccgtgtaggcggaggcaccagtcggcggcgacggaggcaggccggcggtgaagtcgtagacgcccaacagcggcggcataataggccagccgtgtagacggaggcaccaatcggcggcgacggaggcaggccggcggtgaagtcgtagacgcccaacagcggcggcataataggccagccgtgtaggcggaggcaccagtcggcggcgacggagacaggccggcggtgaagtcgtagacgcccaacagcggcggcataataggccagccgtgtaggcggaggcaccactcggcggcgacggcggcaggccggcggtgaagtcgtagacgcccaacagcggcggcataataggccagccgtgtaggcgaggacaccagtcggcggcgacggagtgaataggccagccgtgtaggcggaggcaccactcggcggcgacggaggcaggccggcggtgaagtcgtagacgcccaacagcggcggcataataggccagccgtgcaggcggaaacaccagtcggcggcggcgaaggccagccggtcggtgaagacatggacgcccatgaacggtggtgtgaccgaccaaccgtataggcgatgacaccagtcggcggcgacggaggcaggccggcggtgaagtcgttgttgctatcagcaatggcggtggcgaggacaagccggcggagtggactcgcggccgatcgaccggaaagctgagacgcctcgagtccatgaccagcatcaatcgcctcaatagtgccgcgtagttatatgcgaacaacaacaaaaaatagcaagaaattaatctgagattaaaaatcaatatgataaataatgataaaaatcagattgagtttccccctgactgatttggatcaagtcagagaagaggagcttgaagaagtggtcgacggaaaggaagtgaaaactcccaaagcgaaagcgaagtcggcgactcatgaaattgattccatcgcgctcgttgataggaaactcgacgcaacccctacctggcgcgccaactgtcgaaacatgatttcggcaataataaaacggggtagcgcacgagacctaaaagtggatggatgtggagacaaaggatttagacaggttcaggccctctcaatgagaggtaataccctactcctgtttggggatttgaatccgccgggtgtagtatagatctaacgatcatatgtgctcatgccccctagagggcctcctgcccaccttatataggatggggggcaggattacaagatagaaaccttaaccaacacggtatcggcttcctaaatctactttacaatattatcaaatcaggactttaggccgctccataatataaaaggaaacgtaatacccaagtcatgatctgttacatattccatacatatatgttatcccctattactagtcggataaccatgccgtgtgggtatggggtacccataatctccacaaattctacctacctacctgctgctgcctatctcttcaaatgcatcagggtttgtgcagacgatctcgagcagcaaagatgcacgtatgccttgcaattctgaatatatttatactgtactgatctagatggattctgaaaaatactactatactggtgtacgtggcgtacgtcgtggaccggatgtgtgttaagatgacaaggcattacttaatcctagataattagtagtatacgtgtgtcgctgaagttgtcctgatccaggcttggaatttggaatagtcctgccagaaaaatatggctgtgtttagatctaaagtctttagtatttttccatcacatcaacctatcatatacacataacttttcagtcatatcatcttcaatttcaactaaatttaaactttgcactgaactaaatacagtctatattatcaatctcgatcatgagaacaaaaggcactagttttcttcctcagtttgacaagctgcatatactcctttctttaagagaaatcctcagtgtgatagcgttttaaccgacatgaacaatcagtagaatctcctagaatactcttaccatggtcagaattaagatcctcagagattaaattttcttagcctatggtgctgtttagttcacaccaaacttctctctaactctcaactttcgatcacatcacatcacatccaaaactttcctacacacataaactcctaactttttttctaaactaccaactttacctaaacttctctccaatttcagaaactaaacacagcctataattaacacgcatgcatgcttcagttatcaaatcatcattcatctcgatagaacatctaccttctccctctgtttcacaatgtaagtcattttagtattttttttcacatttatattggtgttaatgaatctaaacaatatcaatataaatgtgaaaaatgttagaataatttgtatcgtgaaacgcaggaagtaattagtactaacaattaaatcaaggtacgcacgctacgttgctgcttaatactcatccaaatctatcggcgaaaatgacaccgatcgatcatggagaggggatagccaccagctgctagctgtccatcatcacaaacagctatagcattggatcacttgtactcctatcctatctagtagactagtactatcgtgtcctgtcgaaactagatttcggcaataataaaaggggtggctatcaagctaggaaagtgtatgggtttggagacaaaggatttatacaggttcaggccttcttataaaagaagtaataccctactcctgtccggggatgaatccgccgagtgtgttattgattgtatgatttggagaaaatccaacaactgcccctagaggcgcctggaccccccttatatataggaaggagtccgggttacaaaagataatctatatccctaacggaatacacagatacagattaaatacagtcgtgaccgactaagtcttaagttgtttccttgatatacaagtcaggaaacaaacccaggatacacataagatattctatctatattcggtatcctatattcagtccaaatatcatcgccgtgtagatatgggatatccataatctccacagtagcccccgagacctttgcagtcaatcatcgtagccttctcaaagataataatccgagtgcttcaaacttttcatgccaaggcctgccgagtagcgaagacaaagactgtaaagggcgaaaagataaaaatatggtgcatcgaatagatgcacctaattaggtgtagcccccaactatgtgattagttaacaaactaaacatatagttgagaaatcaaataatagcacaattgtgcatcatatgacaaaagcacacacggcgcctaaataggcatgctagccgactgctttttagccataatgaaaagagtccgagtggtttacactctaaaaggttcacgaatgaacacactggacaggcatccgaatataaaactctaaagattacccaccaagtattataaaaattatggtaatgaataagtctaatagcctaggctatgactatttaccataatgaaaataggtatataacataccaaggaagtgactatgataaaaacaagtcattccaaattaacccagacagcttttgtagcctaataaagctaacaaaaagcagtataacacctttctgtcgggcaccttttaatttgcattgcaataattccaaagaattatatgaccgcataaaaatgattttatcagcattgggcaacactattgtgcgcataatattgccaaagcaaaatatgcctaagtccctaaggaacacaatgggccacgctgttaaaagtattgggctgaagtactgttcaggcctaggcccatttgcacctccgatacccttaacaagaaatcccgagatccaagcgacgcttcgtcttccccgccggaactctcgccattttccccactccttgctacagtgcagaactgcgccggcgaactagggttcaccactccactcaaatccaccttcgaaaagtgcatcaaaatccttcccgtgatccaccgccttaatccctcatttctccctagccatccctcgaatcaaatcagcgcattcggataaaatcgatggcggaagagaaggaaagcttcgaaggccaatgggcgccgtccgacgtaacggaagagaacctgaaggagatggtggcgcacggcgttctcccagccaaggagatcatcgggtggcggccacgcgttcggtaaggcttttccaccctgatacacatgagatcgtagtcttctcgcatttcttctatggcggcttcgctcttccgacctcgaaattcttccgcgggatattaagcttttatggaatcagcttgcatcacctaaacccgaattccatagtccacattgccaatttcatccatgtctgtgaagccttcttaggaattaaaccccacttcgccctttggagattatggatatcccatatctacacggcgatgatatttggactgaatataggataccgaatatagatagaatatcttatgtgtatcctgggtttgtttcctgacttgtatatcaaggaaacaacttaagacttagtcggtcacgactgtatttaatctgtatctgtgtattccgttagggatatagattatcttttgtaacccggactccttcctatatataaggggggtccgggcgcctctaggggcagttgttggattttctccaaatcatacaatcaataacacactcggcggattcatccccggacaggagtagggtattacttcttttataagaaggcctgaacctgtataaatcctttgtctccaaacccatacactttcctagcttgatagccaccctcttttattattgccgaaatctagtttcgacagttggcgcgccaggtaggggtagcgtcaagcttttcgccgatcagtgcaatgggttccatctccggcatcgacggcctcgtcttcccacccgggcagacgtttcggttcggcagcctcgacttcgtcaccaacaacttcggcaagatttctctcctcgactcggaatcagaccagtcgggagagaaccggatttcggtcccgtttggattcccgaacgcggctgaaagctacttcaagaccatctcaaccgagtcggcttcaaaccactcggccgagatcgcatcttctccaacgataccagatcaagatgatggggcttacccactagtcctgatgaagctccccgacgatttagcggccgtctccaccacgacagcgtcttcatcccgtaggcctaggcggaagtcggcttcaacaccgatttcgcctagcttcagggaagtcggcgtcatcctccaaccactcggcacggtttcgacggatcagctggatgactacaacagctctcccaccgtcgactcacgtcctactgacattgtggagtacgacgaatttagttctcgctacaacgacttcgacgacttcgacggaagcctagatgacaactacacccctctctactttggcgttttcatggccaataatgagacggaggagcaacgccaagcccgggagaccgaagaacgtcgccgactggaggaggagcatcaagcacaagaacaagaacggctacggcgtgagcagcaggaccgtgagcggaccgcgaaggaggctgaggatcgacgtcagcgagctttggaagcagggcgccgagcgcgtgatctcatcggccaacaagatgtcgaagggacaccggttttccgcacccctcaacagaatgcggttgccgcgatcacccttctcgacaccctcctcaaccaaaacgagctcaatcaatccgaccacgtcgtcaacatcttgaaccagacgaagaccatgattgcggcttcggtcccagttaactccgaaagcgtccacacgccgactggcagccgagttccccacttccgatctcatgactaccgtcatccaagcctcagcatcaccggcgcaggatccaaccgcaggagcaggggtcacgacgagcggtctgttcactcacctcccgaccttcatagggagcgccgagtggaacggcctcgctcaccacctcgtcgccgccccatcgatcttcgcgacacaatcatacagcgccgagcagctcgaggctaccatcactcgccggaccgccacgacgacgaccttgacggagtagcagccttcaccgacgacctgcgtcgagtggattggccagccggcttcaagccgactggaatagagaagtacgacggcaccactaaccccgaatcgtggcttaccgtctacggtctcgcgatccgcgcagcaggaggagacagcaaggccatggcgaactatttaccagtggctttagcggattccgcccgatcttggctccatggattgccccgtggtacaattggatcttgggccgaactacgcgaccacttcatcgccaacttccaaggcaccttcgagcgtcccggcacacaatatgatctctacaacgtcattcagaagtccggagaatcccttcgagattacatccggcgattttctgaacaacgtaacaagatctccgacatcaccgacgacgtcatcatcgccgcgttcaccaaaggaattcgccacgaagaactagtcggcaagtttgggcgtaagcctcccaggacagtcaagcttatgtttgaaaaagccaacgagtacgccaaagctgaagacgccgtcaccgcatcaaagcagtcgggcctcagttggaagcaaaacaagggtacgccggctacgggaggtggtggaagtaacaatcataaggaccgcaagcgtaagcctgcggaacttgttgcaaccgccagtcactcttctcgacagcgttcgcgcgtcaacacgttcgacaagatcatgaactcccaatgcccgcaccatcctaactccaaccacgtggccaaagattgtttcgtctacaagcaattcgcggatcaatacaccaagactgcacggaagaactctgacgaagaacaaagcacgtcgaggaagaaagacgacggcgacgccccggcaggatttcaagaccaccgcaaggagctcaaccatatcttcggcggccccttagcttatgagtctaaacggaagcagaagttgactgaacgagagatcaatgctgttcaacccgacacgccccagtatcttcgatggtcagaaatcgcaattaagtttgaccgctcggatcatcctgaccgagtggtccacccggggcggtaccccctggtactagacccagtggtccgtaatgtcaagcttcgcagaaccctcatcgacggtggcagtgcactcaatatcctcttcgccaaaaccttggatgatatgcagattcctcgctccgagttaaaaccaagcaatgcgccttttcacggagtaattccaggattatccgcaactccactcggccagatcaccctcccggtcactttcggcactcgggaaaacattcgcacagagaatatcagctttgaagtcgccgatttcgagacagcataccatgccatactcggacgcccggcgttagccaagttcatggccgtcccgcactacacttacatgatgatgaagatgcctggtccccgaggagtgctatccctacggagtgacatcaagcaagccgtcacatgcgacaaggagagttgcgacatggctcaaacccgcgagatggcgtctgcccgagaggatatccgactggctgcagccacggcgagcgaaggagaaatacctgctaccaagacttcaaaaagtggagaaagcgaagccaagactaagaagattcccctagatccctctgatcctactaaaactgctgtaataggcgccgagttagattgtaaataggaaagcgcgctcatcacctttcttcagaacaataaagatatctttgcgtggaaaccatctgatatgcccggtattcctagagaggtgattgagcactccttacatgtcaaagaagatgccaagcctatcaaacaacgactccgccgattcgcacaagacaggaaggacgcgatcaaggaggaattaaccaagctgttagcagcaggcttcatcaaagaagtccttcatcccgactggctggcaaacccggttctagttcggaagaaaacagggcaatggcgcatgtgtgttgattataccgacctcaacaagtcttgtcccaaagatccttttgggttgcctcgcattgaccaggtagttgactcaaccgccggctgtgagcttctcagttttctggattgctactcggggtatcatcagatccgactgaaggaatctgactgcttgaagacttcattcatcacgccctttggagcttattgctatgtcaccatgccgttcggactaaaaaacgcaggagcaacttatcaacgtatgatccaaagatgcttctcaacgcagatcggccgcaacgttgaagcctatgtggatgatgtagtcgtcaagaccaagcaaaaggatgatttgatctcggatctagaagaaaccttcgtgagcatccgtgctttcaggatgaaattgaaccctgaaaaatgcaccttcggagtaccgtcagggaagctgcttggttttatggtgtctcataggggcatccaagccaacccggagaaagttactgctatcctcaacatgaaaccgccaagtacccagaaagatgttcagaagctgactggatgcatggcggcgctcagccgatttgtttcaagacttggcgagcgggggatgcccttctttaagctgctgaagaaaacagataacttccagtggggacccgaagcacaaaaggccttcgaagatttcaagaaacttctcaccgagccaccagtcttagcctcatcacacccgcaggagccgttgttgctatacgtatcagccacctcccaggttgtgagcacagtcttggtcgttgagcgcgaggaagaaggccatgtccaaaaagtccagcggccgatttattttgtcagcgaggtcctagccgactccaaaacgaggtaccctcaggttcagaagctgttatatggtattctaattactaccaggaagctatctcactactttcaaggtcactcggtaacggtggtcacatcatttccactcggtgatatactgcacaaccgcgaagcaaacggacgtattgctaagtgggctttggagttgatgtctttggacatatcattcaagccccgaatttcaattaagtcccaagcgttagctgattttgtcgccgaatggaccgagtgccaggaggatacccccgcggagaacatggagcactggaccatgcattttgacggatccaaacgactttcgggcactggagcaggagtggttttgatttccccaactggagaaagattgagctacgtgctttggatacatttttcggcgtcccacaacgtcgccgagtatgaggccctccttcatggactgcggattgcaatttccctagggataaagcgtctaatagttcgaggcgattcacagctggttgtcaaccaagttatgaaagagtggtcctgccttgacgacaacatgatggcgtatcgacaagaggtacgcaaattggaagataagttcgatggactcgagctcagtcatgttcttcgacataataatgaagccgccgatagacttgccaactttggatccaagcgcgaggtggcgccctctgatgttttcgttgaacacctttatacgccgacagtacctcacaaagataccactcaagttgcgggcactcatgacgtcgctatggttgaaaccgactggcgagaacccctcatacgatttttgacttctcaagaactccctcaagacaaagatgaagccgagcggatttcaaggcagagcaaactttatgttatgcatgaatctgagttatacaagaaaagcccttcaggaattctgcaacgctgcgtatctttagaggaagggagacaattgctgaaagacatacattctgggatatgcggaaaccatgctgctgcacgcaccattgtcggcaaagcttaccggcagggttttttctggcctactgcagtgtccgacgccgacaaaattgtgcgcacatgtgaaggttgccaatttttcgccagacaaattcacttaccagctcaagagttgcaaactatcccgctgtcttggccgtttgcggtttgggggctcgacatggttggcccgtttaaaaaggcagtcggcggttacacgcatctctttgtggccattgataaattttccaagtggattgaagctaaaccggttgtcacaatcacagcagataatgctcgagacttcttcatcaacattgtgcatagatttggagtgcccaatcggataatcactgataatggcacacaattcactggcggagtttttaaagacttttgtgaggactttggaattaagatttgctacgcctcagtggcacaccccatgagcaatggacaggtggagcgagctaatggcatgatacttcaagggattaaagcgcgtgtctttgaccggctaaaaccctatgccggcaaatgggtgcaacaactgccatcggtactttggtctttgcgaactacacccagtcgggccacaggccagtcaccttttttccttgtctatggggcagaggcaatgttgccgagtgaagtcgaatttgagtctttgcgctttcgtaatttccgtgaagaacgctacgaagaagaccgagtggatgacttgcaccgattggaagaagcccgcgaagcagctttgattcggtcggctcgatatttacaagggttgcggcgctatcataatcgcaatgttcgatctcgtgcctttttagtcggtgacctagttttgaggaaaattcaaactacacgagatcggcacaagttatctcctgtcacgcccagaaattcacgaaccagaatttctaagctgaatgtgtattaaacccctgtccaggaccagccagggtacacaaacgacaattgttgacatacagacccacgccttacaaaaatataaaagattacaaatgcagcggaaaagatacaagcgagctaagcctgaagacttgactcctgcagcgggcgactccattccacaggcaaaccttgacggcagcgacgaaaccaacctctccgagacatcttcaactgagaaggacttcaactctggtgtgggggaaaagagagcaagactgagtactacccactgtactcagcaagtcacaccggaagaggaggtatgatgcaagatatatccaagggaggctaaaggttcttttgcataaagccggcatttcaaagcagtagttgaaagcagtaaaacagttgtagtaattaatccatattaaccaatcactgtccaacgttacaccacgttgccacaggcccaaaccaccacctgaactaaccagttccaaaagctaactagggtgaaactaatcacggtgaatctggtcgaccgcccataaccgcgggcacggctattcgaatagttttactctgatcagaggtgtacaactgtacccacaagacacagccccacgacacgttcccgtgcgccgacatgccaccacgacataccggaaagaggccgtgacaggaccctttgtataaccccctctaaccgatcgcaccacaccttagggtttgcccccgtccccagcaggcaacgggcagcccccctttcgtgccgcggtgaatccggcagccgatcaaccggacaccccggccgacccaactccatcacgcccaccctcgcctgggtacgtcggctagagaaaagctacactcaagcccagccgttgcccacgctggcttgtggtaagtacgataaattcttccagggcatcccgcgaaccggtccttaatcgccatgggcacgtctagcaaaaccatgcacccacagcccaccatgaagtgtattttaattaaccaacaccattgcggtggcactaatccaaagctattgccaataatcaaagtctatgctttaatgtgatccccttttgtgcactagttgaactaagcatggctaagcatctcctaaaccaacatctagtcattttaatacccaagttatcaatggcataagggaaacaacatatagctgagtaataggacccatcccacatgatattgtaaaacaatgcaatatttaatagaaatgcgggacatttgtaaattaggtacaatatgatcaattgcaatgtatgacttgccttgctctcgcactgatgaggccacagcaacgtcttcgagaaaccgcgaatcgacgaaacgggcgaaatctacgcgacaaacaaagcacacaagcaaaacatgctataagactactgaaacagataacaaagccatttttaatggattctacacatttttatgaatttactgagacttgaatggacttaatcggagctcggatgaattagttatgaattttagaagattcactgtgtttttactaataaagaaaaagtccttaattaattattgcgcaatattgccccagggctgacgtcagcaaggggtggggcggcgccgacatgcgggacccgcgggtcagtgactcaaggagagagaggggtggctggcaagcgggccccaccgagcggcggctcaagagagagagggaggggcgccggcacgtgggccccactggcagtggcacaaggcgggaggggcgcggctggtggctcggctcggcctcaaagccggcaggccaagcatggcgagcgacggcggcacgcgcggtcgccggcgacggcaaccggcggcgcggacggcgacggcagacggcgcgaaaagcggcggcggcggccgaagacgacgatgcgcgcgcggaggacggcgacgcacacggaagagagggaaagggggaggagggggagtttttcaccgaggttggccggcgcgagtggagaccacggcgaacgacgacgacgagcgacgggaggacgacggcgacgggcgaacgatctccgggacctcctagggaacaagatgggagggattagagggagaggggtggttaacggcgagtggattcgccggtcgaaggcggcggccatgggggtactcaccggcgcgcgaggaggagcaagctccggcggcgggattgaccggggaaacggcggacggggtggcgcacaagcttgcgaacccggcggcgtcgacggcgcggtgcggcgacggctctagcggcggcgagcggcgaccggaggagtggaaaaggcggcggcggcgggtgtagcggtgcgggagtgatggagggctcgggagggctcggccgagaaaggaaaaagagagaggaaggtgcgggcgtgcttaaataggagggggggcggcgagtcgtggccgggaacggcgcaatttcgccggagtagtggaggaggtggaggagaagagagagagaggcgggattcaaatttgaatcccggccatctcgcgggcgcggggtgagcgggagtggggcgtgggcgcggggagtgcggggcgcgcgggggagtgggcaacgtggcccggggcggcagggagcgcggggcggctcggcggttgccggcttggggagcggcggcgggaggttagggacgaccgacaggtgggccccacctgtcggcgcccgggaggagaggggaggtgggatggacttcggggaggggagggagaagcgggctggcgcgggaagaaaatgggccgggcccaagaaaaagaaaaaaggagggaaaagaaaagaaaaaaggaaaaaggattttccagggatttaatattgcactttgcttattttaattggttaaaattatttccaaggctctgaaaattccactaaaaatcctgttagcgtattttgacatgcagaatccaagaaaaattccacatgccgattccgattattatttgcatttattactttagggtttctctctaggttaaattaaacaatttcttcggacgatttattttatgaatttagagcaagggaggggtacttcagggcgtgacaaacctaccccccttaaacggaatctcgaccccgagattcggaagagctggcgaagaggtgcggatgggcggccttcaattcatcttctctttcccaggtggcctcttcctctgagtggtggctccattgaactttgcaaaacctgatcaccttgcttctggtccttctctcactggtctcaaggatacgaactggcttctccacgtaggtcaaatcttcttggatgtcaatgtgctctgagctagcttgttcctcaggtaccctcaaacacttcttcaattgagatacatgaaacacatcgtggataccaaccatattagatgggagctctagctggtaagcgacttcacctctgcgttccaagatcctgtatggtcccacaaagcgtggtgccaacttgcctttggtttggaagcggtgtactccccgaagcggagtgacacgaaggtacacataatcccctgcttcaaaagtaagctctcttcggcggttatcagcataactcttttgccgagactgggcgattcgcagtctttccctgacggtcctaactttctcctctgcttcagttaacacttctgtcccaaacagttggcgctcacctgtttgatcccagaagagtggcgtacgacacttccggccatacaatgcttcaaacggtgccatttgcaaactggcctgataactgttgttgtaagagaattccgcataagacagacttttatcccaggctccgccaaagtcaagcgcacaggctctcaacatatcttccaagatttgatttactcgctcggtctgaccatctgtttgcggatgataagccgtgctgaaattcaaacgagtccccaattcttcttgcagtttctgccagaattttgaagtgaattggcttcctcgatcagatacaatcttcttaggtaccccatgcaaacacatgattcttgaaagataaagctctgccaaccttttcccagtataggtagtgtgtactggaataaaatgagcaactttggtgagtcgatccacgaccacccagattgaatcgtgccccgacgatgttctgggcaaacctgttatgaaatccattccgatttcttcccatttccattccgggatctgaaggggttgtagcagtcctgcgggcctctgatgttctgctttgacttgctgacaaacatcgcagagtgcgacgaattcggctatctctcttctcatgctgacccaccagaatttctctttgaggtcctggtacattttagtactgccgggatgaattgaatactgagtttgatgagcttctgtgagtatgagatccttcagttctttgtcgtcaggcacacacaatctttctcccaaccagattgtgccattctcatcctcatggaaatctcgagcttttccaaccctcatattctttttcagctcagctatttcaggatcatttacttgagctgctctgacttgatccacgagcgtagtgtcgcgaccgggaaaattgccttttcccgaacgctagtgtattaatccccgtcccaggaaaagccggggtacaccacacaaacatgatataaaagacacatctttattatatcgataatatttacattattacaaaggcgcttcaggcctgacaatcaaaaataaacagcagcggactagcgggcctacggctccatcttcacaggcgctcaactggggtataagccaggactccacctaagacatcttctccaaagcttctcttactgaagaggggaaagattgagcaagaatgagtacaaccacagtactcagccaaccacgccggcagatgcataattaatgcaaggggg

SEQ ID NO: 11543 - DNA, 1003 bp, Oryza sativa
caaaagaagagggaattccgggcgctccatcagggcaacaggactgtgacagagtacctccacgagttcaatcgcctcgcgcgatatgcaccagaggatgtccgcaccgacgccgagaagcaggagaagttcatggcgggtttggatgatgagctgaccaaccaactgatatctggggactacgctgactttgagaggctggtcgacaaggcaatccgtcaggaggaccaacgcaacaagatggacaggaagaggaaggccgctcagttcagggcacatcagggaagtcaccagaggccgcgcttcactcccgggcagcagggtggacctaccaccatgatcgtccgccagcaccgcccgttcaaccctagcaacttccaccagggcaccagtggcagtcaaaactaccatggaagtcagcccaaccgcggtacagctccacgcccaccaatggcaccggcacagtcaggccagcccgcgcaagccaagaaggagacgggagcaaaaccagggtcctgcttcaattgtggcgagcttggccacttcgctgacaaatgcccgaagcccaggcgtgccgggccaaggtttatccaggctcgtgtcaaccacgcatctgcggaggaggcacaaacagcaccggaggtcgtactgggtacgttccctgttaactcaatccctgcaacagtactttttgattctggtgcaacgcattctttcatttcaaagaaatttgtggggaggtatgggttaaggaaagaagagcttagcacaccaatgagggttcataccccgggaaatagttcaacctcagtcagttttagcccctcagtgctaatagaaatccaaagatcaccatttctagccaacctcattcttctcgaatccaaagacctagatgtcattcttgggatggattggctgaccaagtttaagggagtcatcgattgtgcgagtcgcacagtcaccttgaccaacgagaaggaagaaacagtggtgtacaaat

SEQ ID NO: 11544 - DNA, 978 bp, Oryza sativa
tggtggttccgcctgcacggcttgcctattaatccgccgttgttgggcgtttaagtcttatgccgccgttgttgggcgttacgtcttcaccgaccggccgcctcgtccgccgccgactggtgcttccgcctgcacggctggcctattatgccgccgttgttgggcgtctacgtcttcaccgaccggcttgccttcgccgccgccgactggtgtttccgcctgcacggctggcctttatgccgccgttgttgggcgtctacgtcttcaccgaccggcttgccttcgccgccgccgactggtgtttccgcctgcacggctggcctttatgccgccgttgttgggcgtctacgtcttcaccgaccggccgccttgtccgccgccgactggtgtttccgcctgcacggctggcctattatgccgccgttgttgggcgtctacgtcttcaccgaccggcttgcctttgccgccgccgactggtgtttccgcctgcacggctggcctttatgccgccgttgttgggcgtctacgtcttcaccgaccggccgcctcgtccgccgccgactggtgcttccgcctgcacggctggcctttatgccgccgttgttgggcgtctacgtcttcaccgaccggccgcctcgtccgccgccgactggtgcttccgcctgcacggctggcctattatgccgccgttgttgggcgtctacgtcttcaccgaccggcttgccttcgccgccgccgactggtgtttccgcctgcacggctggcctttatgccgccgttgttgggcgtctacgttttcaccgaccggccgcctcgtccgcccccgaccggtgcttccgcctgcacggctgccctttatgccgccgttgttgggcgtctacgtcttcaccgaccggccgactcgtccgccgccgactggtggcttcgcctgcacgggtggcccttatgcccccgttgttgggcggttacgtcttcacc

SEQ ID NO: 11545 - DNA, 701 bp, Oryza sativa
ctaagattggcatgtaagaggcagtggaagtggtgcatggccatctccactgatggtgcatatcttcccacactgtaggctggtgattccaggccccgctgaactccttcgcaaagtgcaatgtcttccatctgcagatagagcgcacaatgttcagggaataaacttaaaatatcaacagcaactggcgaaattatcaccgtgcagtctctgctttgtttgtctggcttatgatattgcatgtctacaaaatatagtattgtagcatgcatctatgagatgtcaacatggctgatgtgtataaaagatgtagaagtcagcatataaacatcagacatagagagcaatcatgtttctgccttcagacatggctctaataagacaaaagcatgaagtgcatctgaaagcaacttaatcagggtaatgctgttagaagaccatggaatttacactgatgtagtgctgtgaacctgtagtcacaagtttaaagaatgtgtctgccttaatatgaacttggtcattactgccaacaatagattgaactaccttgcaaccaaacatcagttttatggtaatatacctgtacttgttcgctgtcttttaagctgctctcaataaaattctggtcgtcctgcatattcaatgtggattaagtcattgaccacaattacagcacacagcaacataccaaatcattactt

SEQ ID NO: 11546 - DNA, 586 bp, Oryza sativa
cctaggcagctttcagtatcagattctgcttatctaactgacgacactgaaattgtgggaaatgctagtgtaactagaagattgacacagtgggtactagaggagagacaagatcgatctgtcatgtccatcttcggcatgggtggggtaggcaaaacaactatagcaagcagtatatttaaaaaccaacaatttatgatggcctttgcttgcaatgcttggattactctatcccagagttatgaaattgaagacttgctaaggcaaatcagcaagcaattgatggaccaacaggtgtacttggctagtaatgtcgaggctatgaatcgaataaaattaattgaggaacttcagatctacctaaagcgcaggaaatatctaattgtcttggatgatgtatgggataaagatgtttgattattcttgaattatgcatttgtcagaaacaatcttggaggcagggtactgatcaccactcgcaaaaaggatgttgctttcttagcagatcacaattgtgtagttgagcttgaagctcttccccatactgaagcatggcatctattctgtaagaaggcgttccgtagat

SEQ ID NO: 11547 - DNA, 653 bp, Oryza sativa
aaaagatatctatatccctaacggaatcccagatccagattaatacagtcgtgaccgactaagtcttaagttgtttccttgatatacaagtcaggaaacaaacccaggatacacataagatattctatctatattcggtatcctatattcagtccaaatatcatcgccgtgtagatatgggatatccataatctccacatgtacgattccattggagacgtacgtcgccgccgaagctaggtatccactttagcaaaaggaatcagattccggccgggcacacgggaactattaatttctccggctgctcgatctctcatcgtgtcgaaacatgaattcggcaataataaaacggggtagcgcacgagacctaaaagtggatggatgcagagacaaaggatttagacaggttcaggccctctcaatgagaggtaataccctactcctgtttggggatttgaatccgccgagtgtgtattgatctgacgatcaggttgtgtctcatgccccctagagggcttcctgcccaccttatataggatggggggcaggattacaagatagaaaccttaaccaatacggtatcggtttcctaaatctactttacaatcttatcaaaccagaactttaggccgttccataatatataggga

SEQ ID NO: 11548 - DNA, 2499 bp, Oryza sativa
tccacccccactaatggcaccagctcagtcaggtccgccagctgtgtcagctcagtcagaacaacccaagaagggggctgtaggaaagccaggaccctgcttcaactgtggcaagcacggccactttgctggcaagtgtccgaagctgaatcgcactggacccaggttcatccaggcccgcgccaatcatgtgtctgcagaggaagcacaggcagcaccagaggtcgtgttgggcacgtttccagtgaactcatatccagcaacagttctctttgattcaggtgcctcgcattctttcatttccaaaagatttgctgggacacatggattatcggtagtggaacttaaaataccgatgcaggttcatacccctggaaatgatatgaggacagcacactactgcccctcggtgactatagagatcaaaagatcaccgtttctatccaacctcatccttctcgaatctaaagacctggatgtcattcttggaatggattggttgaccagaaacaagggagtgattgactgcgcaagccgcaccatcaccctaaccaacgacaaaggggagaagatcaccttccgttccccagcgtcgcagaagtccgtagcgagtctgaatcaggctgctattgagggtcagacagaaacagtggagaaaagttccaggaagttggaggatattcctatagtacaagagtatcctgaggtgttcccagaagacctcactacaatgccaccgaagagagaaatcgagttccggatcgatttggcacccgggactgctccaatttacaagaggccgtacagaatggcagctaatgagctagcagaggtcaagaagcaggttgacgaacagctgcagaaagggtacatccgaccgagtacttcaccttggggtgctccggttatctttgtggagaagaaagacaagaccaagaggatgtgcgtggattatcgcgcccttaatgaggtcacaatcaagaacaaatatccgttgccaagaattgatgacctgtttgatcagctaaaaggagctaaggtgttttccaagatagacctacgatcaggctatcatcagttgagaattcgggaagaggatattcccaagacagccttcaccactcggtatgggttgtttgagtgcacggttatgtcctttggactcaccaatgcaccggctttcttcatgaacttgatgaacaaagtgtttatggagtttcttgacaagtttgtcgtggtattcattgacgacatacttatttattcaaaatcagaagaggaacatgagcaacatcttcgtctggtacttgagaaattgaaggagcaccagttatatgccaagtttagcaagtgtgacttctggttatcggaggtcaaatttctgggtcacgtcatttctgctcaaggcgtggtagtggacccatcaaatgtggaatcagttacaaagtggaccccaccaaagacagtttctcagatccggagttttcttggacttgcgggctattaccgtcggttcatcgaaaatttctctaagattgccaggcccatgacacagttgctaaagaaagatgaaaaattcaaatggtcagctgagtgcaaccaaagttttgaagaactcaagaagaagttagtctctgcaccagttctaattctgccagatcagacaaaagacttccaggtctactgtgatgcatctcgccaaggattgggatgtgtgttgatgcaagaaggcagagtggttgcatatgcttcgcgacagttgcgtccacatgaggccaattatcccactcatgaccttgagttggcagcagtggttcatgctctgaaaatctggcggcactatcttattggcaaccgctgtgaagtttacactgatcataagagcctgaagtacatcttcacccagcccgacttaaatctccggcaacgaagatggctggagctgattaaagattatgacatggggatacactatcatccaggcaaagcaaatgtggtagcagatgctctgagcagaaagagctattgcaatgcagtatgtaccgaaggcatgtgtgacaaattgcagcaagatcttgagcacctaaatttgggcatcgtagaacacgggtacgtagctgccctagaggcccggcctacgtgtcacgtcctgataaattcatcccgaaataaaaatcattctctaaaaggaataatagaattaattaaaattcgaaaagaaattagcaaacactaaaatacgtacaagaaaaattcaaatgtagcccggagaatttttgttaaattctccttggtctaaaaagagccctcaaattttagtggaattttcagagcacaaataataattgagaagaaataaacaaagttgaaaaggtttataaaaagaaaaatctctaaaagtcttcttttccccccccttcctctcttgggccggatcggcccaactctccctccctctctctcctctccccggagcccataggccctctccccgcgcgc

SEQ ID NO: 11549 - DNA, 1878 bp, Oryza sativa
ttgaagatgtctcggagaggttggtttcgtcgctgccgtcaaggtttgcctgtggaatggagtcgcccgctgcaggagtcaagtcttcaggcttagctcgcttgtatcttttccgctgcatttgtaatcttttatatttttgtaaggcgtgggtctgtatgtcaacaattgtcgtttgtgtaccctggctggtcctggacaggggtttaatacacattcagcttagaaattctggttcgtgaatttctgggcgtgacaagttggtatcagagccgaccttgaccgtaggacaagccaaatgaaaaaacctaagagccctctgaatccttttcattgcatatgttctttgcaattggatttgttccgggaaaattgggatctgttcttgtggttcaagggaaaaatcttggtcgctcgtttaagtggggtttttcaaaacaagtcagtctagggttttagtaaaattattgggatttattcgtcagacagttggggtttgatgggtgaaatgcattaggtcctagctctataacatgggttgcaaggtgtttatgcttcgtttgttattattaatatgtatctaatttctcattattttgtcgttatgtgagtctgtcttatttattcgctctcatgcaaaatgatctatgcataaaatttcgcttttattcgtttcccttatttgagtcttttattgctttatttaaatttggatttgagcatgcattgattcctatccctctgtactctttagatgtcagacctattctccgatcgcaagcgccgctccaagcttcagagtcgccacccttagctttatcgtcttcttagtctgtttgcgtgctagtttttgtgtttaggtttgttgcttgtgggttagtcggcggtcgatatcatgtgtgagtggtatgacagcctttattaggagttgtgtgcctctttttcagtgttttaatcaagattaagataatggcacttaatcttataagaaagattagtttccgagccgtctgttttcttcctttctcttatttctacctatcctcctccagatggtgaagacaaggaatgatccccgtgactccaacgacgccagtggcagcgaagagcagaccgatggagctcatgtcagtggtgcatctggcagcagatcatctccaccgcccgataacccaacagtcactcaaatgatgacaatgatgatgcaacagatgcagcaacattaccatcagatgttgcagcaggcgcaacagaaccagcagtttggtcctccaccatcacacgtgtccaaactgttagactttcttcgtatccagccacccactttctcaagcaccaccaacccaatggaggccaatgactggctccgtgctattgagaaaaagctgaacctactgcaatgcaacgaccaagagaaagttgcttttgctacacaccagttgcaaggtcccgcttctgcctggtgggataactacgtggcgacccgtctagatgcaacggaggttacttgggcagagttttgtcaaagcttcaggaaggcacagattcctgaagggattatggcacaacagaagagagagttccgtgcgctccagcaaggaaccatgtcagttacagagtacctgcacgagttcaaccgccttgcgcgctacgctcctgaggacgtgcgctccgataccgagaagcaggagaagtttttgtttgggctcgatgatgaattggccaaccagctaatctccggagtctatgaggactttgagaagctcgtggacaaggctatgcgccaggaagagcaacgcaacaaaatgtaccgaaaaagaacggcagctcagatcagttttcctcaagggaacaatcagaagcctcgcttcatgacgg

SEQ ID NO: 11550 - DNA, 4242 bp, Oryza sativa
tgacaccgttgactttttagcacatgtttgaccgttcgtcttattcaaaaaaattatgaaatatgtaaaactatatgtgtacatgagagtatatttaacaataaatcaaatgatatgaaaagaataaataattacttaatttttttaaataagacgaatgatcaaacacgtactaaaaagtcaacggtgtcaaacattttgaaacggagagagtacatccgattggtaggatggccacgggagttgccatgcatcccattgaccagggatgaaccggccatcgtgtggcccattcattcattgacttgccttagtccggctggaccaaaggcggtttattgcccggttcatcacaaaaccggccgccaacctctggttccgatttttttccggttaaactgtcagtccgttccagttttttttccactatgcaattaacgccatgttgtagaaaaccaccgtacaacttgccaataaggtagcttccttcttctttcttttttttttttgagaactaggttagcttccttctagagctccttgtacgacctcgttggaaaactcattgttggacctaattcatcactctttttatttcaaactaaagggtttcctttttagacttttctaattgttccaaactaatagaggtggcatcaatcaaatttgctctttcttgtcctatctaagagtatcttgatgaaactcttatctttatcgactttcgtaatcaaaattttagttttttcaagctgctcaatggtcactttacgacatgattagtgttatgctcggtattattgtagttgagggagaataagtgtaacttccgttcatgatcggcccgttaagaatttagacccattagtcccacccccaactcccttttcttttcttcctttttggccaaattttcaaatttctggtggatacactgcacgcccggggaattttctgtcgaaaaattgtataggtaatccctaataaatttctaaatgtgcttggctgattccttttcttctcgatcgatcccgttattcctttttaatcttttcttgtgcggaattgcagcactttttctctgcttgatcacaacgcagcaaggacatgagaatacgtgagattctccgggcgatggagctgcaccgtgtgctttgctatcgtctcgcgtcgcgctcgcctgcaataatacggcagccagatcgagatggttcccaaaacgactagaaacggaatcacgtaaagcaccatggatggatggaatcaccttttccccaggaaagcgcaagtgtggaatggcatcatctatcctaccaagttcctaagcccctgaccatgcagtgcacgaataatgcacatcgatcagctatctagagagagagagagagagagagagagagatagatagcatctcgatcagtgctactgatcaatcgatcatcccctataaatcccccatcccattgccatgcatagaggcagcacatcaacgatcgaacgaacaacgcactctgcagctagctatacaatctctgtttaattagctaggtagctagcgagtcataaatcaagaagccatggacttttacgggcggcgcgagcagtacggcgggtatggcgggtacggtggcggcggcgccctggcgacgccggggtacgcgccggcggcgccgtacgggatgtcgcaggtgaacatcgaggggaacgggtgtggcaggacgctgccgccgcagccgacggtgaaggtgtactgccgggcgaacccgaactacgcgatgacggcgcggaacggcgcggtggtgctggcgccggcgaaccccaaggacgagtaccagcattggatcaaggacatgaggtggagcaccagcatcaaggacgaggagggctaccctgccttcgccctcgtcaacaaggccaccggccaggccatcaagcactccctcggccagtcacaccctgtaagctagtctcagcgttctttctctgaatctgaatccgccggccattgatggcgatcgacgacgatgctcttgcgtgcaggtgaggctggtgccgtacaacccggaggtgatggacgagtcggtgctgtggacggagagccgcgacgtggggaacgggttcaggtgcatccgcatggtgaacaacatctacctcaacttcgacgccttccacggcgacaagtaccacggcggcgtccgcgacggcaccgacatcgtgctctggaagtggtgcgagggcgacaaccagcgctggaagatccagccctactactgagctgatcgatacatcgatccagctctctatcaaggctcaagttgatatcaacgaatctggtgcagaataattattctctgctagctacccacctatatacgtagctaagagtaacttatgctcgtccgtaccgtatgattatcgtgtggtgtgcttgtatcttgtacaagttaattaattacctggcaataagagctcctctcgctgggcgacacatatataaacacatacagttggggcttgattcaacttgcatatatgctgtgcatatgcgcacgaatttttcaggtcatcggactacgcacactatttttagaaacattaatttcaaaaacagcgctagatagaaattccggatttcaactaaagaaatgttaatggatggcaagcaggctttaacaggccatatgggctgtgacgtcggaccgttccatattggaataagttcacttaccgtcccacataccttatttcttctattttttttctcttttcttatctttcttctcttctcttctcctttcctctccaatcttctcgatgcacagccggcagcagatggcacggctgtcgccactccgctccgccggccgcgtgctcacccgccttctccggtcactcgccgccggggttacttattccttccgaattactcgtgttgtgttaacgggctattcttggaggatgtgtggtccaagaccagcccggggttgctgattgttaatgggcccgccaagctctacgatagaacattcatggtcctctgttgggccatcacctagtaacaggccccactttgggccgtcagttgttatctctgttcgatattgggctgtaactgggacaaatcgcatccgaggaaagaagcggagtgtccttctgttcagcgtctctcctctcctcaagacacgatcgccgccgcccgccggagagaaggccggccggttcgacttcgacgcggcacaagttcgccaccagttccgtccatcccaattgaaattcaggccctccctcctctcatcttgtccttccatcttttcatcatttccaaccgtgtgaggttagtggtaactggtaagatccatgaaaatctgcaaattttgtgcttcccacccaatttatcgatcttattttttgtgttatgtacttgtgatttatccattcttctggtagttatcacacctcagatatttttcaagtcagttcatggatgatccagacactttgaggaaaaagacgacgacgattgtgccacaagttaaagacggccaaaagcgtcagctgcatgactgcatcagaaattgacaatgcccttgcgaattggatagctcttcttcatcttcatcttcatccaggttgctccccttctgttgtgtctagatatttttttcgatgctgaactactcttttcaatcgctgttcttttcccaacctgacgtgtcaagttctgtagttgagtttccaaactctctgtcaagacatggcttttctttaccaatccgaattgtccagttctgcaattcacttccaaattcaaccctatcaggattttaccgttttgttctgatggtaaacaagtgtatagctgattcctgcgtaacaatatccgtaacgactctatccgtctgtacaagacaaagatgacaccctcatgtgagtgcagtgacaaggacctactacagccatgcgttaccttccaactcgcaatattgagcccactacgccgttgcctactcttccatgacaaaagaatcatgctctaccttacccatgatctctcaataatactacaaattggcaccgctgtacccaattgatggaacagaacaatcaacaatgcaattcgtattgctctcattttgattaggcagcagtaaccttcttcctgaatcatgacatggtgtaaagcagcatccagatccaagtaccgacattttcgacacaaccaagtacactcattcagaactc

SEQ ID NO: 11551 - DNA, 741 bp, Oryza sativa
ttcctgcagcccttggtaaagagagtcgtgtaaaatatcgagttcgcacatcttgttgtctgattattgatttttcgcgaaaccatttgatcatatgacaagatgtgtatccaccttaacttaatgatttttaccaaaatcattaggggattcatcagtgcataacctcttatatatatttttttcatttacatttggccgggtaaatttaaatgaaatgtacataaaaaagataagagtgaaattacaacaatatagactatgtggtattatgctgaatgatctccaaacggccagaaggagccattcatatggttggaatcgtaaccctgcaaataaaaatggagaaatatttcagttcaaaagacaacatggagacatcgcatgcacagttgcacactcatgtttcaaccataaaaatgtgatgcgggcaccatacaagattgtttcagttgaaatctagcaacaataccagcaaagcacaaacaaccaaactattaacactcattaaaatcgtctagcaagggtactgagattgctgatttgttaagaaaactataccataaagacagagttaacctcacttatctgctggagtctgagaattattcttttggcaagtaaatcccaattactactaacactggcaagtgtggtagatcatgaatgtggataaaagttacactaacatcagaatatatggaacaaagagcaaccaagtattaactaaatctgaaagag

SEQ ID NO: 11552 - DNA, 564 bp, Oryza sativa
tcagtcgggggctatcatcataataatggagtgtgattttttatcaatttaatttgcttacttggtctatcattgccttgtttgattttttctacttagtctgcgaggactgaaagtttttaatagcttctttgggttttaggctcaacaaagcttgataaaagcttttaagaaatcaaagacttggctagaactatcaagcacagcataaatacaccagtattgtacaaattgagcctccatttgctacatttactcagtcagaatcagtcctttcatcatcagagttattattgctcggctgaaggtcgttgttgcggaattgctctacaacatcacttgcaatcttgtcagccgcactttgagcattgctgataagatcaagagcagcttcctcgcttgtcccgtctgcaaagccatcaatggtatcaatttcaattctcgggtacaaggatttggtcattgccaatgccatactagctcccatacttccagctttcttgatgttcttgaagtacacatccggtgcaactctcagcttgtcaaagatctcggttgcgtcaa

SEQ ID NO: 11553 - DNA, 713 bp, Oryza sativa
tcaacccgcccataaccgcgggcacggctattcgaatagttttactctgatcagaggtgtaccactgtacccacaagacacagccccacatcatatcaccatgtccctcaataccaccacggtacctcgaaaaggagctgtgacaataccccttgcacaacacaatccaccatagcgcacctttcctggatcataatcacccccttataaaacaaggcatggactccccagcgacccccgtgggcttatctccgccacttctcagtctagtgctccgcaatgaaccatgttatacaaaaggtaaagccgttgcccacgctggcttgtggttggcatggttaatgtttcacaacagtagctcgcgaaccggtccttaattgtcatgagcacgactctcaaaaccatgtgctcacaacccaccattatcaagttttagttggcaagtaattaattaaccaatcacgattgaccatcgtgaactatcattaagccatcattaaataataatgagtcataagtaatcccaatagtgtgctaatgtttctaagcatggtaagcaatcatatctaatatctagctgaaccaatatatatagctcaactagtcaagttataataacccaaggtatcaaggaataaagtaatcaatgcaaacaggccataacaaaggaatagattcacaccacccagtgacattcgaaaataaatgcacag

SEQ ID NO: 11554 - DNA, 3864 bp, Oryza sativa
ggagaaaaatctgaaagattagcttgcgtttattttgccgaggagttaaaaaacacgttagaaaataaaatcacaaaagaaaacgaaatcgttgactgagaagacattgtttctcataacagttcagctaacacgtattgacaacaattggcctatagaactagctaaatttttctcactgtcctaaatgtaaaaacgaaatgtcattgggggaagaacataaatgaaaatagcccttggctaccatcaaaccatggaccgattgtttacacgcggtcatcactgataccagtaaaaaacgaaatgcctacctattcactctcaaggcagagcagcagctatattttgtgactttaggtgaaaacagtgacatcaatatgtatcgacagtgtgatggccatcaaatgaaactaataagcattgctgaattttattaaggcaataattcttaatattttaaaactataagttgatatttccacgaccatgtgacatcccggcctagagcttaataggatcactagaatactcatatcaacaagttgcaacttcttttcctaaagccgatctcaaaagaactccgaggttaagcatgcttggcctggagcaatttcatgcttaacctggagcaatttcgggataggtgacccaccgggaaattctttacgggtgcgtacgagtgaggacaaagtgtgcagaaaagggttgtgttggtctgtgagagcagtctatgacctatgaaagctgtcagatgtaagcggggagaggcgggacgttacaaagtggtaccagagccgactctcgtggtttcacgggcgcgtgtgtcgcagttacgcgggcccagcctgggagaggtgggacgttacaaagtggtatcagagccgactcttgcggtttcacgggcgcgtgtgtcgtagttacgcaggcatggtgcgcatggctggtgtggaccaggatggtcacacagcatggcacatgagctggcactggacacacggacgtggccaaaaggggacgttcctggcccggggtgaccgacgaggtcgtcgatgtcttaagggggtgaggatgtgacttcccggcggtgtcttaagggggtgaggatgtgacttctcggcctagggcttaatagaattactagaatactcatatcaaagccgatctcgaaagaactctgaggttaagcgtgcttagcctgaagcaatttcgggatgggtgaccgaaaggcttgtgttggtttgtgagggcaatctatgacctatgaaagctgccagatgtaaccgggctcagcctgggagaagcgggacgttacagaccatgcctttaaatttgaaaattatcaaacatcacaatggcgtttctctcccttctatatttgggcaccgtccccgagtataggaatcctggaccttctcaatttctattgacgagatgatccaggtcaataaacttttctctatgatggttgatctgaaaagaatggtctaacatgtgttcatatcgcctgcatcatcgtcctccgtgtcacgcctagaaattcactagtaatttacgaacttatttgtgcataaaatcctcgtccaggaatcagccgaggattttatatacaaatccattataataacatcgttacatacttacaaaagaatagaaaaacagcagcggaattaacggtctaacgatggcttaagctccactcccacaggcagctcaactggggtataagccaaacgtcttctccttctggatcattttcttcaactgaggttgattgattatttcaaagtgagcatatgacatactcaacaagccacacagctaatatgtaagtgtacaaggataccaaaggatggaataatataggctcatttgcaaaagtagcatttagcaaacatttaagagtagtaaaacagtagagttattaattatcaattttaatcaacactgcacaggcccaaccatcctgtacaaccatacccggttgtacagatctaactccaaaccaggagctaaacaaattattactagttatagcatcaataattattgtgataggtgtgagactaatcacgaaaaacattgctcaacccgctcatgaccgcgggcacggctattcgaatagttttactctggctagaggtgtaccactgtacccacaagacacagcaccacaacatgttaccatgcacctcaataccaccatgatacctcggaaaggaactgtggcaatacccctcgcacaacacaactcaccacagtgcattatacctggattataatcaccgaggcatggactccccagcgacccccacggatttctcgccacttttcagtctggcaccccataatgaactatgctatacaaaaggtaaagtcgttgcccacgctggcttgtggttggcacggttaatgtctcataacagtagctcgcgaactggtccttaattgttatgagcacgaccttcaaaaccatgtgctcacaacccaccattgtcaagttttaattatcaattaattatcataacacgattaaccatcgtgagctacattaaatatacccataaataataatgtagtatgatccattccattaatgagctaatgtttctaagcatggctaagcaattacatatatatagcttttagctgaaccaaaccaatatataaggttcaagctaatcaatttgttacccaaggaatcaaggaatatggtattcaatgcaaattggccataacaaatgaataggttcacaccacccggtgacattcgaaaataaatgcacagttgaaataaatagagaatttaaatataggatcaacatgctcaaaggattgtgtttgggatctgtgtgacttgccttgcaacaatcggtcttcaaatagtcttctaaaccacttctgacgcactcacggaccttcgcaacgacagaaacgacaagctaacacgcaaaacgaataaaaaggactaataaaaaccaaatgaacaatacataaaaagtaaaaaaaaaacatgtagatcatgattttagatgaatttagagacttgaacggcctcattccgagttcatatgaattagttacgaattttacaagattaaactgattttagccttataaaaaaaggattaatgatttattttagaaaagaaaagggctttatgacatcattgatgacgtcatcgccggaacaaggcacgggaccacactgtcgccggcgctagaggactcggccggaccaaccgagggcatctacgcgaagaggacgacgagacgaactcaccaaggggcggcacgacgacgaaggacgacctacgacgagctccgaacggcggcgaagtcgggacgacgaggacggcggctttccggcgacgagcagcggcaacgaaggggtggacgggcttctcctcggtgctgcgatgccgagggaggtggcggcacaggtcggggacgaccgaggcgacggcacggcgcggatggaggcgaagcagatcggcttgacggcgtcggcagcgctccggcgggcttcggcttcggccaagtggtggacggtgtgcagctccttctcgcgaacccgatggtggcgacggcgaccggagaaggcggctgcaaaggcggcgcggcttgaaactcggcggctacgacggcgctaggacagacgcgggtagggcgctacggccgacggcgagctcgggcgagggtggcaaacaaaagaggagagggaggggactttatttaaaaccacgggaaaaaaatcgggcgtggaacgcagggaatcgccccgggaaaacttagggtttggtggagagataaactcaaaaacgaatccaaattcgcgccgaattcaaagggataaaataggatttt

SEQ ID NO: 11555 - DNA, 613 bp, Oryza sativa
atcaaatctcaagctcagtttgacgtcctggttggtaagatcaagaagcttgaaggagcaagagacgaagtcgccaatgtcgctacaccactcgtccaagctatgtttcttaataacagtggtccgagtgcacttgacgcaaccgagatctttgacaagctaagagttgcaccggatgtgtacttcaagaacatcaagaaagctggaagtatgggagctagcatggcattggcaatgaccaaatccttgtacccgagaattgaaattgacaccattgatggctttgcagacgggacaagcgaggaggctgcccttgatcttatcagcaatgctcaaatgcggctgacaaaattgcaagtgacattgtagagcaattccgtaacaacgaccttcagccgagtagtaataactctgatgatgaaaggactgattctgactgagtatgaatgtagcaaatggaggctcaatttgtacaatactggtgtatttatgctgtgcttgatagttctagccaagtctttgatttcttaaaagtttttatcaaagctttgtgagcctaaaacccaaaggagctattaaaaactttcagtcctcgcagactaagtagaaaaaa

SEQ ID NO: 11556 - DNA, 12949 bp, Oryza sativa
gagtctaggactatcggtttggctaggaagtcaacttcctcaattctaaggttaacttccgggcatatttgagttgcccttatattccttccaggggaatgtactatcattggtacacgcaaattttgggttttccaaccatttcttttcacaaaagcttgcgatatgaaagaatgggaagctcccgaatcgaacagaactattgcgggtacggagttgacagagaacatacccatcacaacgtctggagcatcctgagcggtttcagcttgaatgtgattcacacggcctcgaccaaagttgttggaagcacgtgaaccttgtccacttgcctgagagctaggacgagactgagttgccgctggagtaggagttctggcagtgctgccattagcatgccctgagttggtgttggtaggattctgaggacactgtctagcatagtgacccatctggttgcaccggaaacactgaactgctgacggtccctacggtgacttgaaagaggtaacgctgttaggcgcagtattgccactaggggcacgctgctgtggctgaggtgccggacggtttatctgaggacgaggggcgtagcctggctggcggttagcctgagtgaccgactggtggtattgcatgggttgaccgtagcgagggcgaggtgcgcctcgggaagaatttccctgatggttagacttgcgtttcttgtattcttcggtagcctcttttctggcatcctcaagtagaagtgcgttgttgatcatatgttgaaaagtggggaagtcatgagcaagcaactggagtctcattccaactgcgattcctttcaagaatttcctgatcttcttcttgtctgtgtccacttcctcaggggcgtaccgagccaacttgttgaactgacttaggtactcattgatactgctgttgccttgcttaagtctgttgaattcttctttcttcatgtcaatagtgctttcaggcacatgagctgcacggaaagccgtagcgaactcatcccaagcaatgttagtgggttcagggtgtgcattgcagtaattctcccaccaatctgcggcaggtcctcttagttggtgagaggcgtagagcgtcttctcaacaggagtacactgcactaagttgagttttctatcaacatctttcaaccaatcgtcagcctcgacgggctcgacggtctgagagaactctggcggacgagacctcaaaaagtctgtcagcttggatctgttgttgcccatgtgagggtggccatttccatgcgcattatgctgaaaactggctatggctgtggttagtccttgcaagatttgtgtctgaactgccattaagtgttgcatgttggtttccacatgaggtggggaagggaggcgttcttctccagaattgtgactggcagtgcggtgagagcggtgagactgttccatctctgcatcacgggaaactgtgcgatgcgagcggctgctgcggcggggttgctcaacctctgcgttgcgggaaacagtacgatgcgaacggttgctgtggtgagactgctcattagctgattcatgattttcttctggctcaactctaccatcctcaacaccaaagcgggctggtgcacgagctgcacggcggggacggctagccatctaaactcccagaagagggcggggtaagagtcagataagcacttaggagggcaaggagcaaagcaaatagcaactcagatagcacacactaggcataaactggatttttcaaatcataaaaacacctgatacaacgggtgtggacaagtcacagagctacgccgagcttgactgtgcgcacaccacctaggagaatcagactaccaaacaacacccacaacaaacacacgcacgcactacctcgccacgactccaaaagagttggcggcggaacaaaagggcctatcacacggacggctgctgaagactgcctcctctactcctcgtcggcctggctgcctcctgtagttggctcctcagtcgaagaaacgtcgatcggctgacgcgaagggaccggcggaacctgtcgagggccggcagcagcacgggccgctggcggtgggggagctgggtagtggaaacggaacacggtggcagaaccaacaacacgcttccgcgcagtgcggataaagcgtgggccacggcgggaggaagcaactggggtgtgtcctggggtgtaggaagggctaactgggtgtgggtagggcgagtacactggtgagtacggcgcacgcgagctgggggagcgcgggccactgggagtgcgggcagagccgcgggagctgtgggaggacaggtggctggcgtggcagaggcggcctgagtcccaagagatagtgtcaactgaggtgacaccctcctcggccagacgggcctccaaagcggcgtagcggcgggcaagggagcggtaagcctcaaggagtaggtcgtgctgagtggcctgagcctccgaaagctcgaccatgcgagtcagcactggctgagactcgctgtacggacaagggtacctggcgtctgagtggccagagggaaggcgtggaagctgccggaaggcggaacctccgagacggtggctgtagtcgtgggccaggcgacgaagcgcagtccaggagaggtcctggtacgcgatctggagagtgggcctggccacagtgaagtggtgggggcgaaggccagctccgtgtatacctccacgggggtaaaggtacaccgagagctcacagtgagggggaacacggtccacggagtaccccgtgtactcgggacacgagaagccaaggaaacgggagaggtcacgaagctgagcgacgtggtgaccctcaccaaaaccgtgggaactgaagctggcgttcactgccatctacaattttgaaagagggagaaagatcagtaaccgttttagaaacaaactattgaaaataaagaaaacaaaagaaaccttagcttttcgcaagtagttttgaacttagtatccttagggtcgtcctaagcgtcgggtttcgccctagggccaagcctgtgctctgataccacctcttgtcacgccccgaactagtcccgaccggatctagcccgtgacgctccaaattaacctgttaatcgataccagtcccaggaaatagtgctggtatcacaaggagacagagtatcacagcaacagaggtctctttattatagagtagaagtacagtcatgttgggctgcggacagatcccgagctcacaactgcattacaaaaggaaagcggaagccagtacttggaccaatcatcacaggcgcgacttgggaactaggccgaaaccctaaaactcatcgtagccgacttgctcctggaagaactcctcgtcagcaggatccacttcatcttcttcagcaactaggggggattatttatatagagcaagggtgagtacgggagtactcagcaagccaggggaaataagtgtttaatgcaggcttcaaggaaaggctgttgttttcgtaattgattttgtttgaactcttttctaaaaagtctaagtgagtgcttctcaaacgacacggatgagacagtgcgtctcgtccggtcggagtatgtgcaatgtatcagtctttagatcttgaaacagggttggcacccggccaacagcttttcaaacggccacccgggccaacaacttttcaaacggccacccgggcctagctgatcccgtcagctgctgatttttcaaacatcgaacccagtttcacaacagcaatttcacaagcagtagtcaaacaaaactacgctaggaatcacctcacatccgcccatgaccgtgggcacggctgttcgagcagtttgttaacctctgcagagggggtacactttacccacacgacattactaacccggatcacccagcccgtggggatcagccacgtcgggagacctccaagctttcatgacaaggcatttcgaaagccgatacaggtttaccatatgccgacgagaggggtcccagaccaacaacaggttaggtcccagaccatactgtgccaggaagcccaggggtcctccccgacaccaccccggcgaatccacatgtctctcggcatcaaggctcccctgataagctagttactcagccaggggtgtcccattccacccatgtggtcgtacttgtcttatgtttggatgaaattccaaggaatcggtccttaagtgcgagagcgggaaaccgtacacccggtacgttccccggtccgcggttttggaaattcatttagttcgcaagcaccgacccaggtgtcgggttttccaagtcttttgtaaaactccagttttacccaagttgttactcagattttaagtttgaaggcgaccgtcgatactcgcacagagtgcacgaatatcgaggtgcaactgggtggttacaaggggacatggtataacaattaacaaaggaaggatcaaatgcaacaaattaggtaggtctgccaacctgccttgcagacgggacaacagattaagtgtgatcctatcaatgcataatatttcgcaagcaatataattaaatttcaaatataggctcaagatgttcaaaggtggcttgccttgctcgagatccggagcttgatcctcgaaatcctcgcactgcgggtcttcgggctccgaaactacacgcgaaacgggacaactcaacaaacggcgaaaataaagccctattaatgacctctaagcgtgccattagatagatctcgagatttgaggaattttggaagttgaacggagtcaatcggatttacggttgggaagatattgaatttctaagattattggatttttggtctaaaggaaaaaggatttatttaaatcctttttggaaaagaaaaagaaaagaagggagggagggaatatagacttttctcggacggctagggcgcggcccaagagaaatggagcggtctggccgagctaaatgggccggccggcccaaggcggcccaaactcgcgcgcgcgcgggagggaggagagagagagccggtggaccgggctcaccacgcgcggtcccgggtgggacccgcttgtcagcggctcggctcaccgtgcggagggagcacgcgacgcacgcacgcgggcggggaagggacgcggtgcacgtgcgcggttcgcggtggacgcggatgcggcgggcccacgcgcagcctcacggctcgcggtggaacgcgcgcacggggagggactgaccggggtcggctcgacccggtctaggctgagctggcgccgacgtggcgcctacgtggctgccacgcgggccggcgggaggtagacgacgacccggccgcgaatggacggcgggcggcggcggcgagcggcgaagcgaaccacggcgatacgggcaatagcgagcacaccgggcggttgcacgtgacaagggggggcgagccaacggctcggattcgccggaggttgctcgacggcggcggattgcggcggcgacaaccggcggcgggagaagagggaaacggcgacgaggtcacgagaggtcgattcccggcggtgagagcatctgcgcggcgtcaggaactcgacgctagcgtcggattggacggaactacgccgagcgaggccggcgacgagcgggtgctacggagctcgggcggcgacggcggcgagcacacggcgagcgacggcaacggtcggggcggcgccggctagctacggggaggctactcgtgctaccaccgaaaactaagggggggagatggagcgaggaggaagaacggagagaggcactaccgtgcgggtcggggcgctgtgacgagaggccgacggcgcgggagtaatctctccggcctcgggccggggaagaggaaggagagggcgcggccggagtcctcttccgcgtccttgctcgtgccggctcctccgacacatgcaacgacgatcggcgacggcgaaacagagggcggcaatggcgcggaggcgaaaatgagggagtttggagggggagggcttgggcttaaatggacggcaatgtcggtttgggagaggggaaccgacattggacggttaaggcgcgagctggcgctcggcgcttgtagccaaagcggcggcaggaggatgacgccggcgaggaggaaaaaggggaaaaggagggggagaaaggggcttgcccctttgccgattcgggaaaaagagggggaggggaacgggagcatcgcggcagagggaggaggggcgcggctccgtcccttggcggcttgcgcgcggaggggcgggggccgggcgatgacgacggcgatgacggcggggcgatttggagcggagcggcgacactggcgacaggcgcgtgcagaggctgacggcggcggcgaccgggcggtcggccaccacggcacgcgcgcgcgggaagcaacgggcggcgtccgcgcgggcgcgcacacgctggctcgcgaggacgagcggctgcgcggctgcaggcgcggcagagcgaggggaaagggagggggcgctcggcgcggcggcttacgcgcacgcgcgcgcggcgtgcgggcgaggctgagcgggggaggagagatgggagagcgcgcgagagagagagagagagagagagagagagagagcgcccggggagagagggggccggggaagaggggaagatgggtcgagcgagattcggcccatcgacctcgggggaggcaaaatagacttttgcggaggaatttgattggaaggatttggattcggaattgaactcgatgatagatcggggattgagatcttgagatggcacggacactagacaacaagcaaagaaacaaatttcgcaattagggtttttaagagatgattttcccgctaggcgccacgacggaacgggcgctacaatacacctctccgtgggtggttgatcttgacggtggagatcaaccttattcctgcaagcaaatcgaagaaacaagtaagaacaagataaaagcaatttgaattacagataggaattgaatacaaatgataagttggggctccgtaacgagtaaaccggcaatctaaccgatcacgggattacacggcaaagtagcaaagctaaactttaatctaaacaaaacccaagaaaccctgaaggggtacctaactatttaaagaggtgggaggacgaccaaggggaccctagggtcgtgctccatctggttgggtcgcaccccacataggccccacttgggccggggtcccaaacgaagttacaagcccataggcccattacaggtgacgcaacaccttgtttcttcaattgcggatgattgggatggaatttgacgatgaggctggatccgttggaaagaggactccgagagctttctatcaagtactaggatgtgtcagatccctccgaaatcccgtatattatgggataaatggaatagtatctaagtcacatcttactactcacttggtgaatatatattgtgaatggcctaatgcggctatactggtgtcattgtgtatgtagatccctttctcctactaaggccattcacagtgctccgacatgctgttaggccaaccctcgacgcgtcagagatttgcggctagctaggtgtcgcgcgtgaccaaatgaggtccacggagtctagattgggcattcgttcttctgacaacccaaaggagcacggtgtgggggagaatggcgtggccgcgttgtggaggtcatggccttgccgcttcgagcctccgtgcgtgtgttcccctccccatccctcgagccggcggcagaagaaaaggaagacacaacggtggaggaagaggaggcggtagatcttgtgcctaccttgttgatatcccccctcccaccgtgccgccgctcgtcgtcgtgcctcgctctaagccgccgagcttgtcgtcatcctctgatgtgcgccgctgctcgttgtcgtcgtccactccaagcatggcagcctcctcgacccctccgtagcctcggtggcctccatgacccgtccagatcgaggcgccaccgaggagagtgtaaaggtcgtgccaccactcgttattgttgctctaaactacgggcaccggcgaggagaggggagaagggatttggcgccggcgaggagagtagagaagggagatccggcgagccccgggttggatttggccacgccactactctgcctggtgccgtcgctgcttgggtcatcgctccccgtcgcggcgcggtggactgaggagagcacaagcaacaagcaaggcaacaagcaaccaagaagtcacacatggagaaaatatgaggaaaagtcacaaaagcttgctgcaagcaaccaagaagtcacacccacgtggagaatatcaggtactaccgcacagtagcgtgctacatattaccaacctaaaaaaaatacatcaaaaaagtcaaaaacaatatgaaaaaaaattcgagatgtgaaacactatgacatttgccatcacacaaaacatcaactcaaaatacaatgtgcacaatgagaaaaagaaacaattttgttctccaatagtatttaaacaaatcagttttctattccactgagatttgtcattttttctatgtgtatatgttgtattttgagctgatttttttacatgtcataggtggtgtttggatacagggactgatcctgtcatatcagatgtttgaatactaatttaaaagattaaatataaactaataataaaactaattgcataaataagagctaattcgtgagataatttttttaagcctaattaattcataattagcacatgtttactgtggtatcacatggactaatcatggataaattatgctcaatatattcgtctcgcgaattagttcaggttatggattgtgttttttcattaatctacattttctacttctaatgaatcaaacatccgacggtaactaaaatttagtcctcccatcaaacagccttgcgcttgcacctctcaaaatttttctattctttttttttttgactttttcggtgtatttttcgataaggggactcatctctcaagtgcactgcttctcttcgtctcttcccccatctccggcgagccgtactggtccaactccggcggccaacgacccctcaactaccagctgccccaaaactggatccgtcactgagttagttaccaaggtatatctccccctcattcatatcggcggccggcgacggcgagggtgagaaactgaatctgtacaccctgttcttgcccagcggcggcggtgaagagaaggggcagatggacggagcagcagtgagcgtcgccactggggtgatgggatccctccttgccaagctctctgcattgctgggagaagaacgcgggcttctgaaaggtgtcaagggtgacatcaggttcttgagagatgagctgagcaccatgaacgtctttctgatgaatatggccagtgtggaggagaacatggatgtgcaggtgaaggactggaggaacaaggtccgggaactgagctatgatatcgaggattgcatcgatttattcatgcacaaattgaatcgcggggatgataaggtcaacattgttctcaagatggcaaagaagattagaatgttatggtcaaggcatcagattgctaaccagatccaagaacttaaggctcgtgtcaaggaagagagtgatcgccgtttgaggtactacttcagcgagtgcaatgcacatgtcgacgggactaaaattgatccccgcctaccggcgctttatgttgaagaagagaagcttgttggtatccatggccctatggaagagatcattgaattgttgatgaaagaggatggttcggggcaaaaactcaaagtggtatccattgtgggttttggcggactcggcaaaactactctggctaaccaagtatacaacaaaatcaaggatcaatttgattgctcagcttttatatctgtttcgcagagtcctaacataaagaaaattttatttgatatgcttaaagatgtgaccagccgagacaactctgatgatgataagcaaattaaagttgttggggtcaaaggagataaatccgatgatgagaggcaactcattggtaagctcagagtattcctagagaataagaggtacaaacaaatatcattagctatctctttgattcattgcacgttaatctttagatcctagaaattagtaaatgtgaccctatcatttggtaatgttgtccttttatctatggcataatttttgacatgctagtttaagaccttgcagttataagtattacctgaatttcctgtgcaacagcaaattcttttttggtgcaacagcagatttatatagtcctacatatgtttgttataaatagagcctatttggttgtacaaatgcaataactgtttatggtgattctgctgtagtaaatacgcgggaaaatttaacatacatccgtaacagatcgattatacatcttcatttgcagtgttctttaagtcagagccaacagaacaagttttgtaacttatagatatttcccttttttttcctccaattactgagggagccaatatatattagcatgattttgtattaaaatttctatagatgcaactcagaattaatttataggatgccagtaatgggagggtcagttgtggattagaagtgctgtggccgtgcagcttgaacagttgtcttgtcttggtgtcacagcatcctctgctattggttgtaattagcttcattgcaaataagcattcctttttgatgagcattatgggcttcgtctggtttgaggatgtaaatgaccttttgttctgatctgactaacagaaaggatagaaagaaatagtagggtatggaccagagtgttatttcacaacttcttttgattctaaatggcattctcctaactgtactgttttaacagccccaacagcagtgtacaccatcatttctaatactaagaatgccagttttactcgaaatttacaaagaaaaatggagatccatgcataataaccaaaaaactgtgatagcatctgcagtttggatgtaatgtaaaaggaaaatacatgcaacattgcaattgaatgtaatgaaaaaggaaaatacatgaaacattgaaaatgtttgctggcagagaaatctgaatgtagtgtactagtgtttcatgagtgtgagaggcaccaagtgttagatatagatggctgccctgcacatattatattttctttttaaagttcgaggtgaagaatacttgattaaaattgagcgataaaatgtggtaatattgtatttataacactatatatgtgtattaaatttgtcttccagaagcgttccggataattaaaagtggcataaatatctaatatatacttttagagtggcataatatcttctgcagtacttctcatgagatgtatactgcatttttaagttaaggcagactaataatctcctacatgtacataggtacttcatcattgttgatgatatctggagtgcatctgcatgggaacatgtgaggttagctttgcctgagaacagtctttgtagtagaataattacaaccacacggaatgtcaatgtggcaaaatcatgctgctctggttttcaaggttctgtttacaacattcaacctctaaatgagcaagactctaagaagctatttctgaaaaggcttttccactcagactccaattttcctactcacttggaagaagtttcacatgcaatcattaaaaagtgccatggctttccattagctattatctgtttagctagtctgctagctagtaaatctgatacaaaagaccaatgggagcaagtgcacaattctctcagttctgcgtttagttcacaagggatgagcgatatactgctgcttagctattatgatctaccctatcatctgaagacatgcttgttgtatcttagtgtatttccagaggattataagattgatagagatgaactgatatggagatggatagctgaaggtttcatcactgaagtgaagggtcaaacattggaccaagttggagggagttactttaatgagcttatcaacagaaacatgattcaaccaattgacatcaaatatgatggtaccgcaaatgcttgtcgagtacatgatatggtgcttaaccttatcatatccatttcatctgaggaaaattttctcaccgtagttgacgagcaagggtataaatatttgggtaataagattcgacggctctcattccagtccaactctgttgagaatgatgtgaatgtagttcaaaagatcatggacaacttgtcacaggttcgttcgctaagcttctttgaggtaccagagaaaatacctcctttcttaaaattccattcattgagtgtattggttttagtggattatgatttttgtcttggtaatggacacattaaataccttggaagttttttccaattgaagtatttgagagtcacttcttatggcattacccagctcccagatcaattcgggaacctccattatctacaaactctggatatacgtggcagtggaatcgaaaagtttccgccaaccgtggtccgtttgcataacttggctcgtctacttgttggcaataaagtgcaattgcctgatggtattggagatctgcaatccttacaggtgctgtcttctgctcggttgtataaacccctaaaacttgtggaagatctcaggagattgaccaaactaaggacgcttgagatagttcttcatggcagtgatacacttggtgctcatgagatgggaaggtatgaggaagctttggagtcttctcttactgtgttgggcaaacacaaaattcagtcactcgaaatttcatgttgtgattacttgagagataaattactggatttgttgtgctgcactgttccaaacattcagaagcttgtaatatctggcaattgcataaataggccttctcagcag

SEQ ID NO: 11557 - DNA, 591 bp, Oryza sativa
aatcttctctctaggaccatcgatccccacaagcttctctgcttccacatagagcactgggagtcgaggatcaatttgaatatggctaaatttttcagcaacttcatcaaaattatacctcgagcggcgataactttcttctataacacgagccttaagttcttcaattaggttcgcgattttgtggcgccaccgcgccaccataactttctaattttagctgccatcttccggacaaggcccgctttagcattagaactgctcaccttgtgcaggaaaaggtcgatgcagtcttcaatatcatagctaagctcacgcaccttgttcctccaatccttcacctgctcatccaacttctcctcgttgttcgccagcttcaccagcagggtatgcatgctgctcagctcatccttcagaaaggagatcccacctttcacgcctttgagaagcttgtactccccttgtatcaacagggagagcttaggaagcagggtgctcagggcaccagttgaaacactcactatagctccagccatgttgacctctttgtctaaccctagtcaagatgtggttcactagtaaatgagaggg

SEQ ID NO: 11558 - DNA, 946 bp, Oryza sativa
ccgtgtaatcggaaaattaactttccaacttcacggctgggggctaggatcagtgctttctcaaccaaggcaggtcaaaggtccaagagccttgtcccccgagaagaatcctccgacgacaaggctgggggctagggagagtgtacgactcaaacgactgccaaagtcgtgaactgaggaaacactcttacacactatatccagaggtacgaatactaccaagaaggccaacgccagtccatagacttgaaaaccttctccgctaacggtgccatcgacttcgccaggtggtctatctccgcaggagtcctccgagaacgagtgaacccttcatgaagaaactcgaggtgcatttgcggacaatgatctcgtatgcaagccaacacatgccctccggcatatcggctcgaccgacggcactcctgtttcagagcttcgtcaatccgcttgccgacgccttcacccgttcagccacgagatgtatccagccgccgactcctcaggttctccgcagaccactcgaagttctctgcaaactctggccatggatgtgcagcagctcttcaaatacgagttaaccacacctcacgacctcggagcgtttccacggcctgctccttttttacttccaacatggctctctcgagttccgccacttcaaatttcgtcttccaatattggatacgacgatcttggccagcaagtgcgtcctcgaggtctgtccaacacggaaacgactacgtcagactgcttctctctctcgagaacacgactgattaatcggaggagcgaaaagtgatgagagaccacaaacctaaggaagtcgtcgttgtccctgtcctcgcgggcaaaatttcacccacgttgtccagcaacgcgtgtcccacagacgcaagatccggagggatcgctgacaatttaggctgcccacgctgctggacatcct

SEQ ID NO: 11559 - DNA, 650 bp, Oryza sativa
atgaaacgtggataatggcgttcgatggtgcactcaacagccaaggagcaggggcaggattcatcttgacatctccttccggagatcaattcaagcacgcaatccacctcaacttcagggcaaccaacaacacagccaagtacgaaggactactcgccgggataaagctgcagccgcacttggagtcaacgactgatcgtgaaaggggactccgaactagtcgcaaaccaggtgcacaaagattataaatgctctaaccctgagttatccaagtatctcgcagaagtcaggaagctggagaaaaggttcgatgggatcgaagtccgacacgtataccgcaaggacaacatcgagccaaacgatctatcacggcgcgcgtccagacgagaaccgctcgaacccggcacttttctggacgtcctgacaaaaccatcagtaaaagaggtcagcggcgacgttaacctagacgcccccgacatcagctcggaggccacagaggcagaacgcgtcgttgccgatattgaaaccacagacgattggcgcaccccactgatcaaattcatcaacagcgatgagttgcccgaggatgacgcataggctgagaaaataacccgtaaaacaaaaatctattgcataatcggcaacgatct

SEQ ID NO: 11560 - DNA, 685 bp, Oryza sativa
gcaggaacctcttctgcctcacggcatgcttcaacgtgtcctcgagcagggccttgtccccggcgcagccatggtagcttcccccaaacgcggcgatcacgccgtgcaggaggtgaacctcgttgacctcctgattcacgctcagccataccttcttgtcgaagtggctctccaacacggcgtcgttgaagaccatcctggcaagcgtggtcttgcctatcccccagcgccggtgatagcgacggcgatgacatcgcctgacgatcttgcgcgcgtgcgaccatccgccagcttgttgccaatcagcagatcaacgaggttccttgtgtgaagatctatcttgtcgccgacaacatcggatcgaatgatggatggtcccgtcttgcggttgcggctgctttctgacgagcaagaacacatgggtctatcggttagacgaagggccgaggaggagtggattacttgggagacaaatccaagcgggagctcctcttcgcgatctcctccaccctccggttgagctcctggatcttcctcccgatcttgcgcgtagcggcagggctgcggcggcagagggcgctccagcacgccgacggcgccggagcagctctcggcgctgagccggggtcttctccgccctccatggcgcggaagaggtcaaggatgtcgtcggcgtcgtacatgg

SEQ ID NO: 11561 - DNA, 792 bp, Oryza sativa
acgatgctcctgaatagtatcaacgtccttagtgatacttgcctctgtaaagcatcccactcgacttgcttgtttgaaatacagagccgacgaaacttcagagtaccaagtgcatcacctatggtctgtttctgcatctcgttaatggacaatccctcgtccttcgctacatgttgggcaaaagaccggacaacatcatgcatggtgcatcctagttgatcatagtacccatcacttgggtccaaaaggttccttaagactaactctttgtagtactgagctgctacagcctctggcaatcctgaacccgtgctatcttgcacgaacccttcagcgatccacattcggacaatggttcttgattcgatcacctcacctcgtgggaaaagtgagcagtacacaaagcattgcttcaaatgagaaggcaactctccatagctcaagcagaccactttgttaatttcatcattcacttcatgtttacaccatgcagaatgtctagaaacctccatccaggcacctcttgttctgctcttactaagtaagaggcccccaatcatcttaatcgcgagcggtaaaccatcacacctgtccacaatttgcatcccaatatcctccaactcatccaattcagcttcatcactcttgttcaaaactatctgttggaatagtaaaaagctatcttacttaaaaatgaagtgtatacctaataacatccattgaatataagctattctcaaatacagtaaacaacaacaaaaaaaaaaacctgcaacattcatttttacctaa

SEQ ID NO: 11562 - DNA, 1040 bp, Oryza sativa
cgacccgcggtgcgcgctcgcctcctccctcgccgcgcaccacgtcgccccgcgggaccccgcccgggccgccgccttcctcgccgccgccgccgacaacctcgtaagcgtcgtcgcccctcacgttgtcgctcgccgccttaattttttcccccctcctcgaatcctccatttactcggtgagcttgcgctttcgtgttgctctaaacttccaccagggtgcagcgacggagtacgagagggcggtgttccgcgcgctgtcggcgctgatcggggaggagagggacgagcaggtggcgatcgagcggcacttcgaggtttgggggtagcttgtctccattttttgtaaattgagagtatgtgctgctggataaattgattaatggcaagaattgattggtggtgtgtgctttacatgtggcagttgctgaaggaattccccagggatctcatgtctctaaagagagctcagctcatctgcttctacatgggacgccctgatacatcgctcaaatttgttgaacaggtaagttcactacaaaggctcgtgtatgtttatatgcttacaaagtggaaatatcgtatataactaatgaaaccgaagttgaatctaacactgtttgttattatttaaaggaacacccatggtagcaactttattgaatcatcacttcaaaactttggataaaaataaaatattttacaacagttgatcaaaaaagcatcacttttagtgctgggattttgtgtgcatgcgcgtgtgtgtggaatagaagaatgcaggattttctggatgtgcttcaaaacacttcctcttatcaatgtaccatagttctaggtactattcttttcattagctttgttgtactcattcttgatcaggttttgccagagaatcaagaccagaactacatttacggcatgcttgctttcccattactagaacttggaaggatggatgacgctgaaaaagctgctcggaaaggcttggccataaacaagaacgactgctggtcacagcataatgtatgcgggtggtt

SEQ ID NO: 11563 - DNA, 693 bp, Oryza sativa
tcctgcagcccagccttgagaagacagctcaagatgactaccaaaagcttgcatctgctgtatatcttcaagttagcaccatcagccaagctcttatctttgtcacaaggtctcgcagctggtcatttatcgaacgccctggctttctacttgtctttgctttcttcgttgcacagctggtatgctctctccctattaccgcaaactgataaattctttctgggtagaattgtgttaatctaactttcttccccttcaaatgcagatagctacattgatagctgtttatgctaactgggcattcacttcaatcaaaggcattggatggggctgggccggtatcgtgtggctctacaatctcgttttctacttcccgctcgatatcatcaagttcctcatccgatatgctctgagtgggaaagcatgggatcttgtcattgagcagagagtaatgctaatgcaccctgcatagttgtcttggctccttacctatttcgactgaatttccatgcatttgtgactaatggcccatcgatttcgacagattgcgtttacaaggaagaaggattttggcaaggaagagagggaactcaagtgggcacatgcacataggacactccatggcctgcagccaccggatgcgaagcccttcccagagaagaccggctacagtgagctgaatcagatggcgga

SEQ ID NO: 11564 - DNA, 654 bp, Oryza sativa
gaacttctctccattctcattaaacccaacccttcttattacttcatcaaactttaagtaccactgtctggaggcctgttttaatccataaatggatttctttagatggcaccccatttgttcttttccttccacaacaaaacccttgggttgtgccatgtaaacgttatcatatagatccccgttaagaaatgccatctttatatccattcaatgtagctctagatcataatgtgcaacaagtgccattacgatcctgaagatatctttacatggcaccagagaaaaggtctcattataatcgattccttctctttgagtaaacccttttgccacaagtcatgctttatatctttctacattccctttggagtcacattttgttttgtagacccatttgcagcctactgttttggctcctttaggaatttcttctaagtcccaaactttgttagtactcattgatctcatttcatctttcatggcttcaagccacttcgatgaatgagcacttctcatgacttcttcaaaagaggtgggatctccctctgtttgaacttctttactagcatagacttggtagtcactagtaatagttgtccttctctctctttcagatcttctgagttgtggtacttcatcgggctgcaggaa

SEQ ID NO: 11565 - DNA, 1258 bp, Oryza sativa
agccatgggacagggcaatcaagggagaatctctcaagctctttgaacccttctttctcaatcactattggattttcaggaatgaactccaagcctagtaccaggcgctgtaatttgatcaagcccgcgaggatcttgacatcatctgccacttgtttgcagaccgtgatctgcaagaaagtaagacggtcgagcctttcgatccattggggaacacgggaaaattttccagctattaccttaaatttctcaagattttcaggtggttctgttagagaaccgaggaactccatggaacaaccgagcccacaatgaatagtcatggacttaagctcccaccatccttctatggatgatcgtagggcttgttggtagtctttgtcactgcactggtgaaaggaccatgttattgtgaggacctccaactgcttcagatcaccaagagactgtactgattttacagagaattcacttaaatcgatagttgctagcgtctttagatatcttaattggtggatcgtctcgggtatctttgttagcactgtttggtcggaatcaatcattccagatccagctccagcagcaccaacaataagatttctcaaccactttatccgcacaatttgatctggcaactggcttattagtgtgcctcttaggtctagcgtctccagattaggtagccggcacactccagaggggagatcacttatcttggtgtggcttatatccaatctctctaggctagtcaattccttgactttctctggaagatgtcttatccatgtgcctcttaggtccagcatcttcaaatgctttagctcccacacttctgatgggatctcacttatggtggtgtggctgacgtccaatgtccccaggatgtgcagctccttgatctgaggtgggagcttgctgacccttgtgttcctgacgctcagatacctcagcataaacattttgcatatttgcagtaggtcctcatccttcaaattctcccagcttgaagatccaacaacaccagataggcaaacttgtctagagggactgttgttctgtcgactgcaccagatatgagtagtgaacgagtctgagacaaatccatttgctgcagcatagctggaagctgcggatcaggatggtggagagctagacggcgtgctatccgagtggtgttgccaccaccgctccgggctaaggtgagcgttgagctggtaaaaacaagacccatctctgctgctctggaggcaagaaacct

SEQ ID NO: 11566 - DNA, 670 bp, Oryza sativa
tcctgcagccctgatgttgatttactattggagacgaaaaaggttttgtcctcgaatttcgatatgaaagatcttggggaaccccatttgttctaggaatagagattcaccgggatagaaaaaaagggttttagaattatcgcaaaaggcgtatctggaaaaagttctaaataaatacagtatgcatgagagtaagcctacacctgctcccatagtcaagggcaatagatttgaaaaattttaatgtgatgaaaaagttgaaagtttgaagaaaaaatttcaaactaaactcggccttaatttaaattttaggggttcaaaaattccaaattgcgttcggtataaaatactattcatggtttattatctaataataacaaaaatacaaatcaaacaaatatttcaaataaaacacacgatcaaacttggaaaaaagaacttttgactatggttaagggccctttgaatcgcaggattggaaaaacgtaggaataggaaaaacgtaggattttgataagaatgtaagtgtaaaacagaggattgcaaaacgcatgaaaaacccaggaatgaccgtttgattgaaccgcaggaaaaacgcaggaattagatgggagagatagactcaaagaaaagttagcaagaggttgaagctcttgcttaatttcttcca

SEQ ID NO: 11567 - DNA, 728 bp, Oryza sativa
attcctgcagcccgtttaagttttcccaggagtctatttgtaaaataagttttcaaaaaggaccaaaatgtaaatatttcaggagaatttcatcactgtagttggtggtcactggctcacagcaatgccgggtaacaaggttcgacggttatccctacacagtagcaatccagagcatgcgaaggatgccatagaaagaatgaactcgtcacatgtacgatcgttgacagcattcgagagtttagaacaatttcagtcttttacattcaagtttgggatactgcaggtgttggatcttgaaggttgcaagggcttgactaccagccatctggacaaaatatgcaagatgtttcatttgaagttcttgagcctgcgcaaggcacacgtcaagaagctcccgtcagacattggaaagctgcagtatttggaaacgttggacataagggagaccaatgtgcaggagctgccaccatcagttgcagatctcaaacaaatggcacatctacttggtgggaattagagatggcaacgggtgcatacccatcgggttctcttgccccatacccacacccacgatgtctaaatactcccacttaaatacccacaccaatcgcgggtacaaaattgtccccatacccacacccatgcgggtaacgggtttccaacgggtacccatacccatataattgacttgtaatatttatagttttgtactataattagccata

SEQ ID NO: 11568 - DNA, 602 bp, Oryza sativa
tcgttgagtagtttgctattgaagaatccatctcttgaacccatctctcaaaatcctgaagcaccaaaatccccctacttggcgcgccactgtcgatgtttgatgtcacgactatggtatttgcatagtatagggatcgttggcaccagggtatatgtgagactgaggtaaaagagatggggacgaggatttttatacaggtttgggcccctgaattgtcaggtaataaccctactcctgttggccaaagccggtcgttgctcttattcatcataatcacaccagtacaatatttggggtagcctatctatctgttatcgacatggcggtctgaagtgctgacacgtaatcgacaacagggtagtcttccgcctcgaatccatatccggcgagatcaaagatagtgctagatccctcctgatggtagtcgtaggtaccgtatggggactactaagcttatctccgatgttggtatccgacggttgtcttgacgtatattggcttgtatgttgatctattgtggcgtgtcccctctcctcctagggggtcttgtatttatacctatgggttattggtgcgtgtcccctctcctcctagggggt

SEQ ID NO: 11569 - DNA, 3284 bp, Oryza sativa
ataccagaccctgcaagttccgtaattcaaactgcatcctaaaaagaattagaaacaggcgagtagcttcagatcaagctcagctcaacagggaaaataatacaaatgaggatgaaattgttcagaaaattcccattggtaatcatgtgcccaagccaaactgacatagcgatacacggttatcccatagtctttcaaaggacaaagtaccatgcatacagatcacacgaccacagatttgttgacattttaaaaagatgataaaccaggctgataacatcagcttgtaccgtcggaatacaaacatgtatctgatatagagtatttcattattgtaactgaatgagatagtccaaaaaataagcttagataaagacaaaaatatcttttacttgagaatctgagcattgaatctgaggcagactgctaggattcagagatgaagctatcagatgattagtcaccatgcacaaatgcggcacgataaaaatacacacaagggtatagcaagagtttgaacttcagaaagtcaataagcaaagggagagcattttgagtggtttctatcagagcatgatcctaagctctaatccaatgtcttccgattccagttcaagggtagagagcattattccaaagaataaaaaaacaatgtataagatttgttcacatattatatgcatggtatgcgaaataaagtaacatcctagggtgaacagatactagtattagtaacaattcaaattaagcatacaaaattactatatccaagaaatggtattctcatgtgaaagaacagcaagcagttatatatcttcaagcagcaagaaatggtatagtttcatagttaccttcttggtcactatatctttttgttacaaaaaagaaagttgtagtgctgattcagttaaaatataacagggggtaaaaatgagggaaaacctaatatgagaaaaggaactagtttgcacaagagaagcaattaagatatagttacaacactattatactgtgccaattccaactgttataggtttatgtggatggtacctaaaacaaagtgtgtatcagactatcagcgaaccacattgaacgaatgatcttgaaaaattctggttgccataattgtttggcatttttttaacatactgaataagcacaagctagaacttaaaaaaatgctgcaagcgccagatgtgcaactccaggaaaaaatgatatcgattgattttttttctctttgaaaccaggtgttgattattaactcaatacgaaagctgcaaagcagcggactgcagcaattcttgaacttgttcgatagcacgagcaaacaaagaaaaacttataaacttgttgctggatttaaccactgaaatctgaataggatggccttggcgtttcttgcaaaggcacagtcttcacaattgcatttccacgactgcccagcataaacgacgcaataagtaggaaaagatttaagattcagagaagagaggagtgtgaatagcatcaaggctgaatctttgaaaccgatgaacacgatttacacgcgaatctgcagagcctagaaggccagagaatgtagcagcgggttagatctgtggctcgcgatcagacgatggtgcaggagtaaccggggtggtcgtcgacggcgacgtagtagggccggcacgccctgcagcacttcgtcagctcggcgcacttcttcttcttctccgagggcgtcacggcggtggcgccgttagtgagggcgatgggcggcggcggcggcggtggcggcggagtggatgcgctacgaccgggagcgagatggcggcgacgacgggaaagggagaagagaaggaaacctaaccctagatttggaagaggaggggagagggggaaaggcagcgtgctcaccggagagaaggtggcggccggaggagagagccgtgccgtcgccgtcgcgtcttcgttgcgccgcctcctcctctcgcggcttgtttggaaactccagggaggggactggattttacgcgagggaattaatgatgggattaaaatggggatttaatttttaatctcaatatcaatatcttgtttgtttggtaggggtgatggaaattgttagggagtttagttggagattagatcattaataaaaacggatagctgatatttgcttagacaaagtaaaggggaattccctcccaattaccttcccctgccaggtattgaaaaggagggagttccttccataattccccatcaccatcccactaaaatgcgcccaggtattaaaaaagagggagttcctttctcaattccccatcaccatcccaccaaaattaacatatctctcaaccaaacaaaacaattaatagcctcatccctctaaactctcaatccctcttaaaaactccatgcaaccaaacggtctgttgtagaaattttccacgccctacgaggagtagattctttcccgggcctagagaaagggaaacctcgtggtgggccaggctaaaatccacactagagcttaaccgaaggaaaaagtacatcgaatgtctctcaacttgtcattgagttaaaaaaaaccacaaaaccggatacaacacatcctccaacttacataaccagagcaaattagatcccttagcggtttttgactctatttttgtccgatgtggtagctaactctgcgtgggacccacgtgggccccacgtttcagcatattcttcctctcacctctcttccatctccacggtcggcgggtgcaagcgagtggtggaacagcgcgtgggcgggcgtcagcggcgggggaagtagctgcacgggggacggctggtgggcgcaagctgcaggggaggagctgcgtgcaggcggcgtgcgagcgggcgccggcagtggggaaagcagcggcacgggcggcgccgcttcgctgccttctccatcctcctcgagttcgtcctttctcgccctgcccttgcaccgacggccattctcgccttcgctgcctccagcgacatccccgtggcatagacatccggatggacacggtggctggaggccatctcgccgtagaagcggacgatgtcttctgtggcggcggaggcgggcggtagcggaacaacgcaaaggagatgggcagcaccagcgcaaaggagatgaggtgctcgtgtcgatgcatcgatgtggcacccgcagctcctcccctcgccgccggcgctccgctcctcccccccgggcagcgtcaccgccatcaccgttgccacgttggtgcctcgcactgggctgcaggaat

SEQ ID NO: 11570 - DNA, 2648 bp, Oryza sativa
ttagttgagggacgcacggtatctggtttgcggttgggggacgattttgtaactcgatgacaagttgagggaccttcggtgtactttttccttaaccgaacgcacaatttcgtatggccgggattgtttcctcgccaaggtgatccacagagattgggccccgatcgcggccgttcctggcccaaccgaacaagccttaaagaagaagaactacagcgagggcaagggaaagggccgggagttgaaaactactgtatgatttaatgtagttatcaatttcgttcatttgcttgaattggacagataagggcctattcagttggtaaaataaaaatttttagttgttacattggacatttggccggatatcgaaagagattttcggacatgaatgaaaagctaatttcataactcgcctggaaaccacgtgacaatcttttgagcctaattaattcgtgattagcctaatgacggattaattaggtttaaaagattcgtctcgcgatttacctacaaactatataattagttttttattcatatttaatactttatacatgtatcaaatattcgatgtgatgtttttaagaaaagtttttggaaataaacaaggcctaaaattactccacaaagtcacagcactctctgactttacaggatccaaatcctcctcgaggatggaacgaaacgaagtgattaggccgcttaatcaaatcgattaagcaaaccacttcccttccgcgacgcggcggcgactccggcgacgcgacatcggcgatgctcctcgtcgacggcgagcccgtctccgcctccgcctcccccaccttcggctcctcccgcggggtgcgcctacttggttgttggagggatttcttcccaccccgtctctcaccctcccgattcttgcaggggagcggcgggagggagctggtggcggcgctcatggggaaccccgggctccgcgccgcatcggagaggctcagggcggagccggagaggcggatctcgtcggggccagaggaggatgatgcggacgccgcggcggcggcggcgccgaggcacgtgtacgtgttccagcgggagttcgccacggttgatccggcgcgcgtcgaggtgcgtgcgtgatgcccgggatttcacctcgctgtagtaggttcaggcctcgcggtttgattgggtagtgtcgtagagatggggggggggggcactcagcgattaattccggcgttttgatgatgaattgtttgagttagttgttgcttagcagtagcgccatgaaatgcttgctgtcaatatggattttgtttcactagaggggatcatgggttgctttcaatataaatgctgggcatttgacatggagtgaagctctcagtagtttacgcatgatttagcttggaagcaaaggtgaggccttctgggaacgaaggataagggcataaggcccttctggaatgcgggaatttttcccgattctcgtacgaaattaactgattcctgtgaaattcctgcgacaaaccttgaaactactgcattctaaccgaagcttaaagttgcggtccttatgtttggaggtttgtttggggacattgtaggcagtagctgtaggtggtaaacttagtactaggctaccagcagaagtttctttatgcgatttctatgtagctaacgaactaccaagtccgttgtgctgtttaagtgtttattagttgactttgttagtgaccataaaaggactgttgacatctttgagttgaaaatgttctgaataaggatataagttgtcttcgactggaaatgccgatttgtgataactccaatccatattaaagttccatttggcttagagtctgttcatcgactgttgctgttacagtcccttgaacattttgatggaattttttccttatttcacttgggtcttttgcatgtctgttgctaaaagttaaattattattcctggaccattcgatgtcagtatattgcactttatatgttaatccattcttttgcatctgtagttagtgggcacagatgaggtgactacatgcgtgggtgtagtaattcgcaacaacaagactggaatgtaagtgaaaaaggaagtgagcatttaagctgaacctgtaaggcttttggtttcttgtgtaatttagtactcttatttatcttttccatcacttgatgatacctctttctggtattcttaactaatttcaggacctccattagccacatggacttcccaaaaattgtggagggagggctcaaacagatgttagaattacttggtgatgacaatgcaccgtttgatgtttgtatctttaccccctttgccctccaaacatagaatacgcacccttggtgaatggtgatattcttactaccatttgactacaggttcacctgattggtggctttgatgatgtttctacaaaggttgaatttcagagcgtactgtgtggttaaacttcctttaatttttgttagcatgatacctataggatcatgtaatttactatattttgcaccgcaggttgtacattctgctggaaggaagcacatcaaacaggaagggtattcctatccactatgttgcaggatacttgaggtgttgtataagtcccggcagcaattccatcttcgtacat

SEQ ID NO: 11571 - DNA, 4533 bp, Oryza sativa
aatcacttaattgatgatcctatatgctctatcgatatcttgttctgctcgtataggatgccggattgggctgaaatggcatcatcacttaaccagctatcggactctgaggtcttgttgcagtgctccacctctccagctgccgagccaccacattttgtggaaaatgagagaaggtttgtgcccatatttttctacaaattaaacctgtcatcctgacagatgagagactgatgtggtttaagcttttctttataccatcttgatgtaggatatggagatacttgattgaaaatccatattggcaagacacatttccgaaatacaagcctcgggtcttccataggaccagtgatggaaggtggtcacgttactcaatagtatcatccagctaacattggtgctctctctacatgcggaacaaggggatatatacttcatatataatctctcctttgttagaacctgtgatagattgtggtgtggcaacacaggatttcttctgaacagcgggcatcaatcccagtcgattctagatttctttctcctgtgagttgtcccatgtaatcatccttggaaggtgaatgaggaattattcagattttccccgtagacgcacagaagtctcaagttgatgtattagcacagaacctgtgttaggattgttgattgataggcaacatggatgatggcattccgttctcgtctcatatgctccgaccattgttacttggtattttctgaagggaacatttttcattttggcagttgtgcatcctttccttgttctgtacggtgcaaatagtaggtgattcatgcgatacctggcgtgttcgttcccgcaagtatttacgttgcctcttttttaccaggtgtctgtgtgctgtgggccaatgtcgttttcactgcacgctgctcctcggacgtaattgtgcctcctctgcatctacacagcgttttgccatctccaccgtttgatgagtgggtctgttgctacgtgggaaggcatgttgtacacggttggtgcataacagcctgtgaaaatcggccggatgttgcagccaagagagattttccccctccaaatgagagagatttcttccccgcaacaccttggtgcgcatggtctatggtggaccctgtggttaagcgcttcttatccttttggtccggcgtgcaccgagaccaccgttacaagggtttcaaacatatcttcttgggattcatatggttatgtggacatgttccattgtatggttatatggtagatggatgaaaaacaataggttcttggtgcactaggatcgtgtgtgggtatagctagcctactgctcagcaaattagcgcttaacaacaacccctctttttcagcgtatgctatgatttatctccctacttttccctttcttcagtttcttaggtatgatgcctcgcaaaaataattggagaggaaaatataaaagaaagagcaaagcagcaaatagcaacctagtgctgcgttgtagttcgtggcactttagctgccgaacaacagagaaaatcacttgcttataaggatttgaggctagccaagagagtttggactttttgcgcgaagcgagaatggaagtgcagtgcgttgagtgtaggtgtggtccaagtagatgagttaggcccgataatgttttcgggtcctgtgtattacatttggcttatgagacaaccaacgaccatgaagatatctcggtaggtgtggtccaactagatgagttggcccaatatcgtttttgagccttgggcattacatttcgtgtgtgagacaaccaacgaccatggaaatacctgggtagctctgcctctatgcatgctacctgtatctttgtttgccaattctaagttaccccatgcgtcttacaaagatgctgcctctggatgtgcggttgcctccgcctaggaatcaagcttgacacaacaagttttaacaatttttcttggtgcttgtcgccgacgagattcgttcgtcaatttattgttttttgttaaggtagcaggtcgtcttgacttagctggcacccatctatgctccccttggtccgtggtctctgtgatcccctttcgacaaatcgtcttgatgtgctgctctcctccgctatcttccacgtcagctctccctagccccaaatccgctcccgacaagataatactatttagtttttggctttaagttgctttctatgtgcctttttattgctatttttattgtatttggtttgcttggaaattgggagttggtatgtgagcagccatatatggacaaagcccatgtttttcctctgagaaaatcaaacagtgatgccttcttgctggagagatttattaactctgattaaataaaccggaactttgcctaaaattatcacctttgctactaatcacagagttgatctatacaccgctcattttgtatagccattgattcaccttgatttattcttcgctttgtctcctgtttctttagtagaagcagcaactaggggcggagctacggtgagcaaggggcaggcacacggttccaaagattattttatctatagtaattctatgtttatcaattgtgcatcctccctcagttcagttaagtatactgtagaaattgttacctctctagaagttcgaaatcgttttccttttttttttaaagaagttaccctgtcactcagagcaagagaacacccaaaagatgggaaaggctgggtcgagcacgaatgtcgaggcggtcccaacggctcctcgtaccgtcccgacccgatttaacctaacccaccaccactcgccctccggttcgctcgtcgcctcgcgtctcgtctcctgttcggctcgactccacccgccgcgagagagagagagagagggagggagcaaaccctatctagggttttgcccgcccaccgccctcgccgtcgacgccatggaagccggaggaggcaagcgggccgccccggagggcaccaacggcgccgccaagcgcgcgagaggtgagcctcttcgtggtttccttcttcttcttgttttttttcccttttcttggttgctggctcttccattggaaggatggctggttcctagggtttctccagccggctaccttgttggggggctcggattctcggcggcgctccggcttggttttgagctgggtggtgattggtgaagacgggagacgaagatttggggggtgttgggattggggagcttgtggccgccttaagcctttcatgtttttttttcttgttttgttcgtttggagatgatgacggaaggctcgccactatttttttaaaatttatttttggcaatatttcgcaaagagatctagaaacgcgattggtgacctagtggacctgctaaatatgtgaacggatctagctgctcgtcgaattttcttgagtgagttgaaagagatgtccgatttctcaaggcgttaatttgaaagtgaaactcattaagctctggatactggacattattgtattgtaccatttaccttttttttttctttctgagaaggtaatgctcagtggattttgaaatgattaatgtgtacatgttgtttatatacatgccatgttttagtaaaaatcaacgctattaaccggcggaaataataaatttggtgtaacagcatcggagtcgtctcaagtgggtgtaggaagcaaattgaagccatgcaccaaatttttcaggttctaatctaacttaaaatgaactatcacctgtttacacatgctattctgcactttgctgtggttttgccttaaataattataatttgttattttgctaagaaattgttgttgaggggtaacaaatgggttaagtaagatttttctacaggtttccattgtgtataatggataacatagcagctatatgtaaaactccatttctgatgaacaatcaaatctatctgttacactgtggtaccatatcacctgcagcaatcaagataatagtattaaacgttccatatgggattgcaattgacttgccattatggaattatactacttactaaatgataacattcagtgtagcagcttattttcagtacacgcacagtgtgtttaccttgaatttgaacttggagagatgtttttctttttatattctactattgattgatcatgtgttttagttatcacatcgatataagctactccttctgctacactcctgagttgcaaaagatgttcttattatatacaattgtgaatgaatcatgcagtaaagtgataatgtgttgtcatgttcatataagtaaagtagctataagacaatagggaaataacttctttgacaaactaaaattctattattttttttaaaaaaaatggtgacacactgataggcaaattattctgtgttgctgtatgcctttattaatatgtatgctatatttactgtttaccacagtatatgtttgcttctgtattaatatgttcagtttcatgtgatgctacgagtgcttcttaataattagatagtattcaccat

SEQ ID NO: 11572 - DNA, 1337 bp, Oryza sativa
cctgcagcccgagagtgacatatcaggtgatgttatgaaggttctcaggttgagttaccaacacttgcccatccacttgcaactatgcttcagcttctgcagcttattcccgaagaactggcgttttgatcccaggaggcttacagacatgtggatttcacagggttttgttcagaaggaggatgagtctgacaatgacatgaatgttgaagatgttgcgaagggctactttaatgatcttgtacaaagatcattcttcgagagatctttgttagaccttccaatagagtatgtcatgcatgacttgatcaatgaccttgccaggaatgtttcaaaggacgagtataccagaattgagagtgagaagcaaaaggagatcccaccaaacattcgccatttatctatatctgcacatttgtgggccggtatgaagaaaacagagatgaaaaacctgcgcacgttacttgtttggagcaaatcatggccttgctggaaattgtcccttccaaatgatgtgttcaagaaatccaaatacatccgagtgctagatttgactgttgttgcctggagaggttgccaacatcagtgaaaaatttgaagcatttgcgctatcttgcttttagggttcctgaaaaaccattgcccacagcattggtccaactttatcacctagaggttctagtcacaagaggtcactcttgtcggggaagtgaatgtttccaacttccaacaaacatgaagaagaacctactcaaattgagaaaagcttaccttttcaatgtagggggtgccacaatatctggttttggtggacaaactcttctgcatggcccaggggaattccatgtcaagaaggagagtgggcacagacttggagagttaaaggagatgaacaatatccgaggaagattaagtgttaggtttcttgagaacgtggaacatcagcaacaggctgttgatgcgcacctagattgtaaagagcacgtcaaacacttgcagctagagtggagtgaccttccaaggcctattacttctgagttggattctgatgtgcttgaggcccttcgacctcaccctgatcttgaccggctgaatatcacaggttacaagggactgaggtcacctacttggtttgagaccaattggatgaaagcactgacttctgtaatccttgagaattgcatgggttgggtgcaattgcctcctcttggacagcttcctctactggaggatcttgtactgaggaacatgcatgctgttgggcagataggtgaagaattctatgggaacggtgaaatgaagggctttccaaagttggaagaaatagtatttgatgg

SEQ ID NO: 11573 - DNA, 2452 bp, Oryza sativa
aattgccccctaatccaattctctacaaaatctcccatatttgaatcaagcatcatgactaaaaagctattcatcattctaatttgttaaacccaatctaacctttatatgacatattgccttctaatccaatctccagggtttgatcatattttgtgctcttcagctgtataactccaatctcaaatattgtgaagatgccaaagaactaaagtcaacattattttgggaaactcaacacaattggcactgccactcaatgtttatggccaaatcttggagctgaaagcctgacacccaccttttaacaactccattattgattatatcagtactcaatacctaaatttgttaatttgaacttcttcccttctaacttgatgatcctgatactctagctttactatgcctagtgaaatgttgcacccttcacgatatgacctaaaaaaaggtctgttgttctggtaatgctaggtctagcgtattaccaggaactaccaggatagttagaagctatttcctttgtttcacattacaagaccttttgggttttgaatagatgcttgcatggatctatgtatgtgcttcatatatgtgtccatattcatatggaagtcagtgaatctatacgagggatggagaggctaaaatgtcttataatgtggaatgggaacgaagggaatagcaactagcacggcatcagcacactaaaaaaaattgaacctgccacaccagatcccaatcaaacgaggcttagaccagggaaaatctatgataaaaaggtccatcaaaaggatcaatttgagcatcggattgcagcatttaccttaaacacaaaggaaagctagcttgtagtagaaatcaagtaagtaaattattagtacctaaatgaaggtcatgagtccggcaagagccgggcctggtccttgtgctgcagcgccgcctcgtcctgcagccgctgctgcgcctcctccttccccttggcgaccatgctcatgtgcgcctcgtacttgcgcagcctctcctccatcttcgcctgcacatagcaccaaaaaaagcagtagcgaggtgagcttccccccgggagagaaacgcgcgcggggaggaaagcgacggggggcaggggcaggggcagcgagcgtaccttgtgggaggtctcgaggcggtgcatgacgtagaagccgagcgcgccgccgaggatggtcccggtcatcacccgcacgcacgcccaccgccgcgatcccggtggcgccatctcccaccaaaccttccgccgccgagagaggagagaatacgaagggagatgttgctgccgcagtggcagtggtgcgtggttgggccagatgacccgggccgaaatctgaagttgtcctaatatgtagacaaaaccgaaacgataccgaatcccgatccgtgagttagagcaggtagaatagtagactataagctagctataaacatattttaagaagataaaagaagagagaagagcagtgggctatagatttgtagctagctgcagcacggactccaagatgtaacatgtgtatgacatgtgagaccaggaattataaaagtgtagtgtatgtttataggtacaattggctattaaattgactatagatgatttggagctagtagttgattatactattaaacttgctcttatagtatcttatggtactacgaactcacaaaccgaaatgataccgattcgatttatagtatccaaattttcatagtatgttgattttactatttattttcacagaatcctacgaaatatgatagtatcccgactccacgatccttaggatcttataaaatattgtttacaataagaagaattaaaaaaaataatgtgaataagtatgctcaagtttacataaaaactaattaaatttatcaaaaccaatatgacatgttttaacttttacaacatactagcaaagtgcatgtgcattgcaagggaagaaaatgtgtgatccaaatatctatgcatgacatcatgagaatgaaaacggtcacgataacatttattcggatttttctttcaatttgtagaatttaactatttagtgatgacttcaattcaacactaacaaaaattagaaaatttatttttttatatatagctataaatatggatgtttgaaaacaatatcactttaacagaagaggactcggtactgtctcgttcatccaacttgccctcctcgattgatgggagaaccaggcacctccctaaggccttattcggttccttgggttccaatccccaaggggaacctatccagggagggattgagtgaatccctcccatatcactcaatccctttgggggtttgaatcccttgcatgttcctaatccctctcctaaatccccatgttcattttgactgggaataaacagcttggctacaatcccacaattacgggcccaatctagtga

SEQ ID NO: 11574 - DNA, 1168 bp, Oryza sativa
cagtatggcagtaccagataatggttgaaacaaattgcttaacaccaataattagcatagttctgaagaaactaattgtagctgtggtgattatagcttgtgtattgctatgcacatctaaggacgatgagcataaaacatatctcctatttctatgaaggaatcattctactattgatgtaaattatggaaacagcacagaaggtacgaaacaactcgtggcctacttagcaatccaaccctgcgctgttaagagacacggtgtccaagataatgctatcaggctacagcacataaaattgttaatactgttacatacctagatgaatcaattccttcgggagttgtgaagaactcaaatcgaagagaccattgcacagaaacttttgaagtggaaaatgacattggtccatcaattggaactgaaaagagaaagcttgtctggtgaagatccgcaacaacttcatagtgctcactgtgtacctttgcagagagtccagagaaaaatgagtgaatcattaaaatcaatttgctgattttacagtgtaaatgactaaatgttttttagaccaaaaggcaagcaaagtaaccctgcttcccgtcgaaagcaaacagtgtaagtacataaagacaaaaggtggtctttttggtgaaaaagaagctagcagaatacacaacatttgatattggcatgttactagaatgcactagatttatcaatagcaggtaaaagtctaagactcagaggtgcttatagattcttgatggccatgactaatattttgtgtttgagggcaattagcacatgccctttcctcgacaaataaaagtgttaagcacatccctactgttcgaatggcattgtccatcatgcttattgttccatagttactgtttgctgcaattgctgttcatgcacaggtagtttgtttttccaaaggttaggttattttttcttttggaagctttactactaatgtactccatgtgttttctaaagactatttctacatttcctaggtagagtcatcaccacagaagggcattgcaccttctttagtcgagcaaagatgagtaaacaagttcctaatccctaaagtcccattgtggtctcccttggccagtgattgtactcccgacactccttccccacggtaaaaagaaaaaa

SEQ ID NO: 11575 - DNA, 1934 bp, Oryza sativa
tcaagactgtgaggtatgtctaaaatgaagaattttaatcattcatatttccagaactatcatgcaatactaggaaaaactgaactgaaacacacaaatgaaaaccaattcattttttatgacattaaactagatcagtccttcaaaacaagagatgacttacatgtttttgtttgccccgaagcaattataactttagggattagcgagggtgccgaacaatccagaaacaaatgttcacctacgtatgtaatgacaatataaaagaagattatcaggaagaaataaaaacagcaattaactgtttccagagatgataaaagaaacttaaagggatgcatagagaattgaacaagcatggcgcaaacttatgaaagggacaaaactacaatttcttaacttagtttctaaaaaccccatgcataatgttctactactatccaatgaatagaacataaacagaaatgctagctacaacaaatttgtaggttaattaaactgacagcaaatgcaaaatggcaaatggatataaaatcaacagaggtgaagtacatatgatagatgaaacgtagtagcactggtacagtggcactgaagtcaaagatggttacaatcatgtttgaagtcgattgcaagagcgtacctctcctttgcttagaccctggtaagggctttgaaacagagaaccactggctatccaacttctcaatccctttgatctcgaacgagagcccatccaccaagagcgagggggcatcctcaccggtctccgccgacgccgcgtcatccttcaacccagctggggtgcagatctctatagtcgcggtgaccgaatcaccgggtctgtacacctccctgtccgtctggagcttcaatctcggggagtgccgctgcctggccgccgcggcatcggccttcctctcctcgaaccacccgacgcttctcaggaaggagagcccttgcgggatcgggagcttcagtgacatttcatcaacaggttgcctccgattcaacgtatatccccaccgccgcatcaacctcaaaacgagaacaacaacccaatccaattatccaaatcccccaagctaacaaaccgaacggattcccaatctgtatacaccacgcacgcagggcggctcatcaatcgaagtggcgcgtacgagcgagcgctacaagaagagaatggggattaccttcgattcgattcgaagtgggaggtcgtcgcctctctctccgagcctgctcgccggccggccgtgcgcgcgaggggccggggagaggctcgggcggccgcggcgaggaggaggcggggccgcgggggctcgtcggcggccgcgcgcgagacgcaccgcagatcggatcggaaacagaagaggggagagagaagagtaatggagtcgagagatgcgggaaagagaaggacgacatttggtcaccggccgttttcctaaagttcgtttttgtttgaaaaaaaaaaagagaattctaacattgtttaaaccattgaaatcgatgtgaattactccatccgtttcacaatgaatattttccacattaatattgatgttaataaatctagccatatatatctatctagattcgttaacatcaatatgaatgtgggaaatgttagaatgatttgcatcgtgaaatggaggaagtagaaggcaaaatgattggacattaggttagcaataatataatgcttagtgtggccaattttaaaacaaagattgatgatttgctacattgaagattgttcgtttgattatgataccacttcacgatcatggcatatgggactatctgatcatgaggcaaaatggaaaatagttgaaaactattttgtggagtggcaaaatagcaatctccatgtctttggtaaggtttggctacaaaatggtaagacaattacacaattgcaatcaagagat

SEQ ID NO: 11576 - DNA, 3151 bp, Oryza sativa
  unsure (1)..(3151): unsure at all n locations
aggtcctggtgccccggctgggcgcaacaggggcatcctcgggccttccccgcaggcccacaccgcctttgctccactccaggcgtcctccagcggctccaacacctccaccagcacntgggatgcagccggcctcatcgctgccctgcagaacatgcaactgcagggcaactcgccctaggtcgttgactccggcgcctctacgcacatgacgtcctcggatggtatgcttacccaacgccttcccccctccatctcctcaataacagtaggtaatggcactagtattcatgttacgtctagaggtcattccatccttcctacacctaccacaaatttcgctcttaataatattcttgtcgcaccatccatagtccgcaacctgttatccgttcaccaattcactcgcgacaatagttgttcctttgaatttgacgcccatggtttttctgttaaggatctcaggatgggacgcgtgattctccgctgtaactgcgacggggacctatacaccatgcctccctccacacctggcgccccacctcatgctctcctggctgcttcgtcgactctgtggcatcaacgtctcggtcatccagcccccgccgcattagagcgtcttaataaacttcatgctgtttcctgtcataaagtagaccactcgctatgtcactcatgtcagataggcaagcatacgcgtctacccttcagttcttcgcattccataactcatgcaccctttgaacttgttcactgtgatgtatggacttcccccatcaatagtctgtctggtttttcctattacctggtctgtttggattcactcactactgttgggtttttccgctccgaaaaaaatctgatgcccaccaacacttagttgagcttgctgcctttgccaaaacacaattcagcctccccgtcaaaagttttcaggctaataacggcactgaattcgtaaacaccgccaccatcaaattcctcgctgctcaaggtactcaccttcgcctctcctgcccctacacatcaccccaaaatggcaaggctgaacgcatcatccgcacactcaacaattccattcgtaccaagctcctccatgcctccctgccacccacatattgggccgaggggctcatgaccgcctgctacctccataataggcacccatcctcctccattcagcatgaaattccctacactcgtctgcacaaccagccgccaacctatagccatctgcgtgtttttgggtgcctctgttaccccaacatgcaagcaacctccaaacataagctcgcccctcgctccacggcatgcgtcttcctcggatatcccccctcgcacaaaggttaccgctgccttgacctatcgacccgtcgcatcatcatctctcgccacgttacatttgacgaaaccacctttcccttttcagccaccttagccgcctcaccctcctccgcttccctagacttcctcctcgacgacgatatggtttcggtgccttgtcctactgttgttgcaggtgggcttccatcctcgacgcccgtggtcgctccatcccactcggatgttgagcaaccgccctcagatgctgcggcctcacacggatcgccttcttcgacaccgggcaggcgcggtcccgtgcccccgcctggacccagcgtggtccccttcccacgagtctacgtccgccgctcccgtacggcgtctacgtccgagccggcaactgccccagcagcccctgtggctcctgacgccccggcgccacntacggcgcccacaccagcaccggcggcattccccgttccggcaccgccaccgccgccaccgccgcgcgccactcgcaccatgacgaactaccgcagtgccctggccgacgccaactggcgtgccgcgatgatggatgagtaccaggccctcgtcgacaacaacacctggcagctcgttccgcggccccctggagccaacgtcgtgacggggaagtggatcttccggcacaagtttcatgccgatgggtccctcgcccgccacaaggctcgctgggttgtccgcggcttctcccagcgcgagggcgtcgactacgacgagaccttcagcccggttgtcaaaccggccaccattcggtctgtactcaccatcgccgcgtcccgcgcctggcccattcaccagctggacgtgaagaacgcctttcttcacggccacctcgaggagaccgtctactgccagcagccgccaggattcatcgaccctggcgccccagagcatgtctgccgactgcagaagtccttgtatggactgaagcaggctccgcgggcctggtaccagcgcttcgccaccttcgtccggaagctcggcttcgtcgcctccacctccgacacgtcccttttcattttacgagaggggacgagtctcgcctacctactgctgtacgtcgacgacatcgttctcaccgcctcgtcctcggccctcctacagcgcatcatgactcggctgagctccgagttcgccatgacagaccttggcgctcttcaccacttcctcggcatcgctgtcacgcgctcctccgatggtctcttcctctcccagcgacagtacgccgtcgagcttctccagcgcgcgggcatggctgagtgtcatccgacatcgacacctgttgacactcacgccaagctatccgcgaccgacggggatctactgtcagaaaaggatgcatctgagtacaggagcttggcgggagctctccagtacctgacgctgactcgtcctgatctggcatacgctgttcagcaagtgtgcctcttcatgcacgccccacgcgagcctcaccgtgcgctcatcaagcgcatcctacgcttcgtccaggggactctctcctcgggtcttcacattggcaccgggtctgtcgacaaactgactgcctactctgatgctgactgggcaggatgcccagactctcgacgatccacctctggcttctgcgtctatctcggcgacactctggtttcctggtcttccaagcgccagaccacggtgtcccgctccagcgccgaggcagagtatcgggctgtggctcacgttgtggctgagtgctgctggcttcgacagttactccaggagctccacatccagctgccctccgccaccgttgtcttct

SEQ ID NO: 11577 - DNA, 554 bp, Oryza sativa
aacacttctgcttaaacacctggtcaaattttacaaagggcaggatctgccatgggttcaactgatctggaattcttattatgactccaaagtgccccatttagtttggaataaagtctctttttggtggagagatatagtggctctgtctgatatcttcaggggaatttcaaaacgcttcatcaggacaggatcctcagctcttttctgggatgatttttggaatgacaagattaggtgcactgcattcccagctttgtgtatggttgctttggatagatccctctctgttaatcaaatgtgctctattcctcttgaggattgctttttgctgcctctgaacacccaagcctatggagaattcatcattctagaggaggaattgtcctctctctctttgcagaatgacaagggtgatgattggtctttcatctggaactctgacaagtacacaaccaagaggttttataagctcactttctcaaatgtgcaagtgccaagaccttttgtttggatctggaaaacaagatgtgtaatgaagatacaagtttttg

SEQ ID NO: 11578 - DNA, 639 bp, Oryza sativa
ccgagtattgtgtgcgtatgggatgcggagtcgaatttggaaggagtccaaatttgatatgagtggttatgtaaagtttatttcttgtacgagagggtttcctaaggtgtttaggacttctagtatgagtttggttcgtgcctttagactgcctacctcgggtataaatagagggggagcgtgagtcttcccggtatcgcttttgagagcaattgagttgatagttgagttagggtttcaagtttagtcgaaatttttgtaaggagcactatttgtgcactttgtaacaaagagagaatcaataaagtcatcatccactttaatagttcttcgatttgtgtttcaccgggtttcggtggtctaactggcgacacactagcggtcagactggcggcatcacagctgtcagaccggcgggtgaccttcggtcagacaagcgtcggcaacaagcaacaggagctgacctctgcggtcagaccggagatctaatcttggtcagaccgacggcaacctggcggtcagaccggcaggacaacttctgtcagaccgcgatccgtcgaattcgagggtacttttatttccgctaaaagtttccgggctttgggtataccaactattcatccctctctgggtggctta

SEQ ID NO: 11579 - DNA, 2414 bp, Oryza sativa
tgtcatgcgtgttggaactcatgaagcttaaggctagtaatggctggtcggacaagagttttacagaactccttgagttgttaaaggatctgttgccagaggggaacaatttacctcagacgacatatgaagcgaagcaagtattatgtccgttgggcctggaggtcagaagaattcatgcatgtccgaacgactgcattttgtattacaaggaatacactgacttggatgtctgccctatctgtggggcatcaagatacaaacgagcaaagagtgaaggtgaaggaagtaagtcaaagaggggaggcccagcaaaggtggtgtggtatctcccaattgcggagcgcatgaagagaatgtttgcgaacaaggaacaagctaagcttgtgcgctggcatgccgaagaacggaaagtcgatactatgctgaggcacctagcagattcagtccagtggaggacaatcgataggatttaccaggaattctcaaatgacccaagaaacatgcgtttcgcaatgtgtacggacggcattaatccttttggtgatttgagcagtcgtcacagtacatggccagttctgcttgttaactataacctttctccctggttgtgtttcaaaagaaagtacattatgcttgccatgctcattcaaggaccgagacaacctggcaacgatatcgatgtgttccttgaaccgataatcgatgacttcgaaaggctatggaatgagggcacacgaacataggacgcatatgcacaagagtatttcaacctccatgcgatgctgttttgtaccatcaacgattatccggcccttggcaacctttctggccaaactgtgaaagggaaatgggcgtgttcggagtgtatggaggaaacaagaagcaaatggttgaagcattcacacaagacggtctacatgggttacaggagatttctcccaaggtatcacccgtataggaatatgagaaagaatttcagtggacacagagatacagccggacccccgacagagctaacagggacagaggtgcacaacttagtgatgggaataaccaacgagtttggaaaaaagaggaaagttggaaagcgaaaagagaagagcacatcgaaggaaaaaacagaggagcatgtggaaaaacaaaagacaaaagagaggagcatgtggaaaaagaagtcaatattttggagactaccatactggaaggatcttgaagttcgccactgcatagatttaatgcatgtcgagaagaatgtatgcgagagtttaatgggattactgcttaacccaggtactacaaaggatggtctcaacgcccgacgagatctggaagatatgggtgttcggtcggagctacatcccataaccacggaatccggcagggtttaccttcctccagcctgctacactctctcaaaagaagagaagatcgatttgctaatatgtttgagtggtataaaggttccatctggttactcatcaagaatcagtaggctcgtttcactgcaagatcttaagttggttggaatgaagtcgcatgattgccacgttcttatcacacagctgttgcccgttgcaataaggaatattttgcctcctaaggtgcgacacacgatccagcggttgtgttccttcttccatgcaatcggccagaagatcattgatcccgagggactagatgaactacaggcagaacttgtgagaaccctatgtcatcttgagatgtactttcctccaactttctttgacataatggaacatcttccggtgcaccttgtgaggcaaacaaagtgctgtggtccagcattcatgacgcagatgtatccttgcgaaaggtacctagggatccttaagggttatgtacggaaccgttcacaccccgaggggagtatcatcgagagttacaccaccgaagaggccatcgaattttgtgtggactacatgtcagaaacatcttcaattggattaccacgatctcatcacgaagggaggcttgacggtgttggtactgttggaagaaagactattaggttggatcggaaggtgtacgataaagctcattttacggtactacagcatatgactgaggtggtgccgtacgttgacgaacaccttgcagttatccgacaagagaacccaggccgatcagagagttgggtcaggaataagcacatgtcttctttcaacgagtggctgaagaaccgaattgccaggttgcagaacttgtctagtgaaacacttcagtggttgtcacagggtcctgaatggagtgccaccacctggcaaagatatgacataaatggatacacctttcacacggtaaagcaagacagcaaatgcacagtgcagaacagtgggttacgcatcgaggctgctagtgacggtggtcgtcgtgatcaatactatggtaaa

SEQ ID NO: 11580 - DNA, 2651 bp, Oryza sativa
acggaaagtctccaaggaagagagggacgctcgtttgaaggccgaacttaaggttgaggtcattcaagaactagaagctagcatgaatgcaagggtggaagaaagggttaacaaggtgctcgccgacatgaatataccccgagtcacaacacctgctgtgcaaccaactcctcgtgtacaacacgacgcgagtccgtcacagcataggagtagttgtgcatccacagaggtgccggcccctggtctcccgatcgcaccactagctgcagtggaccacatcgaggtaattgttgttatccgatccatatctaataaaagacatttacacattccaatattaaattcaaactttcaccttatgcagggcgcagcacagtgtgtcctactagcgagagtccacccaactttcgctcctgaagtcgctgagggcatggctttcaacccctcggttacagacaaggtccacggcgcagacctgctagctgggtatgccaaggtgtccatcgatacagtaaaggacacctggtcaggctatccgctgcccgtgcccccaaatgatgaaatcatgactttgggcgatgcgcgcaagacgttcatacaatggcccaaagaagacatagttgtgaagatgactcctcgtccaagtcgaccgatggagcttacacctcccaagtctaagctatcaattgaggctccccgtggaccggcattgtcagtacctcattctcccggtggagctgatatggacttggcagatatagctcaaagcttggctccaataaagaccacaagaaaggccgatagctccccaccacttgtcaaggaccagaagcgtgaacgcggcaaggggaaggtcggggagttggcgccggagccaaaaaggggcaaggctgcgacgtcgatgccagtgagcaaatcggggaaggtcgtgagggcgccagcccaatttgagctaggcatgccattggtggaggacaatgtgttagctgtgatgggtattgcttgccgagagctacataagcaatacatggagctaagcaatgccaagcggaaaatgagggagtcatccatagttggacatcacgaccaccagccgttcctatcgtcgcctgcctatataactataggctttgatgacctcttcgaccttttcaggatccggaagttggacactggtcttctaaaatgctactccttgtaagtgcataccttctatacttgtgatatgactggactatatctcctaattaaattagttctaatacgtaaatattttaaggttgtgttggatcgagagtcgtcgccatggtaatcaggttgggttccttgatccatccatggtgaatgaggttaatttacgacagagcttcactgaggtggttgactatgtcaaccggtgtttatgggcccatcaagacaaggagtacatcatgtgcgcacacaaccaagagtaagaggacaatacccttcgtgtatattgtttttgaagttaaggttcttagtactaacgctacataaccactgcgcaggcgacattggattctcctagtcatcgtacctaagtggagtagggttacctaccttaactccaataagtccaaagattatgatttcagtgaaatcaccaaggccttaaatatggcttggggcccatatgtggaaaagggtggtaggcacaaggagggcaagaacgaactttatcatgacaccaagtttgcatgcgcacaacagatcggagaccaatgtggtttccatgtgtgccacaacatgtcaacacttctaagagaggtgaaagatttcgaccctgaggttgttgctaatggcgaataagctcatttcaatatctacattgctattcaaaacgtgctaattaacctcttatttattaaacagaaaggtagagctggcttcaagatctcacctatcaacccccctgctatcagaggcgaagtgtgcgcctttattcttgcagaaataatgaacaagaaaggacgttttcatgccaaatagactaatgaacttggctagataatttattgtgatgtaaaaaagatgtttttataatttctggcgatgtaaaaaattatgtttttatagagtgcaatgtaatttactttcatatgtgcaatatttatggtactttactaaattgtcatcacatttgatcaactacgatttatgttgtactattcatctgttttctccttttttttcccttattgataggttgtggaggttcacaacgaacagaatacaagaaattttggtaatcatttgaggactttcatggggtatgaattgtgtgctataataaattaaattgttgcatatgtgatgttgtaaattgttgctttgtgatggatctgtgatatgtgatgcatctgtgatgttgggcagttggggaatatgtgatatggaggggggggtgactggcacctgtgatgtttctgtttttcagagggcatggctagcaattcctgaggctagccaatatttagcatttattttttttctggaattaactcatcagtgacggttcggaagaaacatccgtcacaggtaacctcacctgtgacggactcgcaaacgtcggaccctaacagctggccctcgtgtgccggccgcccaggggccgtcacaggtgggtcacc

SEQ ID NO: 11581 - DNA, 715 bp, Oryza sativa
catcctgtgtttacttgggtaagcgcgtagtaggtactgataagttccggaggaagctaaccgatatgttgaaaaaattggatgaggttaaaacaactgcggataccttgttcaaattggttagttttgatagtgctactgcaaagctgctcccagtcacacaggcacgtgtaacgtctcctttgaaggaagagaaccacatatatggtagaaaagatgatcttgataggctgagagatttgttgcttatgcaaagtgatagtagtgcacctggacctagtaactcatgtgttcctgttatatccatcattggtgttggtgggattgggaagacaagcctagcacaattagctttcagagatgaaaggatacgtgcgagctttggtctcaggatctgggtttgtgtatccgatatttatgatgagataacattggcaagggatattttagaatctgtaacaggtgaaaattatcgcagtgttactaaattggatgaattgaagaatgttcttcaagaaaagataagtcaaaagaacttttttcttgtattggatgatgtatggtatgatgagaacaggacaaattgggagaatgaattagttgggacggagttttatcaacattggatactggactcggaggatccaaaattctggtgacgactcgaaccaacaaagccagtgaactcctacgtgctggagccgggctgcaggaa

SEQ ID NO: 11582 - DNA, 707 bp, Oryza sativa
cgggtgaggtaacctctggttcccctaacattggtcactgtcgtgtgtatctattggtcgccaagtagcttggcgatcccaaagtcggtgatcttggggttgttcttgtcatccaacagtatgttgtcgggcttgatgtcacagtggatgataggagaggtgcacccttcgtgcaggtactcaatccccttggcaatgccaagtgcggcctcggtgcgccagctccatggtggacgtggagtctggaagaggatgcttcggagggaaccacccggcatgaactcgaataccagcatccgctgctcccgctccttgcagtatccaaccatgcggactaggttccggtggtggatccgcccgatggactgcacctcgttcaggaattccctctcgctgtactcgttggaggtgatgagcttcttcaccgcgatgtcaggtggttgcagtgacttggccatgccatggtagacctcgccgaagcctcccccttcccagcgacctttggaacccattggtggctcggtggagctcctttctggtgaaaaccctcacagtgtcatggttggtgatgttaattcttctgatgcgccagtgcaccagaaggatggtcgccgcggccgataggagaagcgccgagcatgcgaggatatgtacggcagcggcggcgctcttctccgagggctgctcgtccggaccttgatcagcgc

SEQ ID NO: 11583 - DNA, 3421 bp, Oryza sativa
ggtactactaggacagcattagtccaataatttaaggcccacttagtccaataatgtagtattatcgtttgtttttttcgtccgactaggaaagcattagtgcactaatgcacataaaaggttttatctaatgatattagacaaaatatttgattggaatgatagctttattagcattggcaccaacattcttttataaccctgaaagaaacctttttactaaccttttttacaaattaaaacaaaatggacctgccaacaacaggacacacattggaagttcagttcgaagagtcacaatctatctgaagaaagagaaagggaagaacaagtttcagcagtgaatcttcactcctgtttcctacttctaacttgaacttcacttcccactatgccggatctgcacaatactacaccatctgcccaccattcatccttgcaaactacattcaccatctccatgatgaatccatccaaagaaaaatgcagaaaaagggcatatgttcttgatcctaccaactgacaaagattcagaagcttaatctgttaaaaaacacacacacagattgcacataccatcattcagcgggtgccccagggactccttgatgtaggtcgccgagcccatcctccactcctcatacccgccattgccaagccttatgcagccactcaagctcactccagaaagcagcagcagaagcaagaacagcagcactgagctcatcacacacacacacgccctggctctactctctgatgatcaatgcctctcttggagggaagaaaaatgtctgtgatggattggaggagagttcttggtgctgttctttttggtattcttgtgttcttggtctgaactcactgtgaactgtgaagtctgaaatgttgcagtgttttggcctgtggtgggagactggaatcgtgggtagtcaaagatgagaggagcacaggcacaacacagggggagagtggtggaaggggtccttcctttctgctctcgctttattgggatttgcagcagctgcagacgcggcggcttcccttttaaggacgagtagcgaagcaattagcaaaggttgccttcttttgctattgcaccctcggcaacttgtgattttgcaaaagcagtagcacctctcgctgatccgtgtttctgcaagctccaagatccccagcttgcagtcagagcgattgtgagacttgagagttctgcttatcttgtcacctcaccaaaacgaaggttggtttttaccctgtcttttgacattatcgatattttgatagtaatatttacttgttgctgtaggaaaccaaacatagccaaaatactattcaaaatgccggcattttggtaacggaagttttagcttcaaacctagacggcaaaaatcactactcagaacttgagagtgatttttggttggaagaaaaaagaactgtggtgagtgagagtgactcgagtgtgtgaccggatgaccggagagagcaactgttttttaccatcgagatgacacggtatagagaatatactctataatattgagtttatcatagtttaatgatttataattggcattaatactccctccgtactcgtaaatgaagtcattttagacagcagcacggtctccaaaacacaactttgagttcttgtttccataaaaatatttattgaaaagttatatatatatatatatatatatatatatatatatatatatatatatatatatatatatatatatatatatatattcttttatgaaagtatttttcaagacaaatctattcatataattttacattttcaaactcaacaacttgagagttattcatcacttatattctcaagatttaacttaaacattgtactcaacgactttctttactaatatgaagggagtatatcattaggttggccttacatgtaagattaactattgatttatcctattaaaagtttttaaaaaaaattatgaatttttttagcctctatacacaatgtgaaagtttgtgtataagtttaaagatttttgtatttcattttttataaaatattataatttatccatttatgctatataaaatattttgtctttgtttttaatataaatcatatttcatatcctacccaacataattttatgctattatattttacgtaagcaatttctctatcagttatcacataaaattatttcttttaaaaaaataaaaatgccccaataacttgaaaatctatatgcaaactttcatattgtgtaaggatgctatatagacaattttatatcttatttaaatattgatgaaaaacacgaggcctgagagatctgcttaattccagtgcaggtccaaaaatcgtcttcgggtatgctagcgtaccagttgatttgatcctgtaatcaacaagaaataaagacaactataaattaaacctataaattaatgctaacttcgatgtctttaagggtattctgcgtatttttcataaaaatgatctagccgaatggcatattggagaagaattaataaactcatcggcatattgcagaaataaacaacatcaatagtatattgtcgaactggaacaaactctgtgacatataatacattctattggatgtaaaataaatttatctaaaatactttctttgtccaaacaacgaattttttttgagcttaaagagggaaactttattaatcacggagaaaaggattacattcctggtctattaggtctatgattcctgcaggagcacacaacaacgaatttggataggtttttattcatatttgttatatttggatatattacattcaattctaaatttaatttttatgggatagaggaaggagtatagcacatcaacagtttcgattgatctacattcgtgctaggccttttcaggcctacgggctacggactcggggttgggggcagcatgagcatgagcatgagccagtaacagtgattgtgaactgagcagcgcagttacacttacaccaggattagctgcgatcttgatccgagctttagggaatgtttagttcccaaacgaaatttttctcgctgtcacgtagctgcaatttttcacgcggtttggacacatgtatggagtattaaatatagaaaaaaaccaattacacagttcgccaggaaattacgagacgaattttttaagtctaatcgtgtcatgatttgacaatgtggtgctacagtaaatatttgctaataacggattaattaggcttaataaattcgtctcgcacctagcggaatctgtaatttgctttgttattagactacgtttaatactttaaatgtgtgtgagtgtgttcatatatctgatatatgcgggggcaattttttttttggactattaaacaggcccttagctcgtagtactagtagctctag

SEQ ID NO: 11584 - DNA, 4355 bp, Oryza sativa
atgccaaatcagccctaaaaattatctcaagaaaaaacagcacccaatctctggctacacaaccttgaagaaatgggcataccttgatgcatctgcatctctagagttgtcaatgagctctgctattgctccaaagacccagccagcatgtgtctgactgagtgttcgcagataactaggatccgtgctgacaaaattttttgcaagagtggtggttctctttttcactattggatctaaaattctagggccatcttcaacagactcacatggtgatgattctggaactgatttgtgcagctctgtgacacgcgaggcattcatctccttaggatttgggccactatcacaaatctcctctctcaaatatgactttggattcatcgagccagattggaaatcacttctgtatgacctttttaaagcatctgtcatagcaatattcatgtgtcattctggtggcataatagacaagtgaataaagttaaataccacaaagaaacgaatcagcaaatagctcatagctgactacacgcatattatggtgtatatctttgatgttaactatagagagagcttcctccaacaccatggacaagtgagaatacaaatgaagtaataaaaaaaaagaagggactccaattgcaactcttggggattaatagaccaatattgatgaaacaaagattactggaatgtattgccaattgttaaatttcaagtttttttttatataaaattagcatagggtcagccaaaataaaaggagaagtaaaccatccaagcatagcattcctgttcaacaatcagcataggaaaactctcaccagatactccagccatcggtttgcagtctccaggatctttttgctcatacatgaccaccgcatgtgagaagttagggcgttcatgagattcatgagattgaggagggaaaatatgtaaggcaaaggagctgaatctaactacagcaaccttcaaaaaagcaccgaaaaagaacaaggaccccacattacaggcaagaaaagaacagagaacattgctaatgatgttaataataaaatacaaaatggcaagtagagaacagaacaatgctaatagtgctaataataaaatacaacatgcctactgacttgcaggggaacaaaaccctgacaaaagttgattaattggaagataaaaggtactacagtgcatggcctcccccctatcagcctatatgtccctgttatttgtcccatgtccgacacctaccccacctagtgcgggttctcagtaagaagtacgatagtatccaaatggtcaatcctttgccccattttacttgaacaaataagtaacaaaaaaagataaaatatcttgtatatatttttttagagcacctatcttgtatatttttattagcaattatgacatgcaatagaaacaataattaccctctgattgtcccagaggaaaacatgaactttccccattcaatattctgacgatcatcttcaggttcaggaagcagtgaaaatttcaggaaatcacactgctggtacaccttagttggcacaaacctaacaattgaccaaaccgagggcctgtaaatgtgaaaagcacagacataagatacctccatgaaattaagaaacaaatcaccccaccccccacaacaacacacccaaaaaaaagtcatggtttttttaccgacatgttgattaaatgtttgtagatttgagtaaattaacagtatagctgcagcaattcactttagtagtatatatttttacaaaagctctaccactattttgatgatagcatatgagattgggtagttgtagcatggcatttaacagggggtatgtatggttgaaatcattgctggtgactatttattttgactgagagcaatggagggctcagggtctctgacaagtactgtgaaacagcgggagcagtcagatgatgctagtatgaaaacatgaacacaccagcattgaactttataacagaagaggaaaacccactaatacacactgtagattgtagatttaaccaatcgatgacagtatgcgatagagaacatcaacaatatttatctgacaatagttttggccaatggatgatgatgtaaaacttgtaaagtattcacagatcaggaaaagaaaaagagatcaacttacactttaactggaatatcacagactttggtgcggcatatgttcttagaatctttttgtaataatacatagttcaagccaccacctaccacaaaaaaatatatccttcaggcaaaaattcacacagtatgtattctaccaaaaaggataattctaacaacaatataaaagaagcaagcatcattcataattgatgtgaataaatgttaacatattggcattactaccatttttaagttataaaaaaaggctggacaggtttgccacttcatcacatgttaaagtgaggtactaggaccctatccacatctatcaacactgttgatcagttaaaagtacaaaactagagctgttaatataaacttaggagtataggtgatagagtttccacagattttgcaatatgtgaagtttcaggggtacaagtggacttggtgcagtttcctcttaattttgcagtggaacctggtctacagaaaggatatggccaattggccatcctttatggcaacgcatctcatataatcataccttgattttcatgtggcggctcattcaaatcaagtgtttcatccgccatctccttctcttcaccccctatgaacagcaacaaccatcaaatgataactatattttctaaaagcaaaagatcatcatgcatgtaaactgaaactgaaaccaagcatgagtattaactaagcaggtcaattgtcattctggagtaacatatgaccattaaacaagccagtagatccagaaatgtggtatagtagactcacagtatcgtacatcattaattgttcaaactagaggaagcaaacttatcaaatcccaagttacatgactattcatctataagttattaaataatgccaaaagaaaaaaaaatcagctgggcaaacaggccaatccgaccaaaactcatcacaaaggtcaaacacgacaagaatttgctggtgaataatatatcccagaatgctaaatacatgccagataacatgcttaaaactatccagatgaatcgaactaagcaatgctacaaattataaaaacatcagattcagccctacataactacataagtcaggtacaagcaagcagcaacgaggctcaactctccagtatattaaaatgttaaatgcagctccaaggcttcaatgaaggccatgactcatcaaatgccctccttacagcctcgcataactcaacatattaatgtgattccactatagaagaaagaaagcaacaaaaagtacttgagatcacggtccaaagtggtgatttatgtcacttaacacctccaatcataaatatttggcatttaggacaagatttgattaaacttttaaaacattcaccattagaataagcttatgatgctatgatagaacttttcaaggcaaatctacacaaaactaagcatttgagaagttactcatggtcaaagtttcaaaagtttaaccaaatcttgtccgaaacattaagcatttattgcaggagtgaatactttggttacacaccgagctcggtaaaagacaccaccttcaacccccacaaaaatcccaaaagactccgtcttctataaagaccatgagcacccaaaaaaaaaatctcagaaaacaagttcttaatgcgcatcaaaggcatcaataggattgcaaagtaaattaccaaaaaaaacagagagagaaataaaactgaaagcggagagagaatggaccacctccacacatttctaaccaagagaaaattttgggcacccgaatctcccgatcacgcaccaaccactacgcgagcaaccgcaaagcacgtcacgaacaccaccactacccacttcacctcaaaacccaaacgtcaaaggccacgcacagtaacttttacccccaaaaaaaagaacaggagaaaaaaatcagagcggtgaggggtttgaactagacacatttttctcaagggagaaaatgaaaaaaaaaatcgagcctccgatcgcgtaccaaaccactgcacgcaagcgagtagtgaaaccaccaccaaaaaccccacttcgcctcaaaaccccaaacccccccaagccccggttctcgcaaaaaacaaccaccacgagcactccggcgccggccgcggagcgcatgcacacacgcacacacgaaccaccggaatccacggcggtggtagcgaaccaacccccccacc

SEQ ID NO: 11585 - DNA, 2246 bp, Oryza sativa
agagaggagagcagtgggctactacagcacgaacttcaaaacataatgtatatataacaagtgagatcatatattaatattaatagtatagtaaacaactattatatgaattgactattatattggttataaatgaattgaaactagtagtgggttatactactcctccatcccatattagttgttgttccaggtaatttagcatcgattaaggtttgagaaaaaaagactatagtatctctaattaaatattgtatggttggatataggagggtggttaggggtagaaaagagataaatttgaattagaagtgattgatgggacaaatactatttcattgtgataactattttaggataaagtttaaatgctgaagagacaagtaatttgggacagaggggtattaaacttgctcttatactccagtaaggctgccacagttttttgttggtcacaattaagataaagttagctaagcgtttaataagtctaacatgtgagctaagatgctaagaaaatactatggcaatagtaactgagacaataaatccaatatataactaatgaggaataagtaaggtatagcgtaatgtacgtgataagttgggattttcaacgaacctgctctcgctatgcacgatccgtgctaacccagacagagatggaatagccgagtagtagccagacaattcaacatcctctcacgcgttcctggaacgctagttgtttatatatatcgagcatagaatatgtataatcactttctagtgatactaatactactagtatcataccctatattttattgtgaatcacacgaataaatgtatgttaactatataaaaattatataaagaatatgaagatgatgatttgatatacttgtataggttgaactctataatgaaatgttaatgatgtgtgttatgtttgcacgatatttaagggcatgttcggctgcccgttaacgcggctgggctgtagcagcttaaacaatgctactattgatgattcagttgttgcagacgtgagatgcaacgctgcggctgcacagcaatggctgccaaacacagtcttgggtgataatcaatctttgtgataatcaattaagatgttttaaaatagtaatactattgggtgatgatgtacatctttgtgataatcaatctggaaatataggaagaaccgaaggattggtgcagattccgagaaggcacattagatacagaaaatatcaaaagaatccacaatgcatacgtgatgacctttggctattgtctgcatatttgtagctaagagctcgtttgcgtcaagccaatgtgaaacttaaagtagggccaaagcgaaaaaggatattactataaaaattagagaaggttatatatattgaccctgttttgaaaaagagaatagaaatatcatagtaagtctcaaataaatttcacactaaaaaaagaggagttctttgattccccccctccccccaacaccttgatggcacgagagggcgaggagatcatcgcccagaaacatagtacgtggtcctcccgccaagggagctacaaactaggcttcgcgtgcaaactcacaataatttcattagaaactatgttttttaaattgacgtgagaaactatgctaggaaaatgtctaattttcctatctcaaccgtaaatctaggcataatacctccctcaaatatcaaatcatatcagtttaccttggttttgaaggtggcttcatctgacatggtgtctacatgactacgtggcatcacaattggaaaaaaaagaatttaaccagtaagaaccgaactctaattctttctcccctacctcctctctctagcatcgctcaatgactgtcccaaagctcgctgacctccccactactccctccctcggcaccagccttcactgttgtcggtgatatgggcccgggggtatcaggtttagagggaggaggctgccccccgatgccacgtggccctcccccgaggggagtcaggcccgaggtggggtggcggccactccttccccaaagactagtcggaggaggctgccccccgatgccacgtggccctcccccgaagggagtcaggcccgaggtagggccgcggccactccttcccagagactggatggagaagactaccctccaatgccacgtgtcgggcccgagtagggcagcggccactccctggccgatactaaagggagaaggccgccccaggcgccacgtggct

SEQ ID NO: 11586 - DNA, 3552 bp, Oryza sativa
taggtcaccacatatggtgggttaggtgtccgcctccaggtgcccacttacccacatttatggcgtcctgagcggtcgcgccacgccgcatttaatgcggtgtgcagtgcactcaaccggtctgtgaccggtcgaatgactgatgggacccaagatgtcaggcgcaccatcgcgtgtgtcaggcgatgtgcagcccgacatatcccatcaaataatgatggtgagaggttctcatcctcttatcccagccggagtcggtcctcccgctctggtcaaagcaaggctcccgtttcccggtgtaataagagcccagaagtcttcacccattaaatggtgactgacaggggcaccccccgtgtcaggcgacaagatttgacaggccccatcatcaagacgacgtgtgcttggcttcccaagtcaagagacaagacatgcatttaatgcaaagattataatacttctccaccggagctaggttaggttgttgggcccatgtggtaacccctttaggtataaaaggaggttcaggcctagtggtggaggggggacttccgagcgaactggcgcttgggtctcgcaagcccaagcaccggtgttctacattcaatcaatcatgcacaggagtaaggtattacgcttcatagtggcccgaacctgtataaacctcttttgtctcatcgtcttggaggggcctaaccccctcaagatcacacagctccgctcactaagccctcgaatctcacccgctgcccccagccgaactcacaaaggggggcctcatggttccctggtggaggagttcattctccgacaactgtcatcatccctcaacctaaagcatactaccttcctcaccggcgtagctcgacctctcccttcctctccttttccgacctagacatcgagcttggttaagggagagctatgtgacaaaggaggtgtcatcggctcgagctcacccaaggccaagatctccactgaaagccatgactgcaactcccattcgccacaatgccatgcttgactacgggtggtggagtcctctatgtcccttcattccccattaattcctgtgatccctcctcctatacagcacaaccactgccgagttcaagcccctcgcgcgagtggctacggcaagctcccccttcctcaatgctcagggaggcgatgcattgaggttgtcttgatggagaggtattagtcagggatgagatcgatgcgtgccgtttctcaccatggagatggtatctcttccctctctcgccactgccatcaccgaatagcagctcaagcttttgaactcaccacttgccacttcctcgcttttgtatataccgagttgacgaggtctcaatgaggaatagatgaagaggttaggttaatggttggtgaaactccgacaaggatgcagtggtggtgaagtgttgacggaaaaatcaaacacactggcctgggagatctgcttagctccagttcaggtccaaagattgatgagatgtgggcgtgccagttagtttgatcctgcaactgacaagatatgcaaatagcagataaaatagccgatcggctaaacaaccgatgtagtgattccagccgaaaaccgataatagccgatgccgataccagccaatagcgatagggtttaagcaatcggctatatgtccaatgtagataatgctataaaggcaattggctgatgatgatgtaataaaataataatataatccaatataaaccaatcggcaaataatgatatgataaataagcatcgatccgaatattaaagcacacatcggctggaggtccgatgtcatgaaatccacaagattagattaaacagtgaaacctttgttgtcatcggctaaatccaacttatatgtatatgcaatccttacgagccgatgcaacgtccagataactcaccagctgaaaccccgatgaaacccttattggcaatcaataagcaggctagagattatggttctaagcacgacttagtagatcaaacttaactgatgcaacactaagtatgaaaagaaacacaatatctagacaataaagccgttgactgattttcagggtgatagatgcctaggctaatctaatctagcaatgcgatttagccgatactggcagaaaccctaaagcgagagacagccgatagagctaaattgatatgctaagactagattaacagagacatgataaataggtaggcaaatatatcatccaaaccagagcaatccaagaggtcgaatgtactgatgtagccttgaacgacgccgacgtaaacgatacaattgcctgggccgacggaacattggacttaccccttcgccggagatcgaacaccgatgcagccccgcgtcaggtgccaagtcccgccggacgataaaataaagtaaaaaggtaaaaggtggcgatgcaccgaattgtattgatcgtgaggatagattacatagaccccgggtgtacatatttatacccatgggttgatacaagtccttgtcagacaagaaagaaactttcctaaagataaaagaaaaacatagagtccttatcggacactaaacacactttcctaaagataaaaggaaactaacaaactattcctaattaataggtaacttgccatgccgcattctctttgagctcggtctcttctcgatagcttcctttagtagatcaatttccttaaccgaatatagcaagaatctaacaactgacgacttgataactctcatcggctaatcttagtacttcgaagccgacactgactttaagccgatgatgactttgggcttaccaaatttcactgttaatatgaagataactcaattgtgggttgaaggtgaggacgagagagtggaggatagcctagagatggaggaggatggtcggacagtgttgtgagttacaccaaggcagatgatgccacgagcaccttcccctcggcaccgtgagcctcccgcctcccgcctccctctctaggcgcctattcccagccatcatcgcctaccttctccaccttctagtcccggtctccttgctctccttcgctaacaatggaggtgctaggcttgagtggaagagagaagagaggtggctagtgacatatatataggttccacctttgttttattattttctccttgactgtactgcacgtatacaccacctcgaatgaaaccaccgttaaatatctcggagaggcaaaattaacctttttttgatattttagggagaattcatatattgttttgttgagagagagagagagatatcggacttgggacaaaatatatttcttccaatgttggtgtgattgggaataagttggggcctattaaataagtaagcgcttaatgtcctgatgggctattctcaaccggcccaatcccatcatggctgatctttttaggaaaaagtccactatgactcccttaaaagtaagccgaatctaattcgtacccctcaaccacagaaccggatagaacgactccctaaactattgaaaccagtgcaatttgactccctcagcggttttgg

SEQ ID NO: 11587 - DNA, 3259 bp, Oryza sativa
ctttagcttttaggtgctgaaatgtgtacagtagcctgtcggcaagctaggcgcgacagtttcgatagcatgattgttgtgtgatgatcatcaccagtatgactagaaaacttcttcactgcactagcgtgtgctttactgctactctcttcgtagtttttcgtcactgtgcctgtggtgagtgtgaaacccagtgccatttgcatgttcacccaatgattcattcactccaggcctcgcgaattgattcaagaatactatgccacatgacatgtcctaccacaaagcagtgttttccctgttatttattgtgtactctacatgcacttttttatgtagtttatgcacctctattatgtcaccaaccaaaaaaatggtactccgtactcaattgttttttcttcagatgatgctactccaacactggaccactgatagcacataactgctctgattagccaaacattttttttgtcaatccttcattaactgattaactctataataatttcgtttgccatgctgagcagatcaaacaacaacatccaaaccaaaaccaaaccaaaacagttgtttttcacctgtataatataattataaccataataattacaatcattccaagaatgacacccacatcgtcgacacctactcgacgaactgcttgccttcgaaggtctgcgcgaacatccagtccggcggcgcgacgctgtaggcgacgaccgtgcggcccctcccgccggtgacctcgaacgacagcggctggccgcggaggtcggcgtctcactgtcagttctgggcccccttccttctcctttggagtcacccggggttttaaactttttactttaccggcggcaactttccgttcgccgccacgttttttaataaccaccttcaggaaactggggccgccggggatagtgaaactcatcccccctggcctgtcacagttcaccctgcaccaccaccactcattttgttcattcattagatggaacccgatatgagcaatgtgccgatgtgttctggggcggagctagagtattaaggtggcatgcccaggaacctggtcaaaaaaaaattatagctatacctaacctattttcaccgtgtgcaccattctcaatacaaatttagacatccgcattagcttaaacttaatataagacagagtaaattaaacaagtagcacccccctcaatctcactctagctccgccgcccatggatgtgtttgatgctttgattcacgcagagctgatcagtagttgcagctaaatttttggttctcttattggagttgtagtactatctagagttcatccatcaatggctaatgtcatgaaaacccaaattgcggtagtttgttataaaacttcatactgtttaatacgagtcgttaaaaaaagtgatgctttgactcatgcggaattcagcagattggcagtaagatttaaccttatcttgttagagttgtagtactactacagttctagaaaaatggaatacttggagtgtactcctgcatcagcagttggggcaatgggacacactcatggcaattgtctgaaactgtggaggtgctcataattaacaaagcacaagtcagatttaaaaagggggaagctagcagcagtgattaaagatttaaagctgctctttgctccatgcaaagcagcaggaaacacgcactgtccgcatattctgtgttccatctccaatgatcaaacatcattctgaactttcgcaaaagcagcactggttcagcctagagaaacacactccaaatgcactactcaagaatgatagcgccatgccctttttgcatggtcagaattcacacatcagctagttgcagaatgatacgctacaagtgatcaatgaccagcgagcaaatcatgaacatgatgtgtgcagtactaagagcaagtttaatagtagctcactactaactccaaattatttatagccaatgtaatagctaattcatacaatagttgcttactatactattaatacttggtcccatctgtcatacacatattacgtcttgaagtccgtgttgcagctagctacagatctatagcccactgctcttctctctcttcctttatctctttaaaatatgtttatagctggcttatagcctgctattgtacctgctctaagagcaagtttaatagtatagcccactactagctccaattcatctatagtcaatctaatagcagttgcttactatactattaatatatggtcccacatgtcatacacacactgcgtcttggagtccgtgttgcagctggctacagatctatagcccgctgctcttctctctcatcttttatctcattaaaatatatttatagctggctaatagtctgctattgtacctgctctaatactccctctgatagatgaagttccagaatacgggcaatcaaacttaaaactgcttggactactcaatcgtactaagatagtactctctccgtcctaaaatacagtaatctagtagtattagattagacacaacctagtactacaaatctgaacacaactaattgagtccaatctagtacttttttttgccgcgccggcttttccgaccaaacattgtaccaagaaggagaacattcagaacagtacagggaaaaaaaacaagagtcaaaactctcacaccaataggatcgataaacaacccatactagcagagccgaagctaacacacactagatctaatctagtattagcttgctatattttgagacgaagcaagtagtgaatttgtcctaaaaatgtatatctccatgtcgctctactcgtttcacttcactaacatataactataagtaacaaaaacatgtattggagactatggtgatgtaaaagaaaagtgtgggagaagcttattgttttacctccggaactgcaccggcacaatgtcggccttggccttggcgacgcggaggaacgcggcctccgacatctcgaagtgctccttggggaagttgcaccagccgccgtagtcgtcggagagtccgaggttgggcgcgcagaagtcggtggccgtcaccaccaccgtcgggctgccgcggaggcaccacagcacgtggttcacgcaccgcacctcgtagcagccgccgcagcgctgccgcgcccgaacagcgcgccgctcacgccggcggtgtacctcccgtacctgaagatgtccaggtcgccgtacccacaggctccaccaccttgcatttgcaggt

SEQ ID NO: 11588 - DNA, 1963 bp, Oryza sativa
tgcgtatacttgtaatcttattccacctatctatgaatttcaagtttagactcatactgcaaaagttggaatgactttggtactttggttctagatattccttattcatatctaatacattgatgcaggtacatgttcagtcagatcctgctggccgtttgatagttactggagagcctgagcaactagacaatccttggggtgttactccattcaagaaggtctgtcaagtgttaaccttttgaatttatttgatgtttcattttataattgtattctttggcattgaaaacggtacacttacttcaggttattagtttgccctcccgcattgatcctcatcaaacttcggcagttgtcactctccatggacagctatttgtccgtgcaccattcgagcagtcaaagtaaatggtgctctacaagatgaagcgcaacatgcaagtatgcccttgttccctaaagatgcgctgcaaacttacgtgttctgaagttgtcgtctgtatgaaagtaatgaaaatgaaagcatgttagtgaactggtaaaattttaagatgggcgcagaggatgttagtgaactgtaaatcttgtgtagtcgtttagatagtttcttgtggttgaatgccattgaactgttgtaatctgtttgtttcctgagtcataaatggtagaactcaacattgttgttgctggacagtagtaagtcgcaatgggtttatgatttgcattctttagtgttattttcgagttaaattaagcacatgttttgagactaggacacacctgaactaatccacttcctttcttgcagggttgcttttgtaggtgggggtttatgtgattgacttgggcctgttcatcctgatcttcgttgcaaactagttactttctgcttcattactcctgccatgttgtctattctgtattgattaattctagttaactagatggtctagttatgtatcttgtagttcgttaattgtgatatgtagcttaagttcagctctattagtttagaatgttaatagcctgatgctaaacatgttcatggtttctttcttccttttttttttctcaactaaagaaaaggtgataatttgtagcatgtagcttgtgaggttattcctaatactcagttctcatactactcagaacatgaagacaagatagattcttggatgtaactgttgccttgtgcattgctgttgtatctgtataactgaattgacaactgtgcctgaccatcccttgaaactattactgatggtgtatcaattgtttttagtgttatcttgaaacgagtcttagttctaattggctaactacgtgaagtgaaatatcacagcgttgtcaagtcagttaaaagatgagaacaatgctgttctctcttttcttggggattggccttggtgcttgcagaggattcagaacctcgttgctttactagtactacattgcttataatatatcttcaaaattattgcagaaattttgtttcattattgtgttattcatgccagtgatagcaaatgaaattaccctttcagggctcttcttgtcctatcagtctatcacaatacaagagctactatttaactacaaggtgctgaatgtactagcaaacgacaaacacaaaaccatggtacaaatatatgatgttgaaaacaatcttaagaaattctgcaattgcaacgtagaacacgaggtacacggttcgttattcacccatgatacgctgataggcactacgtactgacagagacagacaccaccagaatcacacacaaactttaaacttgttacgtggagcaactttgtttagccactatgcttacgtacggcttgattagatttagatcacgtgacaatttcgcataattacgagatggatattattttggtcatcctcatggctccccttttggttttgtgacgccgctgctgccgtggttgccaccggttg

SEQ ID NO: 11589 - DNA, 1107 bp, Oryza sativa
ttatgtcagcttaaaagcatttccactaaagatctgtaattgtctccttgcttcatccagatgttttgcacagcatcaggactaagacaaagttatcatggactaacaaaatcaatcaagtagatgtgttgctttaacatctattaattactttcagtaaagcacatttgcagagttccattttggcatttggtccaaaatatcattcacttgctgggcataaaaagacgaaccatgcttggggagatagtcgatcaatagaaacaagatcttgagcaaggtaacttagccgcatttcctcattcaaatgctgcaaaagagaaacaaagctggtgaaatttgaggcaaaaggtgggaataaagtactctcaagtacaagagcagttagtccacttacataaagaacagtggagtaaatgtccattccctccaacgtgcatggtgatagtcgatgcgctaactcaaaaaaatgatcggcttctaaataattgacgagttcaaaatatgtcttcccaacctgcaccgttgaccaaaatgaaaacaatttttaattgtgaaaaggaacaaaattacagggtactgttaatatctgtacagtgaaaaaaatattatggcgtgactttttattattaagttgagtatatagaagtggaaatgaaataccagatgtagagtggctcatgtgcaagtaaacatggttatgctgagtgactggaaattccaacaatcagcattcagggccaatgttcaactacagttcaagttatcattttactaatgtcaattctccagattgacccaactaacatatatacaattaccataatgaattcatcacattatcacgtatcagattaatttaaataaactcgtagtttcttttagaaaacgaaggaaacaaatatgctatacattacgatacagaccctgaatcattactatacagtccctatgcctcatgccctcatgaataacgtagatacactcatacaaaaccagttttccaaaagttagccctaggagcagagtaaccaccccaattaggcattagattgtcaattaggcggcaaactatccatgaaggttctggtgtagctattttagtgt

SEQ ID NO: 11590 - DNA, 660 bp, Oryza sativa
tttggacaaaattggcgtttcctgaagctggaaagggaaaactaagtttcttttaaataagaatacagaagtaatttttattgtttcaatgaaggcaaaagtaatctcactataagctgttataggatggagtagtataaatttgataggctgaatttctttcctcttggcacctatctataattcaatcaaactatttattttgcttattcatctatttttgtaccaatattcaaccaactgctatggtagttttatttctttagttgatgaacattggggatctgaatatcttaccctgttgccttcaagctcagatgtgcatacaaggttctgctgttcttttcaaaacccctaccagttttgcttccgatgagcttcgacgagtattctctgtagttcactttgcacagctggccagttccatacctctaaaatacatgggagatccggaacacataaagcgagaacaaacttgtgttagatcaagtgtgcaaatcacagagttcgtcacctgagaacaggcagctgtgccttgatgtaacatcggcactgcttgattaccttgatgtactataggcattcctttgatagagggacaaaacttttggggtgcttgattagctgttataccccttttcattcggtatgtgtatacgt

SEQ ID NO: 11591 - DNA, 3315 bp, Oryza sativa
actttccttttcgtaatttcttgttgctacttgttctctactctatacttttcatattagaagtcgttcaagttttttcttagtcaaagttatctaggcatgatcaaatttataaaaaaaattagcaatatttataacatcaaattagtttcattagatttaacattgagtatattttgataatatgtttgttttgtattgaaaacgttactaaatatttctacaaacttgtcaaactaaaagaagtttgattaaaaaaagtcaaacgacttatgtagtatgaaacggagggattactattcacaagtcacacctctcgttgctaagaaacaaacgatagtatacaataattgataatgtagtgcttattttatttctagtgcactgtgcgtatcgttgtgttcatgtccactggatgtcaagggtattgtcctttgctgatgtcgactgcatgacgtcacagtttgagagcacgagggtttgaataattgttgttatttttctaaaacttcgcattgatgggcatggacccaaccaatgtaagagaagcattagcaataaaaaaacaaagttagcatatctttcgatagcaattagcacagcagatcaggacaggatgcagtggttggccgttggtacagcctcaaaggacaccaacttggggtgctccaatcaagactagttttcaaccaattactaattaggtaatttaaaataccgttggtttaatttatttatcatatagttttctttgttaatcttccatcttccctaaatgagtagttttaatcaatacttggtagtttcgacaatcattttctgtcccatatatagctcacatgatctcatatccagaaagcaagcaaaacaaaatatcatcaaaacaagaagaagaatggataagaacatgatagtccatttgatgtgcaattgctgaatggtaaggcaacaaggtcatcaattgtaaggaagtaattgctcctttttcgcaaaagaaaagaagaagtagttgctctaaaaatgttcagaaaatcctactttacgattgggagcaacttactttaggatcctatgtatctgactttattatataaaagaagtatctgacttagaaacttgccaaagaaaatatccacttgcaaatttttaaggccaacctttttgtttgttagttgtgaggtgacaactgtactaagaaaacgaagaaacacctcccacccaaaagttcttttttggctacaatagttgcaatgtacatttggactttctgagaggcaggatggagatggatatccaacatcttggagggacatggataatggagtggatgcagaagtatacctcaccaattataattaaaaaaaatctgaagaaatacatgtgctgttcttagcctcttgcaggggatgcatgaatctagcaccacaactgattgaagaattaaagccatgaaaaaggctggtagatgagagatagagagataccatactatgcagacagtggtgcatgatgatgagttcaattctttcagagaagtgtaatgtgggcaccaatttagtaaatgcagagagcaatttcttccaagcaattaaaggaagaaaatgataccaaaggtaggtcactgttattgacaacaacctaggattttttttcttctggtgataattaacagaaagtcaatcatgtggaaaaggaagaattttgttagcttgtagctattgtttgagataaagccaatttctccatccaaaacctttgattactgagtttatatatagcctttagcactgccatttgtctttttcatctgaaaaaagtatatataaatcttgtatcaatactatatagatcttccaaattgagtgatgaatatcaaaagaacaactagatcttgtttaagattacaggacatagaatgcttattatataaccaagcaagattaataacctatgtaagtgtcgttttctgccagcttacttacacacctctgcaaatgtgaaggccaacactcatccataaaaaagaaaaaaacttcacatacaagagtactataaaaaatctagtgttagtctcatgaaggtaattaatttccagctgttcatggtcatagacacctgttgttcacatccctttgcaattagtaaacttaaacaaacacttaatcataccatcctttttccgtgttcagtgaaactctgaaagcgagacaaaaataattggtggcttcaaacaaaccacatttctctgcacatttcttgtgcaagatcgaacaaatggaagatcatggagatccatgttgtgcaacggagacaatattttcaactgccagccatggaagggatgagtacaatttccattctgaaaacaagcttaaaaatggtgatcaagagggagagctccatatgcgaaagaacaattacatatttacatttgagagacctgcagacagatttaagcacccaaatttgatcattccttctataaatatcccaccaataacccttgcatacacatcaccaattattgcaaccatgggtgcaatacttacttaaccatcatcaccattgtgtttatccccttctctctctctctctctctctctctttttcttttttgaagaccatccaaacctctcaaccaaaatgcaaaaattctcacaaagtaaaccaaaaggaaattgaacctctaatcccaaatactaattaagatgcgtacatttcaccaacgaaatccatcctcgatgaaccaagaggcgattggaacaggtcggcagccatgccttggaacacgtcctcctcctccaagaagctcaagaaccctcccggattcagatccatccacaggtcggtgtgatcgggatgatcgtagccaaatccatggccttcctccaccttcacctcgcacttgatcttcttcttcttcttcttcctcatcatgctctcgtcctccgccggcgccggcctcttcttggtggtgaccttctccttcttttcgtcgagcaccgccaccggcgatggcggcggcaacgtcgtttctgccgattcttgctgctgctgctgctgcttgccggtgaggcgctgcacgaggtcccggaagttggcgacgtcggtcttgatgatctctggcgcaatgatgtggatgatccttatcttgggcctctccttgtgcgccgccgccgcctccggcgagcccttcttcgccgccgccgccgatggcggcggcggcagcggcgtcgatgggctcatgctgttgtagctgcactcacccatatctcgccgaagacgaagaagacgatggtagctagctaagctaag

SEQ ID NO: 11592 - DNA, 3908 bp, Oryza sativa
  unsure (1)..(3908): unsure at all n locations
atgcagggattagggatttgggtagccaagtaagaggaggggaatcggcggacgccccgctatggccctcgccagttagcagccgccgccactccagtacacgtcgctgccatagccaaggggataagaaaagagagataaggaaggagagggaggaggaagaagggttggagagaaagagaggatgatatggctgtgggtcccacaagtatttttcctatgtgaacgacaaatgggtcccacatatatatttttaattctaatgtcacgtaagcgccatgtaggacgaagaccaggtcaacatcaccacatcagcgccacgtcagcaaaaccattctccaaaaccgctgagggagtcaaattgcactggtttcaataggtgggggagtcgttttatccggttttctggttgaggggtatgaatcagattcggtctatttttaagggagtcaaagtggactttttccatctttttaagttgctttttccaagcgaaggctagggccgtgtttagttcccctattcccaacttttcatcacatcatatcacatctaaaatttttctacacacataaacttccgactttttttcaaactcccaactttcttcaaactttcaacttttttttcaggaattaaacacaccctaggaggggaacccctatggtctagaattttttttggtttatttcttcaagctccagtaccactatcttcttcacaattgtttcaagtgtgaagaattaattaaagcctgtttcctgtaagtgcaggtacaatagctggctataagccagctgcaaacaaattttaaggagataaatgaggagagagaatagcagcgggctataaattgatgcagtgtacggactccaagacacagtgtgtgtatggcatgtgggaccagttattgatagtgtagtatgtaactattgtatgaatgagctattagattggttatagatgaattggagctggtaattagataagtttaatagnaacgccaaccggccagctccgattcatctatagccaatctaatagtcaattcatataatagttgtttaatatactattaatatatggtcccatctatcatacacaccgcgtcttatagtccgtgctgtagttggctacatatttgtagcccgctgctcttctctcttatcttttatctcactaaaatatgtttatagctggctaatagtctactattatacctgctctaagcgaagttacacgtaagcacatttcagttggtcctctgcatgcattcacaaataggagtatataatatatcgaatcttcagtcgagcttatgaattccggtcctttggtgcattctcggcagagcattgcaaacgagattgtgattaagaaactatgcattccggtcctttggtgcattctcggcagagcattgcaaacgagtaagaaaatatgctgacataaaatatgctgacataaaaatcttatagagagcctataaatctctacaagagatccatgtcaacatattttctacttggaagatattaaatgaagagagagagcaaaactatctactaacctggagatagtctatagagaaaaacgaggcaatgcattagagagctatagataccgatgtagacatactattgaggtgatttactattaatctagtctattgctgagatgtacatgttttatagagagcaacttactttaccattgcgggtgctcttaggcagtaccagtttttattaacggatgcagatggaacggtccagatcagccaggcgcactgttcatcgtactgtagcagaaaacactgtagcacagaatactgttggtgtggtcactgtatcgctagatgactagatctgagccgttgatcacagaaatggatggctgaaattgcatgcagttcttaagttgcagtcatagctataactgcacctgatctgaatcggagttagcattggtcgctggactggacgaccaagggggttcggaatttgtttctctatccgaaccccgcgggtcagaaatttctttccctatttctcctagttattgcagcctgtattgtcaccttcttcgacgacgtttctatgtcccaggtcttttattgagggtttccttttctatttactattataaaaattaaagatgttttttccggtattttagtatgtcatatgtgtttgagtcagtttttaagtttgttcaccttggaaatacatattcgtgtttgagttggattttcagctcgtttacttttagaaatataaaaggagtcgtataataaatctcttttaaaaaactcatactaacttgagatgaaacacataatcctaattgcagctcatcattttctaaaagaaatattcaagcaaattcccacagttaattttaccaaacctaaaccatataacaataataaaattaaaatagaatttacccgttgcaatgcacgggcttttttttctagttcagaaaaaaggtaaaattgcataaaccactccaattaaataaaaaacatgaatattatgaaatggtctgatattaaataattagaaggggtgaggacctagacgggctagcccacctctgttttttcctgtcttctgcggtgctacattatcgccattgttgcaagcatcaacaattccaaactgtttacatttcatttgagactctgggattcagtgattttgcaaacctggacgagtgagggggtcggacttttattctccgaccgattttctttttcttttttttgttgtttttcctatcgagggtatggtttagagatttatcgctttcactcaatcaagctactgatcgaattggatggctcctacaatttttttctctcttttttgcgagagaccagcaagtcgcggcaaaagtgctgagatggagcatggccatcttgagatgaaggttgacactaacagtgatcggtgcctgtcgatctcctccattgccaactatataatactccctccatccctaaatattcgacaccgttgacttttttaaacatatttgatcgttcgtcttattcaaaaacttttatgaaatatgtaaaactatatgtatacataaaaagtatatttaacaataaatcaaatgataggaaaagaattaataattacttaaattaagatgaacgatcaaacatgtttaaaaaagttaatggcgccaaatatttaggaacggagggagtatcttcttcgccattattggaggaaccatcgagaattcgaattatagcctgttttgtaatcaaaagccatacataagaacaattcacatctgtgttcagaaatacgtcgaatcttcagtcgacgagcctttgcattccatcccttagggcctgtttggcacagctccagctccagctccacccctcctggagctggagctcagccaaacagtttcatctccactaaaactgggagtggagctgtctcacaaaatgaactagagttgtgaagttgggtttaggcagctccacaactctactccagacccaactcctgaagttaaatttaggagttggagctgtaccaaacaggcccttaatttgagtcgtggagtctgtatctatcattttggcaatgcaaaactaagatgatctcccagcaaggctgtgccaactactctttttctgtttgggattaaactttagtgatccaaaataacaatctgcagaaccaacaaagcaaaaccagccagtcacacaggcttgcagaaccaacaaaccgtgcttaaaaaagagataaaatatgtatcttaatcagaaaaatgctctaaatggcatataaaaataggctagaagaacaacggcaacttctccctgaaaattgacgaccctatgtgttcgtaatggcccatgtttagcaggccgccctgta

SEQ ID NO: 11593 - DNA, 5160 bp, Oryza sativa
atatttttggacaacgttttttaatgtgatattataaaagtctttgtcgagcgctataatagggaagctaattttctagcaaatatacttaaacatacgtctattttaaagtgttcttgattaggttgatgagcctcataattttttttgctaaacattctagctaacgatgtaactgtattttcatacaataaaacgcgccaagtggctttcctaaggaatatgaaaaagtactaccaaaaataggagtacaacagcaaagcttccaacaccgtccgattctcatagcgaagatcagaagcagcataaagccactatctcccaagcgagatttttctttaccagaagcggttaaaaaaatgcagaaacagtaaaaaaaaagaagggaaaaaaaacaataaaccggagcgggtgaaacaaacccgcttcagttcaaagcgttccccctgttcatttcgacctctctcttcctctcccgtcgtcgtctcccccgtctccggctagggtttcggccgctcgccgccctcgcctccgcctccgcctccgccgccgccgctcgccagggggagcccttctcacctcaccgctcccgtctctctctccccgtcgaccccgacgggctacggctctacaccctccccgcctcggctcgtgtctgttcgcccgcggggacgctgtttccggcgggcggaggcgcggccgcggcgtcgcggctcctcctcggaggcacggtgcgggcgacggccctcctcctctccttccccgaccctctctctctatctcactctctctgccctagccttctacgctgtgtggaggcgtcgtcgcgcgcgcgcgcccggacggcgagcatctggatttgagcctaattgaaggtattttgttcatcctcctatgcgatatgggcttggatttatttgtttctctctaattaacacttccaattcgttcgatttgcttaattttgttgcatgcgtggtgtggtgctaatggcagtttgtttgtttccaaaaataattttggggtacagctgaacccccatggcccagtttaggtctgcgcctgtggaaagcgaggcggagccaggcgccgatggccctgtggatgaagccaatgctgtggaagaggagaaatctggtaagggtgaggatggcattgaggaggctgccgataccgttgattccgtgaaggattcagcaaagcctgaaggcatggatgcaaaggaggaggcggtggagcaggagggtggggccgcagcggataaggcaaaggatattcctgtgactagtaacggtaagacggatgctggcggaaatgaggtggctgaaatgaaggttgaaaaattggagaatggtgatgggcatttgaaggcggacggcgatagcaatggtgataacaagggtgctgatggtgagaaacagcttatgttagcgtcagctggggaggacgtggaggacccggtgctgtccaagcttgcaagcaactccttcatgtttgattacagctgtggtggtgatgactcggggactgaggaggagcaggctgctttcatgaaggaacttgagcggttttacagggagaagcttatggaattcaagcccccgaagttctatggtgaagggttgaattgcctcaagttagtacaaggacctctttgtctgtatgttagaatttgttatgtgctatggacatgaactaattttatcttgattttaattttttttataggttgtggagacaagtgactgggttgggtggctatgatcaggtactcattttgatgccttattgaataatatctgaccatctgggttatagtgtcttttggattacttgcttgctattatgcattgcaatggacagcaaataaatagactacaaaactcaaaacaaaaaatacgaaaaaaatatttccaactcaaaacttgtatgaccacatgagatcatttggcctatatatgatcatgtgaaaatgatgcatttttccttattaaaaaaacttgcaaacaatacatccatgtctaccacgtatatatagccacagaagatcctctgaactgagggtggctgtagaacacacctgtcactcccaaaaggttccaagtccttttgtaagattaaatatttactttctgcacatattatgtatttatgagctgggaacattaagattataggactacaatatactgttttacttattttttccctttataaactagttcaagaaaacaaatccaatatatgtatcatacagggttggttatgtgagttttttttttggcacttcggcaatatgcttatccagttgttacttccttttgttatgttagaatggaaggcccatttggaattttgaaaatgattccaacagcaagctataagccaagcaaaacaacaacaaaaaaaaaaggatttaggcttttagcatgtaatgagtttttggtatgccagtttgttatcataacgtgcatatctgattccacacctgtatataaagtggaagatgtggattttaatttgcctacctatttttctttccatataccatcagatcctattaatttgatgcattgtgtgcaaagtgtctgccactattatttctgaatctaatctgttttcggaccttttctcctgaaatattcaactgacctgattaagtgagtcaagaaaatagagatcaaaatcgacacttctatttcctacagtacatacaccaatcatgatgacagttccatttgcacagtagtgagactgaccatatataagttcagttcttgttcaccaaattgatatctctaagctattattaatttctttgtgttactaaaatatttatatgccgcattgtgatttcgtgacattgttgtataatctttaggtaatgtgcactgcatgcttgcttactagttgcatcaacaggtgacatcgtgcaaactgtggcggcaagtgggagagtctttcaaacctccgaagtatgtatctgatttcttctgcattctgttcaggccatttggtgaatctcaattgaattgtgcaatgatggaagctcgaacttggttggcataagctcagatttgaatactctttatgttttatgcaggacatgcacaactgtttcatggaccttccgtaacttctatgagaaggtatgtagatttcagagcctggacaaccttgtctgcagttttagttctctagttgcagcactgttgtggttgaatcctgtattcccctctcacgtcatgagccaatgacaaccacagtagttaattgaagaaaaaaaatcaattcatttaacatattctaagattttgcatgattcttgtaaaaggagtcttgaaacaaaagtacacgcaatactttggaagttttgccaaactgtcaacataagattatgcccttaaatgcgatcccatctcgatgaccgtcacatagatgtggatcatatttgaggctattttctcttggtttatattacttggtagataagcacaggtgctggtttgcatgatttgtttttctctttgaattgcacaagcagaatgcagcaggaacactggttcttatctggggaaactgcgtgtataataaaatttaaacaccaatgcattttgtcaagagtagtgttgtattttaaatcagcattggttttatttttgcccccttctgtctcgccgaccctctttattgtttttgttccatgcaggcactccttgaatatgagaaacacaaaatcgaaacgggcgagtttcaagttgctgcatctaatttaacagagaggattacttctgaaagtcaggtacagtagtatgacggctagcataagttttccatgatccctgtggaaatcagacataaatgggtcctgtttctaactattatttatgtcccaaaatataagaaattttgggcttagacacgggtagtaagaaagtaggtgaaattaaatggggaaagattgtgattggttgagaagagaatgtaggtagagaagttatattttggaataaattttgaaatgctagaagttatattttgggagtaatttaaaaggaactgatttcagatggaatgaagattcattctgcatttaaatttttgacttcctttattgcagatgtttgtttagttgtgttaaatacttcagcaggaaatatgttatttttttgagatgtgtaagtaaggatcttaaaaaggatgagcttataatcttgatacaggttggcatccatgcttctggttctggaagagctagaagagaatctgcaacccgagctatgcaaggctggcactctcagcgcttgcttggcaatggtgaaattgctgatccaataattaaagtacgtgttcgttcaagtcaaattgtcattagtgacttgcaatttgttgtatcagtaaccttttgtttttaccaggataaagggacggtgtctgtcttaaaaaaggataaaactcctaaaagcagcggtaccatttcttgatttttattttttaaacatcatcatgctattatttacttatgttgctttttttaggttctgccaagaggaaaaggacaccgaccttggaagatgacaggattgtaccatataaacctgacaagctacagtaagtcttgcagatgattctctttcctttgtcatcgagcatccacaggaatcatgtaatattactgtaggcaccagtctgttcttttgaatgtcacgatgatattataaggctcatccagttaactatttgggttttggcatgccaattgattttttcactcttccaccctcaatttgtatggatgtgaaactgtgaactgatttcaattatttctatttggcagaaatgactcaatggttcttgaccttggccctccagctgattgggtaaagataaacgttcggagaaccgtaagtatctcatttggatcatcatattttacctttttcatgcttttttggcctcttttagccacttgcccatattttccagttctagtagttctccacagaagttctgaaaaacaatgctagcgaaacgcatattatgtttgaaatctgtagaactatcgtggaagttagaaacagcatgtgttaaccagaaatcaggggaaacatatttttcatggtcattttgtaaaggaaaatatcttttttcttgcagaaa

SEQ ID NO: 11594 - DNA, 2129 bp, Oryza sativa
caccaagataagttctttaaaataatatgtagtgcaggaaacaaaatgggggtggagggaggcaggtggagctttgggagtgggataagcaaagatagtgtactataccttgattatagcaacgtcagcagcaggaggtttcaaatccagggcaatgccaaagcaaaatacagccttgtcaagaatgttaagttgcttgtaaatctttcccatcagtgcatacatactactttcatgaggtgcaatttcctttagccgttccaactcatccagagcatcagggtatttttgtaggcctagaaggattaaagccttttgatacttggggagtggattcttcttatcagcaaatatagcgttctccatcatttccaaggcttcctcattcctctgaaagtttcgattcagaaagaaggttcatagttaatcattgtccagatgatgatgaaaattctagttttgagggtaagtggaaaccaaaaattagtatatggtactccctccgtttcgaaatgtttgacgccgttgactttatagcacatgtttgatcgttcgtcttattcaaaaaatttaagtaattattaattctttgcctatcatttgattcattgctaaatatatttttatgtaggcatacaattttacatatttcacaaaatttttttaataagacgaacggtcaaatatgtgctaaaaagtcaacggtgtcaaacattttgaaacggagggagtatcttgcaacgtggactactggagtgtgtggatttagctgctttagctttaacaattcgagtaggactatgtttgggcagaccaaatattacttttttcatgtgttcaatcttcttttgtatatgactttaattgtttggcagttattgagatgaagctagatagtgagtaaactgaatccgatacttgtttgctgtaataagagtcttttcagttttctcatcgctgatagcgtgtagttttgttctcttagttcgtatatgaccaggatcacatgttgtactaaatgtatactactcatgtgcacagacaaatgtccagttgctagcgacttgctaccttcacaacaaccagccatatgctgcataccacatcttgaaaggtaataacatatgctcaccacgtgaccacttattattgtgtagaagtgaaatcacattatttaaaaatcaaagaaatgtgaatatagtatctgtccatctttttgggcacatttctatcctgttttgtgatttcagtatattttattctgtggtcgcaaagtgctttggtctttggagcgatttctgatttttatttctgatataacataaaggaaagaagctgccagagtcccggtacttgtttgctatgtcatgcttccgaatgaacctcttacgggaagctgaagaagccttgtgtcctgtcaatgaaccaaatattgaggtatatagcatgtttttaaacattatttgttcattgtgttcctgaaatatatttcatccaacgctcttaattttttcgtaagtgcttgaactcaagttttgttctggacaaggggtcgcatgatgtatcatttgttccatggtgtcttctggattccaaatcagaagtagaaaatgggatgtgcagcatgtttgattattcatgaattaagagttccaaaactggtgatataccatttgaaaacattaagattggttgcctgtcaatgaaatcgtatcaacaatgttatcaatgtgaaaacaagaagtgtatcatgtcttaaaagaaaatatgcatgtatgattaagtgatgtacacgagaaacattgtcactacaagttgatgttttgcttgcatagaaacgtctgcagacatcttttttttctttgggtgcatgacagcattttgaggttgtccactaactgtttgattccacacgggtgaagtaatgatgtggaaaaaaaatcagtttgcatctttgcttactgttatacttcctcccttttttgcaaggcttcttcaatacttttccaaaatataaggatgcatgtgagtttattgcttttattccttgtttaccctcatttttgacataatacctcttaaattaatgcgaatgaactcactaaccatcagctctatatttcgaattt

SEQ ID NO: 11595 - DNA, 5492 bp, Oryza sativa
cacctcctcctcgcccgaagctcgctggagtggcctcctcgccggcgtccagtggcgtcgccaccacttctccgtctccggccggctgctgttcgtcgccggtacgccgaccgacgtcgccgtctcctccgttgacatcgcagcgtcgtcctcccctccggctgctcctcggtttcgccggaacgccgtcgccgcgccggcctctccatcctcttcgtcgccggcgtcctttcggccgccccttcctcctccccggctcgtcggcttgctgcaccactaccacctccggcatcgcagcggcaaggtcgtcctcggcatcgtttcccctccatccaaacccctccgcggtccatcatcgtcgtctccgatcgttctcgtcgtcgacgtcccgtcggttgcccggctcgtcgtctcgcggcgccgcctccgtcgtcggcatcgcagcggcgtgttccacgtcgtcctcgtctccgtgcagccaccgccggctgccctcgtcgcctcctcgccggctccggtcgtcgtcgtcgtcgtcctctcgtcgttcccggttccgatcgtcgtggcgttcgtccctccgtcaagccgttctcgttcgtcgtcctcgcttcgtcaagtgcagcagccccatcatcgtcttcgtcctcgcctccgcgtcgtcaagcctcgtgccggccgcgtctcgccttcgtcctaggatcgccgccgaagtcgtcccctcgccgttcgtctccgtggttcccggccgcctccgccgcgcccgttcgtcgttgtcgttcccacgcctcgtcgcgtggtggtaaggatccctctcccgctgccccgtcctcgtcctttcggtgtcgcccgtgctcgttgtgcggttgtcggccccggtacccgtgtaccggtgttggtagtcgttcgcttgtgcgtgtggtgaccgtgttagcgtgcccgctcggtagccgcgtggtttccacgtgtgcaggccgtgtggtgtctagtggagtccgtttgtcggccactcgcctcggttgacacacggggtccgcttccgtcgacccgtggaccgtctctgtgtacctggtctaccgcggtcctttaggttgacatgtggggtccgcatgtcaacggcgcagccttcctgtcttttccaggctagcgcttacacacgttttatagttgcaaagcttaattataataatccgcaaatctccatataacagcattaaacctcggatgatcatatcttggtcatacgaaccctgaatcgacccgttcaagtctcctaatgttggttataacctaaagaaccctgtgctttctttttatgtattgttattgcttctttataggcttgtagctttgcttgtgtgcttcgcgtagctttcgtcgttccggaggttcccgaagcgtggttcgcggtcgtcgccgaaggttcggaaggccgttctctctgagcaaggcaagtcacatcatctttgaacatattgaatcccagtttgtaaaattatgttgatttaaattattgcattatcgctttatttaaattcccgcgttatcactgttttatttagccatgcctatttacctttgttatgaccatattattattgttattgttattattactaccttgttcaccctagattaaacaaaacctcaactagtggacactctactcgtggtatccctagtttaaatttaggtagatgattcgctgattaattaggcaacattaggtggttttataactttagactttgggaattctcatatcatttggacactatggaattgttgggttatggtggaattggacatacacctctcttcctctttcaaaacccctaaaacctgttttcggtggggtttgggtgcatgccagttgtgggaagtagcaccccggccactataaggattaagctcgggcctctgttgcaaagcactaccgtacttccacatgtctagtgggtaaggcttagtttgtggctcagtctagtcataaacaaaagtacacggattggagatggatgaagtcgggggtcgatggacattctccaggacaaatgaaggctacacgagctgcggcccggtagtcgagatgtcgtggcagagggttggtgccctgctgcttggggctcagtcctgcctgcctgtcccgggggttccggccgtaggtgggattgggtcggtactcttgtttatggctaggatgggttgggaactatgtcacgtcttccgtctgtataccgtggtggtatgtggcacgtggttgcacgtgaggaagatgtgtcttgtgggtaaagatgtacacctctgatcagagtataatctattcgaatagccgcgccctcggttatgggcaagccgagcaatgtacccaagtcagtgttataattcttaaaatttgctcaacaactaaaatgtggaatggttggcctgggttggcttgggacgagctggggcccaagggtcgggttgccagttcggtctgaatcatcgtaggccttgggttaaggcaggttcgtgtgggttcacgaccttgattaataatattgtatagctctaggatcgtgtttacaaaatagctttgggcaactaagtgactgttaaatgctgtttactgcaaaacttaacccctatattattatccccttgtactcctttgcattaattgtgcatctccggtgtggcttgctgagtactgtggttgtactcattcttgctctatctttctccccccccccttcagtaagagaagctttggagaagatgtcttaggtggagtcctggcttataccccagttgagcgcctgtgaagatggagccgtaggcctgctagtccgctgctgtttatttttgattgccaggcctgaagcgcctttgtaataatgtaaatattatcgatataataaagatgtgtcttttatatcatgtttgtgtggtgtaccccggcttttcctgggacggggattaatacactagcgttcgggaaaaggcaattttcccggtcgcgacactcttcctcggcccgaggccggagagatcactcccgcgccgtcggcctctcgtcactgcgcccgtcccgcacggtagtgcctccctccgttctccctcctcgctccatctcctccccctagctttcggtagtagcttgagtagactccccgtagttagccggcgccgccccgaccgttgccatcgctcgctgtatgctcgccgccgtcgccgcccgagctccgtagcacccgctcgtcgccggcctcgctcggcgtagttccgtccaatccgacgcaagcgtcgagttcccgaagccgcgtagatgctctcgccgccgggaattagcccctcgggacctcatcgccgtttccccctttcctctccgccggttgccgccgccgcaatccgccgccgacggactccctccggcgaatccgagccgttggctcgtctcccctcgtcctgtgctgccacccggtgtgctcgctttcgccggtatcgccgtggctcgctccgccgctcgccgctgtcgcccgccgtccattcgcggccgggtcgtcgtctacctcccgccggcccgcgtggctgccacgtaggcgccacgtcggcgccacctcggccgcgaccggataagccgacccggccagccgctccctccgtttttcccccgtgcgcatggtccgcggtgagccgtgaggctgcgcgtgggcccgccgcatccgttcctccgcgaaccgcgcgcgtgcaccgcgtcccagccccgcccgcgtgcgtacgccgcaaactccctccgcacggtgagccgagccgctgacaagcgggtcccacccgggaccgcgcgtagtgagcccggtccaccggactctctctcctctctccaacgcgcgcgcgcgcttgggccgtcttgggccggccggcccgttaagatcggccggtccgctccatttcccttgggccgcgccctagccgcccgagagaagtctacttctcctccctcttccttttcttttccaaaaaggatttaattaaatccttttcctttagatcaaaaattcaataatcttagaaattcaatatcttcccaaccgtaaatccgtttgactccattcaacttccaaatttccccaaatctcgagatctatctaatggcacgcttagaggtcattaatagggctttatttttttgccgtttgttgagttgtcccgtttcgcgtgtagtttcggagccagaagacccgcagtgcgaggatttcgaggatcaagctccagatctcgagcaaggcaagccacctttgaacatcttgagcctatatttgaaatttaattatattgcttgcaaaatattatgcattgataggatcgcactaaatcttttgtcccatctgcaagacagattggcggacttacctaacttgttgcatttgatccttccattgttaattgccatactatgtccccttgtaaccacccagttgcacctcgatattcgtgcactctgtgcaagtatcgacggtcgccttcaaacttaaaatctgagtaacaacttgggtaaaactggagttttacaaaagacttggaaaacccgacacctgggtcggtgcttgcgaactaaatgaatttccaaaaccgcggaccggggaacgtaccgggtgtacggtttcccgctctcgcacttaaggaccgattccttggaatttcatccaaacataagacaagtacgaccacatgggtggaatgggacacccctggctgagtaactagcttatcaggggagccttgatgctgagagacatgtggattcgccggggtggtgtcggggaggacccctgggctttctggcacagtatggtctgggacctaacctgttgttggtctgggacccctctcgtcggcatatggtaaacctgtatcggctttcgaaatgccttgtcatgaaagcttggaggtctcccgacgtggctgatccccacggctgggtgatccgggttagtaatgtcgtgtgggtaaagtgtaccccctctgcagaggttaacaaactgttcgaacagccgtgcccacggtcatgggcggatgtgaggtgattcctagcgtagttttgtttgactactgcttgtgaaattgctgttgtgaaaatgggttcgatgtttggaaaatcagcagctgacgggatcagctaggcccgggtggccgtttgaaaagttgttggcccgggtggccgtttgaaaagctgttggccgggtgccaaccttgtttcaagatctgaagactgatacattgcacatactccgaccggacgagacgcactgtctcattcgtgtcgtttgagaagcactcacctagttattttagaaaaagagttcaaataaaatcaattgcaaaaacaacagcctttccttgaagcctgcattaaacacttatttcccctggcttgctgagtactcccgtactcacccttgctctatataaataacccccccagttgctgaagaagatgaaccggatcctgc

SEQ ID NO: 11596 - DNA, 1246 bp, Oryza sativa
cctgcagccccacgctgctcgcgcgtgcgagagtcgccccgagcgcctctctccccgcttcccctccgtcctgcccgcgcgccgcgcgcgcgtgcgcgggagtcgcccgcgctgagcgcccctcccctcgcgcgagctccccgctcgcaaagccgcttcccgcgcgccgtgttcgcgggcgcgcgcccgcgcggacgccgcccgttgtttcccgcgcgcgcgcgccgagtggccgaccgcccagtcgccgccgtcgtcagcgcctgccgcgcctgtcgcccgtgtcgtcgcgccgctccaaaccatctcaccgtcatcgccgtcgtcatcccccggccccgccactccgcgcgcaagccgccaagaggcggaggccgagctctcccttccctctgccgcgtcgccccgccccctcctccttttcccgaatcggcaaaggggcgagccccctttctctccctccttttcttctttttctcccctttttcccttctcgccggcgtcatcctcttgtcgccgttttggccgctagccggagcgccagctcgcgcccttgaccgcgcaagtcgattcccaaactgacattgccgccccctataaaccccagcctcccctttcccctcctctcccattcgcctccgcgccattgccgccgctcccgtgctctgcctcgcctccgccgtccatcgccaagcgccgggagagccggtgcgttcgtggacgcggaaggggactccgggcgcgccctcttcaccctctttgtcacgtcctgataaattcatcccaaaataaaaatcattttctaaaaggaataatagaattaattaaaatacgaaaagaaattggcaaacactaaaatacgtgcaagaaaaattcaaatgtggcccggagaatttttgttaaattctccttggtctaaatggagctctcaaattttacttgaattttcagagcaccggaaataattattaagcaacaaaaacaattaacaaagtttattaaaaagaaaatctaaaaataatcctccttttcttttgggccaattttggcccaaagtcctccctctctcccctcggcccgcggccgaagtctccctttcctccctctctttctctccctctccttctctccctctccttctctccctccttctcttgggctccccttcccctcggcccagctccctcctccctctctcccgggctgcctctttcccccccccctcccctcccggcctgcccggccc

SEQ ID NO: 11597 - DNA, 2766 bp, Oryza sativa
cacagtaatgtccttcggactcaccaatgctccagcattcttcatgaacttaatgaacaaaatctttatggaatacctggaccagtttgtcgtggtattcatcgatgacatcctgatatactccaaaaatgaggaagaacatgctgaacacctgaggctgataatggaaaagctcagagatcatcaactattcgctaaattcacgaaatgcgaattctggttagaccgagtagcatttcttggacacgtgatctcctccaacggtgtcgaagtagatcccagcaaggttgaagctgtacttgcttggaacccgcccaagaatgtgtcagagattcgcagcttccttggcttagctggatattatcgaagattcattgaaggattctctaagctagccagacctatgaccgaactgttaaagaaggaaaagaaatttcaatggtctacagcctgtgaagacagctttcaagaaatgaagaaaaagttgaccactgccccagttctcaccttgccagatatccgaaaagatttcgagatcttctgtgacgcatcaagacaaggcttaggatgtgtcctaatgcaagaacgaaaggttgtggcctatgcattcaggcagctcaagcctcatgaagtcaattatcccacccatgatctcgagtggcagccgtggttcatgctcttaagatctggaggcactatttaatcgggaacagatgtgaagtatacccgatcacaaaagttttaagtatatcttcactcagaccgagttaaatatgagacagagaagatggttggaactaatcaaggattacgatcttggaatccactatcatcctggtaaagccaacgtggtcgctgatgcactaagtcgcaaggcctattgcaatgtagctcaaatacggcctgaccaagatcacctgtgcagagaattggagaagttaaggctgaccgtggtacagtcaggagtccatgccagcttgacagtacagcctaccctagaatcgcaaatccgggaggcacagaaagacgacgaagggataaaagagttaataaaaagaatacaggagaagaaagacaccaatttctccatagacgatcaaggcacagtttggtgcggtccacgcatctgtgtaccggccaagaaggagttaagagatctcatcctaaaggaagctcatgagtccgcttactccattcatccaggaagtacgaagatgtaccaagatatcaaggcatacttctggtgggctggaataaagcgagatgtcgcagaatacgtagccttgtgtgacatttgccaaagagtcaaggcagagcatcagaggccagctggtctgctgcaacccctaccgattcccgagtggaaatgggaagagatcggaatggatttcatcaccggtttgccaagaacccccagcgggtacgactccatttgggtaatcgtggaccgactcacgaaatcagctcatttcgtgccagtaaaaaccacctatgatggaaagaaactagcagaactctacatgacccatatcgtatgtagatttggctgtcccaagaaaattgtgtcagaccgaggcactcagttcacctcaaggttctggaagcagttgcatgaagccctcggaactgatctgaattttagtacggcctaccatccacagaccgatggtcagacagaaagggtaaaccaaatcctagaagacatgctgcgtgcgtgtgccttggatttcgaaggcacttgggatcgttgtttgccgtatgctgagttctcatacaacaacagttatcaggccagcattcagatgtcgccgaatgaggcaatgttcggaagaaagtgccgcacccccttgtgctggaatgaggtgggcgaagccctggtattcggtcctgacatactcaagtcagcagaagaacaagttaagctgatccgagaacgtctgaagacagcgcagaaccgccaaaagaattacgctgacaatcggagacgtgaccttgagttcgaaaagggagatcatgtgtacctgcgggtatcaccactccgaggtatgagaaggtttgggatgtccggcaagttagcaccccgctacatcggcccctacctcataaccgccagacgtggcgaagtggcttatcagcttgagctacctgaaggtctcgcaaatgtgcacaacgtgttccacgtatcccagctaaagaaatgtcttcgagttccagaagagcaagtccccttgggtaacatcgagctgaaaaagaatctgacctacaaggaaagaccgatcaaggttcttgaagaggcagaacgtcagactcgaaggaagaccatcaagttctacaaagtccaatggagcaatcattccgaagatgaggcaacatgggaacgagaagatcttctccgcgccgagtttccggagctgctcccttaggtgctgaatctcggggtcgagattcttgttagggggggttggtctgtagcgcccgttccgtcgtggtgcctagcgggaaaataatctccgaaaaaccctaattgcgaaatttgtttctttgattgttgtctagtgtccgtgccatctcaagatctcaatccccgatctatcgtcgagttcaattccgaatccaaatccttccaatcaaattcctccgcaaaagtctattttgcctcccccgaggtcgatgggccgaatctcgctcggcccatctctctctcccccggccctctctcccgggcgctctctctctctctctctctctccccccggcgcgctcctc

SEQ ID NO: 11598 - DNA, 1933 bp, Oryza sativa
atttccccaactctcgagatctatctaatggcacgcttaaaggtcattaatagggctttatttttttgccgtttgttgagttgtcccgtttcgcgtgtagtttcggagcccgaagacccgtagtgcgaggatttcgaggatcaagctccagatctcgagcaaggcaagccacctttgaacatcttgagcctatatttggaatttaattatattgcttgcaaaatattatgcattgataggatcgcactaaatcttttgtcccatctgcaagacagattggcggacttacctaacttgttgcatttgatccttccattgttaattgccatactatgtccccttgtaaccacccagttgcacctcgatattcgtgcactctgtgcaagtatcgacggtcgccttcaaacttaaaatctgagtaacaacttgggtaaaactggagttttacaaaagacttggaaaacccgacacctgggtcggtgcttgcgaactaaatgaatttccaaaaccgcggaccggggaacgtaccgggtgtacggtttcccgctctcgcacttaaggaccgattccttggaatttcatccaaacataagacaaagttgcttcctcccgccgtggcccacgctttatccgcactgcgcggaagcgtgttgttggttcttccaccgtgttccgtttccactacccagctcccccaccgccagcagcccgtgctgctgccggccctcgacaggttccgccggtcccttcgcaccagccgatcgacgtttcttcgacagaggagccgactacaggaggcagccaggccgacgaggagtagaggaggcagtcttcagcagccgtccgtgtgtcaggcccttttgttccgccgccaactcttttggagtcgtggcgaggtagtgcgtgtgtgtgtttgatgtgggtgttgtttggtagtctggttctcctaggtggtgtgcgcacagtcaagctcggcgtagctctgtgacttgtccacacccgttgtatcaggtgtttttatgatttgaaaaatccagtttatgcctagtgtgtgctatctgagttgctatttgctttgctccttgccctcctaagtgcttatctgactcttaccccgcccttttctgggagtttagatggctagccgcccccgccgtgcagctcgtgcaccagcccgctttggttttgaagatggtagagttgaagcagaagcaaatcatgaatcagctaatgagcagtctcaccacagcaaccgttcgcaccgtactgtttcccgcaacgcagaggttgagcaaccccgccgcagcagccgctcgcatcgcacagtttcccgtgatgcagagatggagcagtctcaccgctctcaccgcactgccagtcacaattctggagaagaacgcctcccttccccacctcatgtggaaaacaacatgcaacacttaatggcagttcagacacaaatcttgcaaggactaaccacagtcatagccagttttcagcataatgcacatggaaatggccaccctcacatgggcaacaacagatccaagctgacagactttctgaggtctcgtccgccagagttctctcagaccgtcgagcccgtcgaggctgatgattggttgaaagatgttgatagaaaactcaacttagtgcagtgtactcctgttgagaagacgctctacgcctctcaccagctaagaggacctgccgcagattggtgggagaattactgcaatgcacaccctgaacccactaacattgcttgggatgagttcgctacggcttttcgtgcagctcatgtgcctgaaagcactattgacatgaagaaagaagaatttaacagacttaagcaaggcaacagcagtgtcaatgagttcctaagtcagttcaacaagttggctcggtacgcccctcaggaaggggccgcagg

SEQ ID NO: 11599 - DNA, 2908 bp, Oryza sativa
acaccttggcatactcagctagcaggtctgcgccggggaccttgtctgtaaccgagggcttgaaagccatgccctcagcgacttcaggagcgaaagttgggtggactctcgctagtaggacacactgtgctgcgccctgcataaggtgaaagtttgaatttaatattggaatgtgtaaatgtcttttattagatatggatcggataacaacaattacctcgatgtggtccactgcagctagtggtgcgatcgggagaccaggggccggcacctctgtggatgcacaactactcctatgctgtgacggactcgcgtcgtgttgtacactcctattcatgtcggcgaggaccttgttaaccctttcttccacccttgcattcatgctagcttctagttcttgaatgacctcaaccttaagttcggccttcaaacgagcgtccctctcttccttggagactttccatttcctgtattgggagctgtactgagggagtccatgcttccagggcacatcgctaccaattccccgagttcggccaggatgttctttggttccgagcgcctttgtgaggatgtcatcttcgcgcctcttcggcgcggactcaacctcgctttgtgaagcttgttcagcaaccaagcccaactagaaaagaagatagtcgtttatacgaacttgtactttatacgaacggaaattagttaggttaagtagtgaactcaccagttcctgatagacgacggcatcacttttgttctcaaatgtgacagagccgtccgggttgaccttaccccttgcccgcgcccagttgcgagctatttgttcagggatgtctgaaaacagggcagggacattcgctgctgtagcggctgcatcttcttgggcccatattgcctccttgccgatgtaccctgcggtgcccagccgatgcgggtgctcattccgctgttgcagtacgcgatgtgcctcgcttgattccctaaactcttgggtggtcttgagagagcagaattcctcccacaccgcttcggttatttgagggtattcatcgaacgacgtatgattgccgggcgggttgacaaactcggtgaagagcttcgacttccaattcttccaagctttgcccatcttttggaatgccttccgcttgagcctatcctttgcttcggctggaaatgtgaaccatttctccattgccgtccaagctcgctctttctcggcttctgtgaccttcctgatatctttatggaggatcccgaagttctcacgtgccgctagcccgcagcagttagaccatcttccaatgacagtcctgggcgccgtgggcctaccactagcgtcaacctctcttataacttgcactgtggtcggccatatattttgtgaccgcggatttctactagacctacttgcacttgtccctcccgacatcgacgtatgttgttcctgctgcaattctgcagcacaaacagaaggcaatatttgctaaggggtgctagctaaaatttatgtggtcatgtggtgaaaatttatcctataaattaccatgaatttcgggttgttggtttgccgttgtcgcgggatgaccttcggcaactgcctctgtggctgggtttgcttcttcctggatcctcgcaggtgttggggagggcgggtttgcgccgggcgttgacatggtttaactttcgcgaaaaagattataaatttcctaccattagactaaatagcattagatccaatgtaatacggggtatactatgaaagatatggcctcagttttgctgagaaatatgcatcaattacaatcatttgcatgaagggataaaaagaggaaatcataacatcaaaagagcaagtgcagaaaatctgttcttatgcataaaaaaagaacaagtgtagaggtatataaccactgaatcaatcatgcaaatttaaaaaacagcagcagcaagggtacagaatttgcatgattgacataaaacagcagtaggaggagtatatatgccacaggggtagcaacagcaggggcaaataacttaaaccaccttgtctaaatttactcctttaatcattccaaaagaaaagagcaagtgcagaaatctgttcttatgcataaaaaagaccaggtggcccaaattctggtcttatgcataaaaaaagaaacaagtgtagaggtatataaccactctacactggccatttaataaggaacaagtgaacaagtgtaggggaaaaaaatgaacaagtgtagataatctgttcttattgagcaattcatcactagccatttaataaggaacacattgggcagcagcagcaagggtatataaatcatcaaagaatgacagaaaacaaaatgcatggagaactttggtgtctaggtcggttccgtccatggactacactgacctatcctttttcagctaaatgtaaacatgatccacaaaattcaataggtctagcaacatatatagcagtacacactccatgaatggttatatgtccaaatggcacttaaatccacattcaagttgcacttaactaacagttgcaaccataggcagcagcatgggcaaacatagacagcaagggcaaacatagacagcagcaaaatcatgtatataaaatctagcccctacattcatccaaaacatccacagacaacaaatcacatttaattcatctatacagcagcaccaataatcgaaacaacaaatcacatttcattcatctaaacaatgcaattcatccatcgaaaaaaaggaggaatgggggagggtggcggcatacttggaaaagcggcgtacctggagacggcggcgcaggccgtagtcatcctgaatcctggtggcggcggcggaaaggcagtggcgaagaggtcgaggcggtcggtggtggtcggggatcccg

SEQ ID NO: 11600 - DNA, 2617 bp, Oryza sativa
tcacctgtgacgggcgccagctatgtggccgtcacaggtggcctcacctgtcacgggcgccaaccgtggagccgtcacaggtaagaccacctgtgacgggcccaacactctgggccgtcacaggtgatgtcacctgtgacggccctacagatagagcccgtcacaggtgagtttgcctagagcaattttattttattttatttcacttagttcttttattttccttaacatattttcacatacactacatatttttttatacttaattattttatttcactatcagtagtaattgcacttcattattatactactttaattattttatttccaatgcttatacttgcttaattattttatttcacttctagtgggtgcttcacttaattattttatttgactatttcataagcaatatactattgatcattgcgaacatattagagtcatacagataacagacatgtagacataaactacgtacataaattacaaaaataatccttcctcatggtcgacacgtgcatattgaacttcatcttcttcttcctcctcttctagaggtatttcttgacctatgccgtggacgtgctggttgtaatcatcctcgtctgcaatgttgtccaatccaacaattctccttttcccttcacgaacaacatgtagtttcttgttacacgggtcaactatgtagaacacttgaacaacttgtttggcgagaacgaacggttcatccttgtacgcgttgttagccaagttgacagtggtgaaaccttcattgtcaacttttacattgcgaagatcgacccatcgacaacgaaacaacgggactttgaacttcaagtaatctagctccaatatttgctcaactttaccatagtattgatcacgacgaccaccgtcactagcagcctcgatgcgtaacccactgttctgcactgtgcatttgctgtcttgctttaccgtgtgaaaggtgtatccatttatgtcatatccttgccaggtggtggcactccattcaggaccctgtgacaaccactgaagtgtttcactagacaagttctgcaacctggcattcggttcttcagccactcgttgaaagaagacatgtgcttattcctgacccaactctttgatcggcctgggttctcttgtcggataactgcaaggtgttcgtcaacgtacggcaccacctcagtcatatgctgtagtaccgtgaaatgagctttatcgtacaccttccgatccaacctaatagtctttcttccaacagtaccaacaccgtcaagcctcccttcgtgatgagatcgtggtaatccaattgaagatgtttctgacatgtagtccacacaaaattcgatggcctttcggtggtttactctcgatgatactcccctcggggtgtgaacggttccatacataacccttaaggatccccaggtacctttcgcaggatacatttgcgtcatgaacgttggaccacagcactttgtttgcctcacaaggtgcacggaaagatgttccattatgtcaaagaaagttgggggaaagtacatctcaagatgacatagggttctcacaagttctgcctgtagttcatctagtccctcgggatcaatgatcttctggccgattgcatggaagaaggaacacaaccgctggatcgtgtgtcgcaccttaggaggcaaaatattccttattgcaacgggcaacagctgtgtgataagaacgtggcaatcatgcgacttcattccaaccaacttaagatcttgcagtggaacgagcctactgattcttgatgagtaacagatggaacctttataccactcaaacatgttagcaaatcaatcttctcttctttcgagagagtgtagcaggctgaagaaaggtaaaccctgccgaattccgtggttatgggatgtagctccgaccgaacacccatatcttccagatctcgtcgggcgttgagaccatcctttgtagtacctgggttaagcagtaatcccattaaactctcgcatacattcttctcgacatgcatcaaatctatgcagtggcgaacttcaagatccttccagtatggtagtctccaaaatattgacttctttttccacatgctcctctcttttgtcttttgtttttccacatgctcatctgttttttccttcgatgtgctcttctcttttcgctttccaactttcctcttttttccaaactcgttggttattcccatcactaagttgtgcacctctgtccctgttagctctgtcgggggtccggctgtatctctgtgtccattgaaattctttctcatattcctatacgggtgataccttgggagaaatctcctgtgacccatgtagaccatcttgtgtgaatgcttcaaccatttgcttcttgtttcctccatacactccgaacacgcccatttccctttcacagtttggccagaaaggttgccaagggccggataatcgttgatggtacaaaacagcatcgcatggaggttgaaatacttttgtgcatatgcgtcccatgttcgtgtgccctcattccatagcctttcgaagtcatcgattatcggttcaaggaacacatcgatatcggggctgcagga

SEQ ID NO: 11601 - DNA, 3249 bp, Oryza sativa
gcctcaaggacctccttgcgccgccgggaagccgtttcagtttccgtcgcccgccgcttttgggcaacggcggtgtcaaggaccccttgggcggcgtcgagctttctctttagctccgcctcccagctcgcgtgttgaaggcggagggtgtcctgcgcctcgatcatcgcagtggtggcgatgagggtggccttccgctccttctccaccttttggggcgatttccgccagcgccgctttgcgggcttctagctccgagacgtgacggcggtgcgccttacggcccacctccaccatgacgtccaccgagcgccgtccctcctcgacacgcgcccatgcggcctcgagctccgctcgttccgctcgcagggcctccacttgggcgctgaacccatctagcaccgcagtgtttgcggcggccaaggcctgcagaaggggctcggcgctcagcggggcgacagaagacgaggagaagagccgccttggagagaacgcgacgcggctcggcccgccggaggaggcgctgggctcggggatgtcccccggacccgtttggtcctgggcgtcgcccggagaagtgggcctaggcgatgcgcccgcggcctcgtcgcgagccgccccggaggccgtcgcctgagcgtcgcccgagggagtgggcccaggcgatgcgcccgcggcctcgtcgcgagccgccccagaggccgtcgcctgagcgtcgcccgagggagtgggcccaagcgacgcgccagcagctttgtcgtgagctgcctcggaagacgccatcgcctcagcttggcgagcccgggcggcctcctcccgagcggcactctccgcttgacgaacccgggcggctcccgggcgggctcttcagcttcccggaggcgatctggggcctctcggccgtcagattctcgccttcggtcctctgccggcggccgatcttctggctccgactggccagacttggggtggccggaggaacgcgaccggacattgctgaagcagaagaaaaaaaccagaagacaaacaagatgggtaagagaaaacttgcttttgggataggagaaagacggtcgtaatgagagtgggacgaacctgcgagggggtcggttaaatgaccaccttggaggggaaatcaggtttccccgggatggttccgtctcccccatcttacggagccgcttcttcttgcgctccccctcgggttgcgatgacggcgcggccccctccgggcgccgactgctggcacgcaccgccccgccccctcggggaggagatgggggaggtgttcctcccagcttcctcttcccctgggcgtcggcagggcggctgctccccgagcccccgacgcggggccagaagcacgaccccctcctggggtagattgtcccccccggcggctctcgcccacgccgtcgtggcccttaggggtttcctcctctgaggccccgacccccatcataatggtcaaaatagaggcgcggtcgggatcgctgcagagggggaggattccttgaggaatgagagacgcctccacggagctgagattcagcaccctttggaccacgatcttgaagtcctcgggagcccaatcccatctgactccttggtgggtccgcatgtagtcttcggacccggagtactcccaggcgctccgggcgcgccgctggagcggcgcaatccggcgacggaggtagtcgccgtacaccatggcccctgtaagcccctgggatcgcaggcccgccaggcgatcaaggacggcgtcatagtcatcccccagatctaccggcgcccgccagctggagacctgcgccgggggctggcttggaagtcggaggcgcgcttcgttggcgaggggggtgtagaaccagtcgctcttccagtcgtcccacttcttgcggaggacgcaggggatgtagcggttcagcaccggcccccgcggctagaagtagcagccaccaaccaccgacggcggcgacaccgactgcacggtgaagaaccaccggaacagccgaagagatgggcgcaccccaatgaacatctcgcacaggtgcgcgaagatggccaatgtcatcaccgcattgggggtgaggtgcgccatctggagatcgtagaactccagaacgtccataaagaaggaagaaaatggcggaaccagccccgccattgcgaaggggaggaagaagacggaccgccccgggtagtctggtgccgggcgtccctcgcccagcatcactatctcccggccggtggcagattccggcatgaagcggcgcggcagcccggcctgcctctcgctcacgatgcgagaaggcagtagtacgctaccgtcgagcagagcggagccccgtgccatggcgccggaggaagggatgattgagaacgagcgcgtgtggcgaaggtggggcgcagcagagaaggagttagggcgcaagcggcgaaggcaaggggaataatggcgaaaggaagggagcaaatcttttcctcggtgtctttatacccttgccatcgccgtgcccggctcctcgtttctcgcgcccactatctcgctccctcgtttctcgctatctcgctccctcgtttctcgtgcccacgcttccactaatcccattcgcccgcttgcggcgcatgaagtggatgtgcggttgcggcagtcgagatagatcgtatcgtgcgcgcgttaattacgctcgccgaccgaagcgacgttaccatatctccaggcgaagcaaatcagctcacccagattcgtgcgctgctcaagtgatgtggcagtcttgaagagaccgcccattatggacagccaagttaccattaccgatgtgcatggtttgagaccgttgggtttctgcgcaaccatggaaaccggtcccacctgtcaccaagctttaggagtggcgttacgcccgaccgcttcccttgagaagggcgatcgccctggcataacgccgggggctactgtcggtgatatgggaccgggggtatcgtgaccagaggcttgaggcagacacaatcgcccacgcggcctggcaccttcggggacgtcgggcccgagggtgaggtgtctgccctcctcctgatttctcccgaggggggggtcgggttactcctgccccggccccgagggccgaggcaccccgaccccttgaggaagtttgcgccacatatatgggataggtgacacggcagtgctcacctaaccgcatttattgtagtctggtcaagcgtgtcacgctgcatgcagcgcag

SEQ ID NO: 11602 - DNA, 979 bp, Oryza sativa
cgccctcgctacggtcaacccatgcaataccatcagtcggtcactcaggctaaccgccagccaggtacgcccttcgtcctcagataaaccgtccggcacctccgccacagcagcgtgcccctagtggcaatacagcgcctaacagtgttacctctttcaagtcaccgcagggaccatcagcagttcagtgtttccggtgcaaccagatgggtcactatgctagacagtgtcctcagaatcctaccaacaccaactcagggcatgctaatggcagcaccgccagaactcctactccagcggcagctcagtctcgtcctagctctcaggcaagtggacaaggttctcgtgcttccaaccactttggtcgaggacgtgtgaatcacattcaagctgaaaccgctcaggatgctccagacgttgtgatgggtatgttctctgtcaactccgtacccgcaatagtcctgtttgattcgggagcttcccattccttcatatcgcaagcttttgtgaaaagaaatggttggaaaacccaaaatttgcgtgtaccaatgatagtacattcctctggaaggaatataagggcaactcaaatatgcccggaagttaaccttagaattgaggaagttgacttcctagccaaaccgatagtcctagactcgcaaagcttggacatcatcctagggatggattggttggctaagcacaaaggacagatagattgtgccgaaaagtccatcaccttgcaaggacctggaggaaagcaagtccgctttacccctaacaaccctaccgcaagtcggtccatcctaacctgtttacaagtcacctccttggagtcggtgcccatagtctgtgaatatcccgacgtatttccggaagaattaacaagaatgccaccagaccgagagatcgagttcgccatagaactggcaccaggcacagctccaattgcaaaaagaccctaccgaatggcagctaa

SEQ ID NO: 11603 - DNA, 15872 bp, Oryza sativa
gaaaaatgcattttgaccacacggaaaaatcttttgtgtactagtggtcatgtttcctgggggggggtgcaagtgtacacaacatccgacgtaaattttttataccaaccgtctatattctttgacactttattttagggtacgtacaatatcaataaataagctggcccataagtctaagctgatatggatgatagagataatgaagagagaagagtggactttccatcaaacatcaactcttagtatgagagaggataagaaaaaaaatagaatagatcagttatttgttagcatgaactatatgggaacacaaatttgttagcatgaactatatatgggaacacaaaccaggcttatatataacagttgagcatggccttatatatacacgagcagtccttcgtgaaaatacatatactttttttagataatggattttcattaatccgatctctatatccacgaaggatataaacagccaatggaattatacatatacttatctcacgcctatattaataagcaaaaggggtgacatctaaggctatatcttttgctttcataacttttgttgtctcataatgtattattttggtcagactttcattcagactaaaatggttgtaatatattcagacttcatcacccctctgtgcctgggtctctgcttctatgatacagtttatggccttcccctttgagtcttctgaccctggtcctactcgtaggatgttcacactgcaactggttgcttatgtctcaccacacatttatgaactgtttgacaatgaatatagatggacaattttgaactgaaacacaagcggagggaaacaggtacacgaattttcgaattaaactaaaaggggtccatattaccatctttattttgcactgcgtgggacacagtaacatgggtgttcacctcaccatctgggataaactcaaaccgaaagagatgtctgaagcaaattaacgaagccgtgagtccgaatggaaagtgcagatagtggaatgttcattcctgatgcatcctaatcctttcgtggaccggtcggtctacaggagattacagcatggtcatgaaagtgtcatcgtacccatgtatctctgttgtagacactcacagccttttatgctctttggtcccaacagtctttagccgattctactttcctcggcatatattaactgctctatgatacttgttgctatcagtcaatcaattatactgcattgcatttcaactggtcagaatcgtgtacaatggttaccaaattaaaaggatagctcgaaatttgacgttttacaatgggcgggggaaatgcacaaaagacgatcgacataacatttaacatcaatcattcaaactttttatgctttcttatctgggtatatacaaaagcaataaataaattatccggtaactctactgattgtggacgagggacagggaggaaagaaaagagtcgaatctcaactaaacatcgattcttggcccatgatacaagaggataaaaattttggagactggatgtttgatgataaaaatttttcgccactttttctgtttttcgaatctgacttttttgttttgtttttcaccatttttaggtgaatcggactatgcttttttttcgctattttttctatgattttttttgtttttcctttttaaggggaatcagacttctttttttttagtttttttcgctatttttttatttgtgacggacgaaggaaacaactttttttccctttttattaggggaatcggactacggttttttttgtcttttcgctactttttctctgattttttttttgtttttcctttttataaggggaatcggatttctttttttatttttttcgctattttttatttgtgacggacgaagaaaacatctcttattttttaagtagtagtagaagtagtagatagatatgcacttgttctcctggtgatgcttactgaataggacttggtataattcaaaccaagtcctattcggcccaaacagaaacaaagtcctaatcagcccaaacagaaacggatgggagtttgtttcattttttttggaatcggacagatacatttttttcccgatttttcttttaccgtgtcgatggaatcggattcgatttggtttgcactttttttttccccggttttttatcagacaaacctggtttttttccccaggtttttttttcgcccttttttttctggatcgaacttctttttttcgtctagttttttatcggacaaacctagttttttctgcttggttttttttcacccggttttttttacggacgatggaagcacctcttcttttttaagtagtagagagtacagaagagatagagatagagatagagaaagagaaacggaaaacattttttcgcaacttttttttttgaatcggacagaaataatgttcacgctttttttttggatggacgacgagattttttttaatcggacagaaatattttatttcactattattcaacttttttacggaagacggaaacccttttgtcgcaccctttttggatcggacagaacaaaattttactttcctatgcatatattaactgctctatgatacttgttgctatcagtcaatcaattatactgcattgcatttcaactggtcagaatcgtgtacaatggttgttgaaacaccgtctgtacaagttaccaaattaaaaggatagctcgaaatttgacgttttacaatgggcgggggaaatgcacaaaagacgatcgacataacatttaacatcaatcattcaaactttttatgctttcatatctgggtatatacaaaagcaataaataaattatccgctaactctactgattgtggacgagggacagggaggaaagaaaagagttaaatctcaactaaacatcgattcttagcccatgatacaagaggataaaaattttggggactgcaataaataaattttttgtttgatgatgtgactcatcctggtggcatcttgggatgttcttttcactaatgtagatataaccttctggatcgttcaattaatttcctgtatatctgatttcactgatttcctgctgatctattaatggtagtatgatactcatcttattagagtcattgatgaaaggtttattaattaattgcaagcttcagacagtgttgtgtactatcaatatatttgtatgtattttcaaattaagtacaataatattaagttgtgacgaacagcatttaactggaacattattcactccgaggatagattgattgcatatcatatcattcagaggaaatctgtaggggaaaagagctgtacacttcatgctcttttctttggaaattgaaatgcatcctgctatttatattgaaagtataataagatataatgcaaccactaaatatgttgacggtagtagtagtgtttccatcattcgtattgcagtgactgaattcaacaatgcttgtatctgctgaatcccagccctatcctcgaccctataggcagtagcttcaaccctcaaactttgtattccactggctgcttctgtatgtattgtttgcaaatgggttgtgctagggctaacatcatcttttgacataacatggaaggactagtttgctagacgaacaaatactaggacagaatcttcattcctgatgcatcctaaccctaacgcgcattggtttttgcatatgaacatagatcatcacagtggaaactgaatcactacaagaaaaccaaaatttcgtgagcgtggaaaacggccaaggaaagactaagtgtcagtgagccaccacgcaaaagcactcacgaatagagcaacaaggaaaacgaactatcttggcggttaaccgccaatgacaatttttttggtggcaaccactaccaaggaaataaggctatcgttaggttcgtgcaccgtcacagatttgaatgaaaccatcaggctaatttattatcaggttggtgttaaccccccaggtttaataatttgcatttttttcgtggtagtgcaaaggacccgacaagagaattctcatttttggcagttcctatttgcctcacataaaaattctagattgctgtagtaaattgactcaactttagaagaatgccacaattaacttgctagtaaatggtagcttttattttgattttagacatttaattgtggtattggaagtaggatactcggtataaatgatagctagcagatcaaaacagggcattatgatgcaattcagtgactagtgaaggcaaggcttatttgcaagcttatctttttaattaaaagttcaatacgggaaatacaatagactctaatgtgcacaaacttcttcaaaagaaacacctacggttcttcccaatgtatacaccgaagttccactaaagtttcagagcatttaattaattacaacaggcattctaatacttattttaagtcactagtactatgatatgaaacaactgtaatataatccaataagtagttagttttgttttcatgtcacatattcctctactgcttgcactcctatgcactcttgatctagtcgtcaatcaaatgaaatgagggctagctagaaccacaccttgatccacaatttccacacatagaaaaacgatccaacagattgcggcgtatatttagtcaacacactcagataattcccaccagacttgagaaatttgtcatgataaactggtagtcttaatcgtcatagcaaaatctttgccaattcaattttatactctagtacgatttaggcggacatttatacaaaataatcaacatgttttaccttggcaccgcccacccagacccaatcccacaaaagaatctaaactagctagctaggatataatagctatagaattcccttaacattctacgttaatgtttacgcaaatccaaaactgccatgttgtctctgacaatgaggtagttttgcaccttggagtattacgtcagtaataatgttcttgttgggtgaacctgatgcgttgcctaggtggggtttgcctcgcacaagtgtcataatgtgcctgacaataaggttgatgtgaactttcaagaaagagaaaagatgtcatgtctcacgttgaggttatgtataagcttagttcccggtacatcctaacccaactactcccccgtaccattttaagtgtgtcaaatatttgaccatccatcttatttaaaaaatttatgaaaaagtttagaaaaataagtcacgcataaagtactattcatattttatcatctaataacaataaaaatattaattataaaaaaaatcaaaaaagatggatggtcaaacattggacactaaaacccacaactatacttaaaatgggacggagggactagatatcacttaaaccaactgttctcctgttctagtattgttgctgtggtggagccaatggagccattgaggctaggttactaacaacatttctagtggttgaccaatttgttttgaagctatctacagggcagacaccatcgtcggagtctgtacggccacccaacaagcccccatttgctccaccactgtgttgctgtgagtatctgtatatacgtgtactgaaaagagcgatggttcccaaacactatggtgtccaccattatatatgaacatggataccataagatcattgaatacccttaatgtgcactccagtaaatgagaatttgcttgctcctttaggactagttactcccatgtgatggtttggtggcaactcttcatcatccgcacgctatctttttgcaccgtgtatattaaggatgtaatatatcatccatatcttcattgtactatagctagttttgtttatatgcatgagtgggaatgtgggttgtgatatatatatgagcatgatgcaatcaagtgtgcctaactttgtaaattcgatttatgctaaactaaatcaccaactttgatttagtctaaactaatcatgttcaagcttgataaggagtttgcaacattcacatgtaaatcgtcaataagaaatcagattcatgatgtggaagatgtatatattcattacaggcagcaaaaaggtgtgatacatatatttttgtaaaccgatcaaaactacgaggtttctctgttgggccaacaaaacaaaataagataaaagtttgactaattttgttttattcgagatgatgtgtaattttgaattacttctgttatattgcctgctatttcttgtctacttgtgtcttttgtctcctgctgttttcctacaacttgcttcttgttccttgtgaataaatagagattagatgtggatccatattttttgctcttggggtaaaaaaagctaaaggtgtgtgctccattttccattttttttatattataccatggagattggattgttgatttcgtcagaagtgtacagaaccaattatcaattaactggctacagttcgtcatataaaacaagagttgtcggttgaacggcggatggatcagaagaaaccaatggcaatctgtctttctcatcaaacttttcccaattcatcctaatcctattgtgtactggtctacaagatatttcagaatgatcatgctttttatgctctttagtcctgtgtaatctttagcgggttttaggtagttcattaaaaccagacctctacatccaacacacatgtacatggccaaaacttagcagcttctaatttactatggttgtgtgggagtagatagaacttacaacttgagatactaaaaaacaagaggagatgtgtgcacgcctctaacagaggtagggttccatttatatatatagtgcgctgactaggatcagcgccttcttcttagcctattaattaaggggaatagccatggttggaaggccagctgattaggggcctacctctactaggatgggacactcccatttcgccccggagagccacatggatgcattaggccacctggattcaggggcatgaatctgtaggtggtgacactaaatctagttggtatgaagtgcggccatttagactggccttgtccaccctcctctttaaatggttcatattgcccttcaaccgactaaggggcttcaatggttggcccttgtaggttcctccctccaagaaccacaacaacgaaggcggaggtttctcacttatcctactttgtttcctcccttcgggccctagacatgtccatgaggatccaattcacaccctccgtagctcagggtgtcccatcaaagccttattggtttggtcgaggttggggcatatatatattcactgctctataatgttagctcgctagcagtcattcagtttgttgcgttgcgtatcagcggttaagtcaagttcaatgttttgaaagcaaccatctctatagtccaaattgaataaagaactccaaatttcacatgtacaaggggctgaatgatatccacaaatgccagcataatgtttaatatcaatcatctagactttttaattatccctatatatattaggtatgtacaacaacaaaaatgaactggcccatagcttcgctaagtagggaagagagaaaagcattgactatccactaaacatcaactcttagcaaaagattcaacagaacagaaaatcagggaaagtattaatgatcatagtcattatgttgtatgacaaatttatagatcagttaaggaggtcaaactaggctcaacagttgaacttgaccttatgcccaagtcgttccttcgtgcaattccatatcatttctttctcatccatgtttgcacaaaatgacgaggaactagatcctgatcttttggtagttactgcataggtcgattatgaagacttgacgttgatgatccaaaaacaatcgaacccctcgcaatcatcacttctcttttggttatcaactaggccgaaacacgattgacctcacaggttggggctccacaaaactgaactaagcagcgaaactgcaattgcagattaatctaaataaaacccaaccctaactcgatgacggctaacgattatatggttactagggtcggcgacccccctggacgcatccctaatattctccaacacgatacatagtccaatgcgtcaaaagacggtgatgtagcacccaggctgattctggatgcccacttgtttcgatgattcctagacttagaaagaattttggcattacactagatgtgttggaaaggtcatcttgttagcttttaatttcaagcatatgtagaacgtcgaaaatgaaatccaattgagatctgagcgacgattttagtacggactccttctggattctgaggtgaacttgaacttgatatgaattgagcatccatctcctagcctctctgcaagtgcttgctacctctccctcatgtgtatccaaaggagtgatgagctcatcacaaaaggtgctatgagtaatgccttgttaaggttgtacctgccccgtccctgtagcaagcattacatcagaattgtgtcctgtaaatgtataaatctctatcgtattttcgaaactaaacctgtagcattaagtggcgagtggaaatctccagcctctttttacattataggcaattgattacttataattttttacaggaaagttcaaccttacatcatattgaagaagaaataactggatgaaatatgtatagagtggaatagtaagtatgaaattctgaagtcacacttctctgtaacgtgacagtaggacaagcaatccattatgccctttttttccagcaccctatcaaacgtacatacagagatcattctaatccacctttataccaaatctaatctcgatcagttttccaccttatgaaatatttgttctagacatctatcagttttcaaagtggtacaatttaatccaagcaccctctccatgcattccaaacaagatagaaagaaagagctcgaagaaatgcaaccccaaacacctagatttgcatggacagctagccaagattatggcctaaagcctaatgatggcacaaagatgcagcagatgcttttcattaagctacggccccagcttgctttcatcttttggcagaagttgcactagatgtggcggatcagaattggcaggttggatggcctagctctatggcctggttgataactggtgtctggacagtagctgctcgtccataatgcctacaaccttgtacacaagctccaggggttactgataccagaaccctcactactaccctttctcaatcttgagttttgaccatggtgtgctccgtcaaacatggatggaacctgggccagcatgagatcaagagaaacagaagtcaggtttaggactgaggatatgcataagcttggttcccagtacctcctatccctacaagctcactcaaatggactgatctcttgctgatctagttgttgcgagatatatttgtatgcgttctgaaaaaaagcatgagcaggcatggctttgaaacactatggcgtccatttatatggaaatggacttcttatggtccaagactgcttttaatgtgcatttcagtacatgagagtttgattgcacctttagggtcgtatcttcattgtattgaagaagaaataactggatgaaatatgtattgagtgtggaaaagaatctgaagtcacacttcttcgtaacatgacagtaggagaagtataccattaattatgccctttttttggagcgccatatcagacttacgtacagatcgagatcattctaatccacctttacgcctaatctaatcttgatcagttttccaccttatcaaatatttgatccagacatctatcagttttcaaagtggtatattaatataatttaaaccaagcacccttagctcagctccatgcacattctaaacaagacagaaggaaaaagctcaaagaaatgcaatgccaaacacctagatttgcatggacagcaagccaagattgtggcctaaagcttcatgatggcgcaaagatacattggagaattttcgtcaagctacggccccagcttgccttcatcttttagcagaaggtgcaatagacgttctggagcattttggcagaggttggaagacctagctctatgcctctttggcttggttcataactggtgtctggatgattaccacgttgtacccaagctccaggggttactggttgcagaacccttactactactgtatagcattgccagtttccaatcttgaatatggtttaggaaccttggccagcatgagatcaagagaaaaagaggtcaggttttggactgaggatatgaataaacttggttcccagaacctcctaaccccacaacctcactcaaaccgactgatctctggttcatcgcgttgttgcgagatatttgtatgcgtacgtacgttctgaaaaaatggatgaacatgcatggtttcgaaacactatggtgtccacgtatatggaattcatagacatctttaaaggtccaatatatactgcattttagtgcacctttaggagtagttcctcccatttgatggttgatggtttggtagaaaaacccttcatcaataccgttttgcactatacatattgtaatcgatcgtacgtatcttcattacttgcagtatagttagttttattttgtatgattcggaatgagggctgtggtatatatgtgtctaagataaaacgctgctgcggttcaagcttaatatatgtgattgtgagacattcacctagaaatcgtcagtacgatatcagattcatgatgtggaggatatatatttattatatgcaaggaaaggtacgttcagtacctcctaagcactgtaaaggcacttttctgacaaacagatagaaaattttaataatcgcgaacaatcagcatgcacgagctagctacgtaccattgtgagataattgtatatctaccatcgcaaatgaataaaatttgctgaaatatcacgagcgacaaaaaaatactagtcttaactaggacgtgtttcttggaataccatcttggaccattttaatcctgggcttcttaggctgtcttcaccgttaggtgttcccaaccggaatagtaaatacggaaaacggaacgatccattaatggattaatttgttttttaagcaacttttgtatacaaattttttttaaaaaaaacaccgtttagcggtttgaaaagcgtgcgtgtgaaaaacgagggagaggggttgggaaaaaggggtgccgaacaaacccttagtcatccctccgacaaatctgttattttgttatggtggatatgcaattttctcataccattgtcaagcaagggacctgacatggatataatcgatcaccatcatatgcaacatattaattaacaacatgggctacctgaaagtggccataatccgtatggagaaaacattggttaaaatagtttgatatatattactcaaatgtgaccagggagagcttgctataagggagagcttaaataatcaaatataaatggttcaggagatatcttgaaattatatatatctggtaatggccagcttgggtagggaccagacaacccagctggcccaccctgattttaccatattgggctgggctggacaatcatgaagatatttttctctaataataattttggaccaacccataccaagaaattttttatgcaataaattttgcctttgtttaaattataagttccagtaaaaaaattcaaggttattgcattacccagatatggtaaaagctcccgtgtgctaacaaatgttaccgtgcgtatgtgatcacactcagtaatgtcccaaatgataccgggtgtttgttctgacacccggtaacataggagcataccgtgcgctgcagttgcacacacggtaacatagaaatataacgggtgcattcgtacacggtataaaatagtgttcccgcgtgttgtgggacgcacggtatggtacataatattcccatgcgcttttgtctattcctcaccggaaatgtgctcggtaaagtgatgaagccgttgagtgtacgttgtgggtaggggtgaaaacgggacgggtatttcccgcccgactgcccgaccgtattaatttgggacaaattcgggtcagaaattcgggtacccgaaattttatatggatatagggttcgaatacgggttatttttggtggatatgggatcggattcgggagcgcagtatccgacggatacggattatccagtaaaaaatacggatactacccgaatatatatacggatagtacccgtattacgtagtctgtacaaccagccaaccagatttgaggcaagctagccaaaaagccaacaaccaggcccaaaactcaccggcccaatagtattgctaacccgaggaaataggagagagatgaggagaccgagtggagtgattgttcgtctgttcctattcctgggcggcggcggctcctggctcctgccgtcacgggctcttggcgacggcgtctcctcctggctcctgccgcggccgcgcccttgcgacggctgccagcggcgccacccgcgccggcggcgccggctcccacggtgctcgtcaccaccgctgctgcacggcctgcgtcggtcgccatctccgtcgtgccgtcctgccgtgtgcaggcctgccgtgacagccgtgtgcgccggtcgtcgtctcctactgatgatttgagtgtcttgtccttaaatatggtttacgtgaaatggtttatgtttcctagttggctcaagactcttgtgaaatggtgatgtttcctggttggcatctggcaagacatgtttctgagtattatggtattatgtactggagtactatgtggctgtgagcctgtgactgtaatgactataagtctccgttatgaagaattggtgatattttggcatgtggctgtgactgacgtactgtactacttttagcttgtggctgtgagcctgtcacgtactgtactacggtgtcttgtttcctaagccctaatgacctaatataatcgcattatggatatagatttgttgaatggttattgtctatatggtatttatgattgtttcttcgacttgatatccgaataagtatttataaccgagagtgtacgtatccatttgggtacgtattcggtccatatttttgcccgatattatccgaacttatatccgtattcgacgctatccgtgtctgacccgattccgattatacaatgtgggttaggatatgagaagtgtgagatccgacccaacccgacccgatttcacccctagttgtggggagagaataccttgtccattgaccacagtcacaaaaaaaaaaaaaaaaaaaaaactacatcaatttgaggatcctctttatactctatatattgttcacaactccttcaaaacaggtcacctatctcagaatattgcgagcagctgaaatgctagcgcacaccagtacaagctcagtcgtgtgtggcacagcgatcacaaagcatttagctacctgtgttcagcttctgatttcaagttctaggttgggcaatcaggataatgatgaccagggtacgtatcaaagcctcttcgctccgccatgaatgatgatcaagttctctctctcagggtgtgtttagttcacgctaaaattggatgtttggttgaaattggaacgatgtgacggaaaagttgaaaatttatgtgtgtaggaaggttttgatgtgatgaaaaagttgaaagtttgataagaaaagtttacaactaaacacggtgtcagttacaaacaggcgttgttcctccagaaatcaaaagtccagcttgtttgaatggaagcaagcagaaaacatgtatcttcagtcagcgcgctcaggataattcccaccgggtcctgagaaatttgacatggtaaagtggtacgcctagccgtagcaaaatgtttgatctgaacaatgaaggaagggaacagaggccacgtctcacgcagacatcaagcacaagcttggttcccagtacctcctaaccctacaagagctcacttaaaccgactgctctctggttctacctgtcgttgcagcggtggagccagtggtgccgttgaacccgagcgactaacaacgtttttcggtggtcggccaattttttgtttttagacatgttgacatttatctgtagtggagaaatcagaggcggagtccgggcagccacccaatcagcctaggagctggctccgccgctgtgttattgtgagtatctgcatatatgtgcgctaaaaagaggatgattcccgagcactgtggtgtccacgtgtatatatggatatggacaccttaagatcattgactgcccttaatgtcagttcagtctatgtgggttaattctaaaaaaaaaaaaaactctatgagggtttggctgcttctttacaagtagttcctcccatactatggtttggtggctacccttcattatctacgtgctattttttttactatgtattttaaggttgtatgtaacttatcaaatataactttttttactatagctagttttgtttatatgcacgattgggaaaggtgtgatacatatatttttgtaaacagatcgaaactacaaggtttctctattgggtcaagaaaacaaattaagagaaaactttgtctaattttattttattcgacaagaagtaacaatccttttccgatgatgcctaattttgagttatttctattatattccctgctatttattgtctacttgtgcattttatctcatgctgttttccaactgctagcttcttgttcctcatgaataaatagagattagatgtgaatctttattctttgctgttggggtcaaaaagcataaggtgcgtggtccattttccgtttgctattttaccttgaagattggattgttggtttcttctggagtggaaacaactgattctttcaattaattggctaccagttgctcaataaggcagtggaacaagagttgttggttgaacggcagatggaccagatgaaaccaatgacaatctttatctttgtcctcaaaggcagagaatagagacgcgtggtaacacacatgtctttatctttatcttagataatgaattaaaaccgggtctctacgacatctaacacacgtgttgactggtaactcagaacagtggctcactagagcgcttgcaatagcactctggaacactattgccaattcagcaagattcagaagagagcagagtaagcagagaaaactagtgatgctcagagaactcgagacacagtttgtgccgctcaaatactgccgcaacttttctggttttttcctttctcttactccctccatcctaaaatataagtatttttaggaatgaatctggatatattttgggacggaggtggtattatatatgcaaggactacaactaaaacaccccgatttctttgccacgatctgatctgtacgcatgcaccatcccacgtccacgcaaatgaatgcgatctaccaaagtttatgcaatgactgggcacgacgaggacatagtaagtctctgcccaaagcaatcctaagtgaaggcctaacaaccttaagatcgtgcacataaaggtttgactgaaaaacaaacatgtcatacagctaactgaaaaaaaaatgcagtttgcacaagctttactccaataacatatacacggcaaaaatatagctgcatctagtgtcctaatattttgttaggacaatataattgcccctaataactaagtatgtctgtgagggtaaacggaacgaacaacttgagataatagaaaacaagaggagatgtcccctcaaagcccatcagcgcctctaac

SEQ ID NO: 11604 - DNA, 787 bp, Oryza sativa
gtgcgccatccgcccgcggcccgtcacaggtatcccctcacctgtgacgggccgaaaggaaaacccgtcagaggtataccagtgacgagttttgcttccaacccgtcactggtatcccctcacctgtgacgggccgatacattagaagccgtcagaggtgatgggccgccacctgtgacggctttcatttctggcccgtcacaggtaagcggataccagtgacgggcagttggcagttggtggaagattgccagatgccgttgtatgatggatgcaagtcgaagcacagcaagttgtcatgcgtgttggaactcatgaagcttaaggctagtaatggctggtcggacaagagttttacagaactccttgagctgttaaaggatctgttgccagaggggaacaatttacctcagacgacatatgaagcgaagcaagtattatgtccgttgggcctggaggtcagaagaattcatgcatgtccgaacgactgcattttgtattacaaggaatacgctgacttggatgtctgccctatctgtggggcatcaaggtacaaacgagcaaagagtgaaggtgaaggaagtaagtcaaagaggggaggcccagcaaaggtggtgtggtatctcccaattgcggagcgcatgaagagaatgtttgcgaacaaggaacaagctaagcttgtgcgctggcatgccgaagaacggaaagtcgatactatgctgaggcacccagcagattcagtacagtggaggacaatcgataggatttaccaggaattctcaaatga

SEQ ID NO: 11605 - DNA, 1116 bp, Oryza sativa
ctctataaaaacataattttttacatcgccagaaattataaaaacatcttttttacatcacaataaattatctagccaagttcatgagtctatttggcatgaaaacgtcctttcttgttcattatttctgcaagaataaaggcgcacacttcgcctctgatagcgggggggttgatgggtgagatcttgaagccagctctacctttctgtttaataaataagaggttaattagcacgttttgaatagtaatgtagatattgaaatgagcttattcgccattagcaacaacctcagggtcgaaatctttcacctctcttagaagtgttgacatgttgtggcacacgtggaaaccacattggtctccgatctgttgtgcgcatgcaaacttggtgtcatgataaagttcgttcttgccctccttgtgcctaccacccttttccacatatgggccccaagccatatttaaggccttggtgatttcactgaaatcataatctttggacttattggagttaaggtaggtaaccctactccacttaggtacgatgactaggagaatccaatgtcgcctgtgcagtggttatgtagcattagtactaagaaccttaacttcaaaaacaatatacacgaagggtattgtcctcttactcttggttgtgtgcgcacatgatgtactccttgtcttgatgggcccataaacaccggttgacatagtcaaccacctcagtgaagctctgtcgtaaattaacctcattcaccatggatggatcaaggaacccaacctgattaccatggcgacgactctcgatccaacacaaccttaaaatatttacgtattagaactaatttaattaggagatatagtccagtcatatcacaagtatagaaggtatgcacttacaaggagtagcattttagaagaccagtgtccaacttccggatcctgaaaaggtcgaagaggtcatcaaagcctatagttatataggcaggcgacgataggaacggctggtggtcgtgatgtccaactatggatgactccctcattttccgcttggcattgcttagttccatgtattgcttatgtagctctcggcaagcaatacccatcacagcta

SEQ ID NO: 11606 - DNA, 745 bp, Oryza sativa
  unsure (1)..(745): unsure at all n locations
aggcaagccggtcggtgaagacgtagacgcccaacaacggcggcataataggccagccgtgcaggcgaaagcaccagtcggcagcggcgaaggcaagccggtcggtgaagacgtagacgcccaacaacggcggcataaaggccagccgtgcaggcggaaacaccagtcggcagcggcgaaggcaagccggtcggtgaagacgtagacgcccaacaacggcggcataaaggccagccgtgcaggcggaaacaccagtcggcagcggcgaaggcaagccggtcggtgaagacgtagacgcccaacaacggcggcataataggccagccgtgcaggcggaagcaccagtcggcagcggcgaaggcaagccggtcggtgaagacgtagacgcccaacaacggcggcataaaggccagccgtgcaggcggaagcaccagtcggcagcggcgaaggcatgccggtcggtgacgacgtagacgcccaacaacggcggcataaaggccagccgtgcaggcggaaacaccagtcggcagcggcgaaggcaagccggtcggtgaagacgtagacgcccaacaacggcggcataaaggccagccgtgcaggcggaaacaccaatcggcagcggcgaaagcaagccggtcggtgaagacgtagacgcccaacaacggtggcatataggccagccgtgcaggcggaaacaccantcggcggcggcgaagcaaacccgtcggtgaagactaaacgccca

SEQ ID NO: 11607 - DNA, 8513 bp, Oryza sativa
ttgtggataattgattttagttactggcactggttttttcagccgaactcatccacagatcatctcccgacatcccaaatcatccacaatcccaaatcattcacaacaacaaaatcatcatccacaatcccaaatcatccacaacaacatatatagccaacaaaaaatcatccacaaattaagagggaaaaaaaggaaaagaaaaagaaaaacatccggccggccgaccctccgcgtgcgcccggccgcctaccgcccagcagccgccgcgacccctctgtcacgcccctccacgtgcgccctaccacctgccacccggcggccgcgcctccctcagccgccgcaagcccgccctgctcgctcgcccactgccgcgtgcgagaatagagagaggaaagggaaaggataagaaaagagaggaggagaataagggaagagatggttgctagaggataagtacgaggaattatatactatgcaccgatttttaattccggttggtgtttctaatcgggaataaaaaaagtagggggcaaacacttttttaaccgggactatgtttagtcccggttagtgtgttaccaaccgggactaaagatcataaaatggttatgggcttttcaaccgaggctaaagatgatttttagttatgattctttttggaaccggaattattgtggttttcgtccaacccagtaaagatcggttcttcaatagtggtggttgcttgatctctgctctgtctatctctctctccgtgaacttgtgaccttgaccaagagaggagagagagtggagatagttgtggacagatttgagcccattggtggtagttgaggcgaatggagaacagaggatacacttctactatttactagtgcactaccttcgtgtttgtttttttactggtcagagacccaggtttgcgtcgcccacagtcatccgtcgtcatttgcacggctccaatcttacccgacatcaccttcctcgactctgctctgcgcggcataaccggcattgtttatcgctgtgttgcattgtgtgctattggcctgatcacagtgcatgcccatatggccatatgtgacaagccttcgtaggatggaacatgtctactatgccaagcttcgggttgccgctagctgcatgcgtcgtccccttcggaccgccactacaagttatgtgtggcttatatgacacaggttataatgtcactatatcatctaatttatgacattttatttgaagcattttaacttaatgacaataaaaagttgtgtgtcacaataagtgtcatatagctagtctagtgtcatccagtgacaatatttactatgtcataagacctatttatgtgtcacaaattatttattgtattattttaaatatttttgtccatgtaggcaagccttattgccacatcagattttcttttctcattttcagatgggccaacctggtgctagcccaacagccgcttacccgaaatgggccaacccgtgcgctaggccgagcagccgcgcctaactcagcaaaatggctaaaaaatgttaggagttaggagtcgaacccgcaagctaaaaattgttgggagttgcgtgaaaaaattgtcaaaaacaaagttatatgacttatcgaaatctaccaattttattttagttatttctccatctgagtttgattgatctatataaaatttgaattttaaaatataagaaattcaaatatatatttttttgtgtagtaaatgatttcaaatgaaaaaattgtcaacaaaaaatttgtataacttatcaagatctacaacttttgttttggtcattttgctatatgactttgtttcaataatttgaatttgaatttcaaattatgactacttcaaacaatattttcaaatactaaatgatttcaactgaaaaagtcatcaataacaaagttgtataactcataaatatctataacttttattttggtcatatcttcatctggcaaagtgatattaacattgttcacaaaatttacaaatctctcttatagtttataaaaccatattaaaattttgtgaacaatcttactatcgcttcgtcgaatgaacaaatgaccaaaataaaaattgtagattcagatggattatacaactttgttgttgatgaatttttcagttgaagtcgttcactaataaaaaaattctatttgaagttctcaaactttgaatttcaaattcaaattgttcaaatagagtcagatggagaaatgacaaaaataaaaaatttccgtctcgatgatttatacaactttagttttggtgacttttccatttgaaatcatttattaaccccaatttttattcgaaattatcaatttttgaaaattcaaaatttgtattgttcaaatgaacttatttgtaaaaaggactaatacaatagttgtagatctcgattagttctataattttattatttatgattttttcatttgaaacaaaaaaaatcgacctaaaattacatttaatgttttcataaattgaaattaaaaaaaaaacatatgatcattcctgtttcggcccaaatggcccaactatttctgaccgtccatcttcgatctaatggttctgatcgccgtccctaaccctagccctatataaaaccctcctctccacccctcctctctctctctctctccaccctcagccgccacactcccatccattctcctctcctttcctctcctctcctctccggcggtgggtatcggcgatgacagcgtgcggcggcgtcctccttcgccgcttaccacgccgcctctatctccgccgccaccacgctcgggagcggtggatctgctagatcccgggcctagggcggctagatcgagcggcggcaatccccgggcggctcgaggacggcgtgcggctgcatcgacgggcccaaccgctagccgattccaaaccacgttggccacagcatcctcgcgccgcccgctgaccacccccccttcctcgtgctcctccgcgcatagcagcagccgggtcagagagagtgccgacacggcgtggacgcgtccgcaaatgccagtgctggtcctcacgctgatagctagtaggcccattaggcttgtttagtgtaaatgagacccaaatttccccatctgagtcatctgaccatctcctccaacctccgccaatccccatccccaatccccatcggcggacgggggctgctgtggtgcgcgccgcgcgggagggcagggtgaggtgaggagggcgcggccaccaggcttccagagctgcggctgtggcatctgctccggcaaggcggcagcacgaccagccgccatggcccaaatgggcaggcgcgcagcgcaggaagagcagagacagaggcagggtgggatgaatggcacaacagcagtgcaggcgtgcagcacccagcgacgacagcaagcaagcgacaagccaacaagccaagcatccatcactccatcaacaggtgcctacatatgtgaacattaatcaatctttggtactatatctatctatactcagtactgtacttcctatttgtgatgtattgttgaaagcatgaatcttaggaagttgaggtattttttgagtacctactcttctatctagtttacaaatagatgatgaatcatcaacttataattagttcttgtttaccgtgcttaatgtagacttgttgtgataatattgcatcgtataataacatgcattgagatttttcgttatgtgctaacttctgtggtaattcgtaggccacacctaaaattttttccgtcctccgccactggtgtggctgtgatgcatcaagcgccggtggttgatatggccgagacttctgtgccgaatcttggcatgaagcccaagatctctgaacggacaagcaacaccaaggccacaatgggcacaaggtgagcttgtttatttcttgtattaaagaaagctgaacggttctgctcgttcatagcttgatgtcacattccttttaatcttagagcaagagatgcttttgtatgattaaggatgaatctggattcgattttgtatggaataactcttcatttttgtgtgcaatatgtggactaaggctaaggctaaataatacttttgattaaggatgaatccttacggatgctgccgtcatgcacgttgtccacctgtgcgttgtcatgcggcagataaacgggctggagcagcaatacgtatgaacataaggtatttgctataatcgtaggctttagtccagacatgataattttgttgttgtcctgaaatttattatctttattttatagttgctgctcatacaatacatgtgaggattctaccattaaatgcacaatgacccaatttgaggatcagtttagcactataaaacctgatgggattcaagtcagatgccgtaaggtacttgttcttttttgcactggacttcggacaactctgtctgtttctatcaatgaaactgcggccaatgttttctaacgtaaatgcaatgccccgcgggggtttacttgagtctactaaattttgcttactcatgtattataggattcatagatacattatgccactggggtacatgtaattcaagtacaataagaaactactcaattgtttggcagcaattttgcatcatcagatgctgaatagtaagcactcctactcaattaggttcagatgatattttggtgacactgaacttgcgaccattgtgcttgtgggatgttatttaggtgctgctgtgcttctggccgttgtgctgttgctgctgtgcttttggccattgcgctactgctgctgtgatgctattgcagatgtgctgctgttgctctcgcagtagcaggaatatgaaatttgagagtttggatatgtactgaattggtggatggatgtaatgatattgcatttcaagacttctggaatgtgaaatgcatgtgacattgcaatcatttgtggaatgttaattcatttgaatctgattttgtatgtgctgaaatatagtatctgggctgaattgtatgggctgaaaaaatatcagttgagctttgtgggctgaaaaaattatttgggctggaaaaatatatgggctaaattgtgggggtggaaaaatcatatgggctgaattgtgcgggttggaaaaatcatatgggccgaattggtgtgggttgaaaatttgtacaggctgcattcataaacaaacaagcaaaaaatatactgggccagctagcaacaaccccagaaaaaatatatttgtggcccatgagctacatgggctttagcaggccgaatcttattttgtgactttttttttaaccatgtcaactgttatgtcagctgccacgtggcaagccccaggattttatgacaataaagcattgtcaaatgcttgtgacaataaatgtacaaacgtcacatactaaatttatgacgtggctttttgacgtttggaattacgtcaactgatttcatatattatgacataataaaatgttaaaaatccacacacctcttatagtgcgtggtatcgctgctcatgcttacttggcactgcatctacatgaaactgttgttgtggcccctttggcgatagcatcaccactctcgtcagactttcaccatcatcaacttttatccaataccccaaatcacaaatataccggccgatgcattaagaaccggtactaaagctatttataatcggttctaaaagcctaggtacctagaaatatatatctttagccccagttggtgttaccaactgatattaaaaatacatctttagaaccggtttgcagcaccaaccggtactaatttttgtggatctttagtcttggttactgttatccgatactaaagatatttttagcactggttgataatatcaatcgggactaaagatatttttaatacaagttggttgttaccaaccagtactaaaaatgcctctagagttagttcaaaatgaaaatacctttatccaagttaaacgtgtggagtaggtaagatggtaacacagataatggttgagatgcgagatcttaagttcgaatcccacatcctatatattttttatttagtatgcatctttagatcttaagtctcggttactataaccgagattaaaaagagtttagaatcggtattaaagatcatttctctagtgtgtggattggttataagttttacgctttctttaaccactcttatttattgtagtctattagggattatggaatatcaaagttctggatacatgtgtagctcacgattcaatgacaaacatagttgtcggcaagaattcttagagtgtgttttcaggtcaaaaattaaaagtttggttgaaattggaacgaagtgacggaaaagttggaggtttatatgtgtagaaaagttttgatgtgatgaaaaaaattgaaaatttgaagaaaaaatttggaactaaacaaggccttaatttgcaaggaaaatttacaatgtgagctacctccaccagatgaatcaaataggtccccgttatctacatgtgcattttgcctatatttttcccgcatttccccaactgctcttattcaagccagtttattagctaatttggtggaatatcaattatagtatggtacgtcgaactttgtaagatgtgaagaacttgtcaaagttctgggtaggtgtgtactcgctgaagatgccattgtctccgggtatcactacttgcaaggacaaatgacaattaattgatgagctaccgccacatgattttaacgcatgttttcaaacctctcttcgtcgttgtttattacggaattctaggaatctcaaagttctggatagatgtgaacgtacgtagctctcaagattccattgcttaaaaaacagggttatatatgcaagaatcctttgcacgttacccagatgcgcaatgcctatatatatttattacgcatttcttcaactgctcatattcaaggtagtttattagccaatttgagataatatcagtgatagtatggcagctcgaactttgtaaaatgggaacaacttgtcagagttttgggtagatgtctaggtcgaacaagattcaatttgtttcacaaatacgaatcggattctttattagtttttacgaaattgataatacacaattctgaaattacggactttccatttttaatttgaaataactaatttaatttgaaattttgaaaccacaaatgtgaagttgtaactaacgtgtgcgcttcttttagctagagtcagtataataaaaaaaatataaaacctacatatttaagctatgattaaaatttaaaatatatctctatactctataatacccgtgcatcgtacgggttagcggctagtgtaactaatgcatgggctttggaccatgtgtagagctatattttgcatgaaaacttgcacttctctctttttttttatatatatctcctttctacctaagctatagttggcttatactctcactggaaagttgacgtgcaacttttataacttttactacctccgtctcaaaatgtggataggtcttatctcattctaagttactagacgggggagaagtacattgtttttttctattataatatataaaataaataaatatttttttacttttagtacggtactttttttctattatatatatatatatatatatatagacacacacacattatcctattgtatttaaacaatgacatgctctttaaaatatatgtttgactatgtatagtcaatgatatattttgaagaccatatcattattcaaaacgtcataattaaccggagggagttgccaactattaaaattgctcttaggcaacttggaatatcaaacgatgcaaaatgtgaagatcttgttaatgttctgggtaaatgtgtagctcaagataccatttgtttaacaaatatagttatctggaggaatactttcctaggacaacttacaactaatcttgttactcccactcgattggatcatatagcttccggttatcaacatgtgcgttggctatatctttttacgtgtttcttcaaccactcttatttaagggagtttatgaggcaatttgatgtaatatctgttggcggatggcatgaggctcttcaaccaaacctgccgaaacccatggcgaaggctatagagcaagaacggcgcaaggcgaagagtcgtacaagcgccaggccagaggcgtctcagacgaagggtgcaaggcgaagactatctgccgaaggaggatgacttcgtcttgacaagttcgcccctgcgagggccgaggaagcctttttggcccatcaggccggcgatcgccagacggcccatcaggggcccatgagcccctataacattatgtacccctgtaaatgcctctttggtaagggtaatcatgtaaattcccctgtacaacctaaaccctagtaataagaacctgtaatggggctataaatagtcccctagggccgggctgcagga

SEQ ID NO: 11608 - DNA, 8701 bp, Oryza sativa
ttggcatgccttgggccgggcctcaggccatattgctatctatattcagaacccatccactaatttgctatctgactttttttttccgtctatatattaaccgtggcatggtgcccgggggtgggggggatacatctcgatgctttgctaggtcgctctagctagctagccagccaaccgctccattccaatggctatgcatccacgcctcttgccgccagtcaccatgcacggctgcaattaaatctgcaagtgaaacattgattgacgctgacgatcatctggttgcatctacgtgtaaaagagaatgtgagaagcagcaccagcacatcacgttcgtcgtccgatctttcttcatccttgccacagctcaatccaatttgccatatgttgttagtgagtagtgacaagcgaggaccttttagcttactttgttaggtttctttctccgatcctcttctcagagcttagagattgagcttggatcattggacgaagctgcatcaagcccattttgccgactcacttgccatatgcatccatgatcaactaattgttgaatggtaagatttacaccaatatttgtagttttgcagcctttgtaatttatatgagttcaaccactaattaaaagcattactcttttcattagtaatttaacctgcccttaatatcatgtcattgagaaagtttgtatcggttggcaaaaaaaggaaaaggagagggaaaacagtggatgatttgatagaatcatagaagagggcaatggataaattttaaggtaatattataaagcctattacgtaaatattgtttttgacgtaattcaagtgctaagcagtaacaccttatatatctatataaattattatttagatgttatattaaggggctcctattttgataggaacattaatagctcacttcgacggtagaaaatactcaccatactttgtggagaaaatatgaaggaggagaagaaccgttcatcctcacttcattatcttcttaattaaaagtatatagtgtttgtgtatatgcgctgaattcggaagtagattcagaaatgttttccattggttacacctttagacattgtttacaaattgcttgttcaagaaacaaccgaattttattgtagcacacaaggactagtctgctccctgaacagataattggacttggataggggcttctttcctgatgcatcctaaccctaccgcacactgatttactagctagaggttatctttctgcatgaacagaagtcatcactgcagaaactgaattagttcaatgtgagatgaactggtgaggatcagtctttgtgtatggatgtacataaatggatgtggttcaccgcatttcatgggcttcaacagccttcaattagttgatttgatatatgatagcttttcatttggagagtactattggtgaaatggaagagagacagtggagaaaagataattgttgctacatatgacaacagtgagagtcaacttttagcatttatcaaaggaaattttgatgtatggagtgaagaaaagaaaacaagagtgataaaaaaaattatttcggtgcagtaataattaaaaggctttgttgtgtcaactattatagaaagatagtttttaagtgatatttattaaatatataaaagctttcctacatgcccttacattaattcttgaagcttgggttagtttctaccctgcccaaataattaaatataattaaattataacctaattaatacttcgttgtaaaaaggatgatgtactacagtacagtgggtaggccaacaccccaactattaatcataaattaacaccaaatattcaggattttaatcacccaatatcaaatcccatataaattaaatgtctcattttgttcatcacaaaatatattaatcaaaacccttgatttcacaggattgagctcatttccagccagagaaaggacatgaagacaaactcactcgatcacttgtattaatcgattacccttttctttgttgtaatagtttttttttttttgccttcgtataattatgtttgattcgcttggctttgattcggaaaaagaaccccatacactaaaatccacacgttttttaatttttgtgccatttaagtgtgttaaagccttcattgctgaacactttttaactgccagagcatattttctaacaatatttgttctgagctcttctttttctttgtcttgcaaattggatcactatacaagccatggaaataaagatcaacagattttgttaccttgcgtaactcgacgtctgttgacagtatacgcattaattttcttgcacggaagaatcaaaacaagttgaaaaaatgtggtgcatacagtccactttaacaaacttttatccattcatgtccaaatcgattaggtgtgagtcacaataaatgttctatgcaaacaagctaatcacaattatgaacagcaaaaaaaattgtgtccgttcttgagatcactttagtctttatagctatatatagaaaccacccatagatagctatccctctcataaacaaattgatagttaagattttctgcaacaaaaatatggcttccaacaaggtagtgttctcagtgttgcttctcgccgtcgtctccgtgctcgcggcgacggcgaccatggcggagtaccaccaccaagaccaggtggtctacaccccgggcccgctctgtcagccaggaatgggctacccgatgtacccgctcccgcgttgccgggcgttggtgaagcgccagtgcgtcggccgtggcacggccgccgccgccgagcaggtccggcgagactgctgccggcagctcgccgccgtcgacgacagctggtgcaggtgcgaggcgatcagccacatgctgggaggcatctacagggagctcggcgcccccgatgtcgggcaccccatgtccgaggtgttccgcggctgccggagaggggacttggagcgcgcggcggcgagcctcccggcgttctgcaacgtggacatccccaacggcggaggtggtgtctgctactggctggcgagatctggctactagctaggctactgtagctagctgtgcatgtatgtggtgtggttactaaaataattagtgttttccttttgtttggaagcatatgtgtggtgaataaatgatgaactccgatgttcctctctataaatcttgatgattcgctagctatccgtacgtcgttgttctttgatttgatgatgagattgaaaaatggaatgtcatgctaaggagggtgcccatgtcggtggccggaatggtgccgctgcagggctgtggtggccatagggtcgtcggcatggtgaccgtgccgacggtgtattgctatgcagcctgaagatccccctctatagtaaggccacttattttagaacgaaaagagtgattctaattttcacatccacgattgctgcgtccctatgtatctgaagacaatctatctatctattctatatctatactaattgggcattttccagagctctcacgttatactaattgggcacttttccagagctctcacgtcaatcagattaatctgaccattgattaactagatcgtaaaatcatgaccgtagattaaatattataactatggacctttaattaaagcccaacacgtgtctgggccaccattcaatctatacaggcttccttcaaggtctacaaattgtacccatatcggtctcagcagtcggactcgactctgcacgcgacgagatcacaacacggcaggctacgtcgatctacttgaccctgcagccgaggaactccgtcgaccggatgcattggcgaggaagtgttttatcgatccaagatattgatctctgcaggtacgatggctatttaaaatactcaagtgagcaagatctgattcaatctttttagggtttcattcagttgtttcttacatgtttctcatctaaactaactataaattaatttaagattaattaacaggatacctttgtgcattgtagatgtaatgatgaatcatcttatatgcatcagtcgattgtagatgcgatggtcaccgatggataacctagattcaaacagaactttggatttattgatgaatatgtaaacacctgaatttaattatagggtcaactcccacatcatgtaatatgatattcttgatttttttattttaattgaaataaagaattaattatgttgctgatcttttttttattgctaatgagaaagttcactataaattaataacaagttttaagtggacatttcctttttccagataagttaaacatatatcgctaacaaatctgctccatgcttcatccaaatacatttgtttaagtgaatctatgatttctcgaaattttaatttagcatactaatttaatgtatgatgtaaaagtgctaattaaaatcgcgtatctaaaaacaggagcatagtaccaaattaggagaccacacaaggacaatataggtagtgattaattccaaaattcaaaattattaaaacatggaaatgacttatgcttcagatgtgtgacgatatatattactttcgaattttgttattttcaaatctacctggaaatctgcagatgatctcagcagttaattagcagctcaagctacctggaaatctgtagatgatgcgcgtgatcatggacttctacatatgtgctatacttaatttttgtttgtaaattgtgtgtccatctgaaacataaaaatatgatacccttagaatactctagggtgaaatgctataatgggatatccgtacgtttgtggatgaaatctgtaaccctaatataccagaagtatttatgcgctattgctgggaattatatatttatagtaatgccgttaagaaataccaatagccaccgcaccatcgccgccccaatctggtcagggtcgtgggcatcgaccctgcgacctcgagggagaaggaaggccccattgtcaccatccttgcagctgcgcggttttcggctgaccgctcgggcggcagcgaggcggaggagggtggaagacgggggtgaggaggaaggcgctggttgccgccgaccgtgtcggccctgcccctggagcgacacggggcccccgttagtccgacatatgacaaactttttgtgtatggcttttattgatgtcatgaacgaacagaatgtccaggaagcagatggactagggagtctaaggcgaacttggtaagatctggaatggactgtgctgctacaaggatggcaagggatgctatttgacaggtcatgaaactaatacctagttatcatatttaacaagccacgtacgtacgtaatagaaattactaagaacattacataaaaaaaatagaatttcaagaacaaaactatagaagagaggaacgtcgtccattccaccttttattacttattactagcggtcaacccgtgcattgcacgggttactgtgaatgacaaaatattaaaatttcactggataatgataaaatatattgttaaactcataagttaaattttgtttaaaagaaagttgatacaaaacactttcatttaaattatagtggccaaaaacataattagtaatttcttatataacccattctaatatttcttctattactttatgttttttttgaaattacataatttcaaaatttagtattagaaatatagatttatactcgttttgctgtctcttgtgagcattttgctataaaatagtttagcaattttgaattaatatgtacagaaacaaacttggtttggatttaacctttttcacgatttgatgattcctattgtggagattatgggtaccccatatccacacggcatggttatccgactagtaataggggataacatatatgtatgaaatatgtaacagatcatgacttgggtattacgtttccctgtatattatggaacggcctaaagtcctggcttgataagattgtaaagtagatttaggaaaccgataccgtgttggttaaggtttctatcttgtaatcctgccccccatcctatataaggtgggcaggaggccctctagggggcatatgtcacaacctgatcgtcagatctatactacacccggcggattcaaatccccaaacaggagtagggtattacctctcattgagagggcctgaacctgtctaaatcctttgtctctgcatccatccacttttaggtctcgtgtgctacccccttttattattgccgaaatcatgtttcgacagttggcgcgccaggtaggggttgcgtcgagtttcctatcaacaagcgcgatggaatcaatttcatgagtcgccgacttcgttttcgctttgggagttttcacttcctttccgtcgaccacttcttcaagctcctcttctctaacttgatccaaatcagtcagggggaaactcaatctgatttttatcattatttatcgtattgatttttaatcccagattaatctcttgctattttttgttgttgttcgcatataattacgcggcactattgaggcgattgatgctggtcatggactcgaggcgtctcagctttccggtcgatcggccgcgagtccactctgccggcttgtcttcgccaccgccattgctgataacaacaacgacttcaccgccggcctgcctccgtcgccgccgattggtgcctccgcctacacggctggcctattataccgccgctgttgcgcgtctacgacttcaccgccggcctgccttcatcgccgccgactggtgtcctcgcctgcacggctggcctattatgccgccgctattgggcgtctacgacttcaccgccggcctgcctccgtcgccgccgactggtgtcctcgcctatacggttggttggtcacaccaccgttcatgggcatccacgtcttcaccgaccggctggccttcgccgccgccgactggtgtttccgcctgcacggctggcctattatgctgccgctgttgggcatctacgacttcaccaccggcctgcctccgtcgccgccgactggtgtcttcgcctatatggttggttggtcacaccaccgttgttgggcgtctacgtcttcaccgccggcctgcctccgtcgccgccgattggtgccttcgcctacacggctggcctattatgccgccgctgttgggcgtctacgacttcaccaccggcctgcctccgtcgccgccgactggagtcctcgcctatacggtcggttggtcacaccaccgttgatgggcatcgtcatctacaccgccggcctgcctccgtcgccgccgactggtgtccccgcctatacggtcggttggtcacaccaccgttcatgggtgtccacgtcttcaccgaccggctggccttcgccgactggtgtttctgcctgcacggctggcctattatgccactgttgttggacgtctacatcttcaccgttggctcaccttcgttgccgtcgactggtgtttccgcttacacggctggcctattatgccgccattagtgggcatcttcgctttcaccgtcgaccgccttcgtcgccgccgactggtgtcttcattgttattgatggacgactttgttccctcattggccacttctgccatcaccaaggggaatattacaaagctaagtcatcatttattttattctttatatgacatttttccttttcctctgcctcacgacatcaattggtcttccattgagtagtgagtcgggggctacagatgttatatcatattttttataatatttatcttgattgcttgcgacataatctgagtacaaaagtacctatcgagttatggagttctatcttcctatgctttccatttggtttgccaatggatggttgcctttgggccgattcctagcacccgggagctcgttggatggaccgagtaacgcaaggtgctaagtattattcggaataaatcaaaagcatagagatgagataaatttattttctgctcttaataattgcaaaagtacccgagtagtaaattctgattcgtgaaactttgttctattaatggcgaactcatgtcactcatatgcatgtctgggaagtgcctaggccgactcccgatgcttgggggctatgactagtcggacagagcgtttaaacgtaatgaatcatctgctcggggaaatcaaaattgacaagaggagaaatacatatttataaatattttaaaatacttgattttttctcgagtattatatttatatcagatactactcatcctatatgtttgttctgcaggatccagatccagatatgcataaaagggattcatggctttaagcttatctcttacgctccaggaatggatcagtcagaacatcaccaccggctcgcctcgaccgccgccgactggtgcttccgcctgcacggctggcctattatgccgccgttgttgggcgtctacgtcttcaccgaccggccgcctcgtccgccgccgactggtgcttccgcctgcacggctggcctattatgccgccgttgttgggcgtctacgtcttcaccgaccggcttgccttcgccgccgccgactggtgtttccgcctgcacggctggcctttatgccaccgttgttgggcgtctacgtcttcaccgactggcttgccttcgccgctgccgattggagcttccgcctgcacgg

SEQ ID NO: 11609 - DNA, 6134 bp, Oryza sativa
cctttatgctgccgttattgggcgtctacgtcttcaccgaccggcttgccttcgccgctgccgactggtgcttccgcctgcacggctggcctattatgccgccgttgttgggcatctacgtcttcaccgaccggcttgccttcgccgctgccggctggtgtttccacctgcacggctggcctttatgccgccgttgttgggcgtctacgtcttcaccgaccggcttgccttcgccgctgccgactggtgtttccgcctgcacggctggcctttatgccgccgttgttgggcgtctacgtcttcaccgaccggcttgccttcgccgctgccgactggtgcttccgcctgcacggctggcctattatgccgccgttgttgggcgtctacgtcttcaccgaccggcttgccttcgccgctgccgactggtgtttccgcctgcacggctggcctttatgccgccgttgttgggcgtctacgtcttcaccaaccggccgccgcatccgccactgctgactggtgtttccgcctgcacggctggcctttatgccgccgttattgggcgtctacaccgaccggtttgccttcgccgctgccgactggtgttttcgcctgcacggctggcctttatgccgccgttgttgggcgtctacgtcttcaccgaccggccgccttgtccgccgccgactggtgcttccgcctgcacggctggcctattatgccgccgttgttgggcgtctacgtcttcaccgaccggcttgccttcgccgctgccgactggtgtttccgcctgcacggctggcctttatgccgccgttgttgggcgtctacgtcttcaccaaccggccaccgcatccgccgctgactggtgtcaccgcctgcacggctggcctgttataacgccaactgatgctatcttcttcacggctggctacatcgctgtcactactaataggcatcagtatcttcaacacaagctgcctacgtttgccatggctgccgactggtttcttcacttccatggccgcatgattctgctagtgttgattggccttaccatcttcatcaccggtcggtctcgtctgctgctaactagggcccttgcctctacatttggtttatacagctaccactactgatggacatcatcgtcttccgccgtcgactcgtgttcacttcatcacggcaacacaactttgtcatcatggtggagcgacttcatctttattatcttcggatttctacttggacatcttcaacacatatcttcaatcaagcaatgactactcgacgacaagaagctataattctcgactctatgttcagttgtttcccaactaaccaaagagtcgggggctacacaaatataaggctcaaaatttgacaaattttatataagccaatgagtcaactccaggagtcattatcttcatctttgcttcggaacagacattctactccaacaacttcaaatatttcggtttggacgagttggacaacaacatcaactctcctccaagtgaagcatctacaacagctataacattaatttgatggattattgtcactaacatcatctccagcacctctgcttcatcgaccctgacatctccgctgttgctaatggatgattatgttttcgccgacttattatttcaccttgacggttgacctactacgcaactgccgatagaggatctcatcgttatcatcggctgctacatcgctattgactggatcaccgacatcgtcatcttcatcaacatcttgttaagcctcttcaacatagcctactctgctgccgttgatgggaaacttcgtcatcatagtcggctatctctgttgccgctaatcatcattaccgtcggatgcgtttgtcgccgccgattattttcttcatcttcatgattggtgggtttcgccatcaccgttgatgcgcgtctatgtcttcatcgtcggtttgcttttgtcaccaccgactgttcttttgttgttgttgggcgcctacatcttcactgctagctgacctgactgttgccgactggtttcttcgcctccatggttatgcaacttcattacctttgattggtgtcactgtttttactaccactgacattttccgttacttctgatgagcaatttcgtcttcatgttggtcatttcatctccatgccgactgcatcagctattgccaatagacaattttgactatgacagaaggacaagctatatgctcaggggctcatcaactcaagcgtgaggattatatctccaatttggacttgttccggatacattccacatggattcatagtcatgagtctattttatatgctcaaagactggaccaattattattccccgtaagggctatcaaccgaatacttgcgccagtcgggattcaattattatattacccggaagatttattactcgggagcatgttatatgcgtcatcctttaaagggtgtcgaaggcatattttttggcctaggcctaatatgtctgcagcccatattttcaggtgtggcctatcacgttcttttagggacttaggcactttttgcttaggccaaagtgcgcgtgatcaagtgcccaataccttaaaatccttttataccacagttattcaacttttttaggagttggtacaatgcatcttaaaaggtgtcaaacagtaaagctttatatagctgtcccgctgacttttttatataagtcaaggtgctgtttgggtttttaagcaattgattggatacaatatcattgctttttgccacgtaagtgtgcatttttattgaccaatattatggcttaggctgattatatattgtagtcattttccaggcggttggtaaatcctttatgagtttatttactcggattttataccacatatgccatatatttccaggtgtggtggaaccatgtgtcttctagggacttaagcacatctgttaaagcagtgtgcgcatggggtatgcccaatactttggaaatttctttattcacagcattcaagcttctttatagttgttttgctatgtgaactttcaaagatgttgtcaactttaggttgtacgcatcatattttgccaagcagtcggtatatcacttggattatattattcggggattcacaccgcatatgctatatattgatatcaagtcacttggttgattacaattatcaaaaccactcagttggtacatctatttgatgcacctgactttaatttttcagcccttccacagtctttatatttggtaaaagtactcgggagatcatggcgaggatgattgaagcactcggctttggagtaatctagttcgagagaagattatctttccgactgtgaaggtctcaggggctactgtggagattatgggtaccccatatccacacggcatggttatccgactagtaataggggataacatatatgtatgaaatatgtaacagatcatgacttgggtattacgtttccctgtatattatggaacggcctaaagtcctggcttgataagattgtaaagtagatttaggaaaccgataccgtgttggttaaggtttctatcttgtaatcctgccccccatcctatataaggtgggcaggaggccctctagggggctaagaagacaacctgatcgtcagatctatactacacccggcggattcaaatccccaaacaggagtagggtattacctctcattgagagggcctgaacctgtctaaatcctttgtctctgcatccatccacttttaggtctcgtgtgctacccccttttattattgccgaaatcatgtttcgacacctatattcgtagttattaaatatcaagttgtattccatgtggagtagtctcaaatatatatagcatcttcataatttagttttaaaattcctaattaaaaaatattacactctgtttgaagtcttaattattgttttatcgtgattaaaaattattccaaattttggcgtgggaagattatagtagagggaatcgtactaataatttatatattacttgtaataaccatagtttaagcaggagttaatgtaattcatagggtagaatgacacacaagcataatactacttattttcatattaaatcatctaagctaagtggaaagaaaagagaaaagaatctattcctatatttctagtatacatcttatacatacatcctaactataagattaactagctaataccctcttttcgatgccctcctggtacttcgagaagccacccctgactaccgagttccttacgacaggtcgtcatgaccatacaaccggagctaaatacggaggagtaccctccccaggaaattaacttaggactatatacacacgcggaggaatacccgtactgacctgtcaccatcagcgactcacctctcttccgtagcatataacccaaataatcatacccagtaatttagacaccacgcctaattaccagatactactctaatatcatcatcatgacatagagtaattacataagcaaacactatacccgtaccattgcatctcctatataagctagcagtataatcaatataacttgaatataaagtaaagttggcattcatatacttggaaagtattacaataccagaattgaataaagaagaatattctaaataaagtacaagtcttacaaaagaagaaaggagaactgctagagccatgcccaaactcttccgaagacttccagactctgatttctattctattcctactccactagcttgagaatgctaaactaagcttgagagagtatgagagaactttgctcgaagtgtgtgaagaaagtgaggagatgaaggccttaaataagcaggtaatgatggttatgacggttggaaaggtcggtaataccctccaatcgccatagggaagcaatccacaccgtctatcgccaaccctggatccatcggctgcacggcgggttcggccgaaccaggcggtgggtttgtccgaatgaggggacggcccaacccagcccattttcggctggcggcctcctcttctgctgttcacttcagacttgtgaattttgacccaattggtcatgtcatttctgcattcttggcccactcattgataagtctgattctcctcatcgtccgattgattgattgtctgttgtgatgttgattctcctccattttatgttcattctctgcaagaggttagtaatcccagtactagtggaatatttattattctaacacaaatatgcattgcaaggataactagctctctattattttggtagtattgacggtcgaaactgatcgctaacgacagtcaacagtggcgtcggagcgtcaggctgggcatgcagaggcggctgggtgcggaacggttgtgcgtggaggcggttgggtgcgtattgacgatcgtaatcgatcagttttgcaagttaatattactaaaataaaggagaactagttatacttgcaatgcatatttgtcgtagaataaactattttcaagtaccactaggattctaacgtcttgcagagaataaacacaaaagggaggatagtcgacaacaaaatagacgatcactcaatcagatgctatcgagaatcagacttatggacaaatgggctgagaaaaccaaatttaaaagatccaacaagcccaaaattcactattttggataaaggaggcagagaggaagcgatctaccgaagatgggccaggtcggcccagcccatggttcagccgaaccttgcgtggcgccgtcagatgcagcgtttggtgggacggctgggattgatcccaatgatggttggagggcgtttccgacctttccaaccgtcataagctgcctagaaaaggccttcacctcactccctccatgacacactcaagcaagaagctccaagctctctcttaagtttagtttagtattctagtgctagtggagcaggaataaaatagtttctttagtcctcggagccttcggaagaattcgggtatggctctagtagctcttccttcttttgtaagacttgtacaattattagaatattcttcaaaatatatttacagtactttacttcactctgattattggagtacccactttccaatgtattatttga

SEQ ID NO: 11610 - DNA, 715 bp, Oryza sativa
gatttttaaggacaatataattgtttcaccgggactcatgcttgttctgactgtgagcctaatgttacctttacatgcccttacattgtctattttttatcgttttatgagatcttccaaacaacttgatctgtcttaatgtttttttgctagctcctttcttggatatctggtaaatggttaggccgaagtatgaactttgccttattgtttcaaagaaaatgtaacaactcctggaaaagtctaattttggttgccctttattttgctgaccgtattggcacacatctaattctgctgttcctttctggcaggttcttatgaacttagcaaatgacaacccatctggttgtgaattgattgcgtcatgtggtggacttaacaccatggcctccttgatcatgaagcatttcccctcattttgttttgtcgtggacaacaactataacacgagagatgtcaatcttgatcatgagttatcatcttctcaaaacagcaaggcacaccaggtcaaaattaagcaattgcgagatcatgaacttgattttctggttgccatattgggcttgcttgttaaccttgtagagaaggatagccttaataggtaagtccctcacatgcttccttccatttgctcaattcatatcagtgttactgttctggcagttccttggggtcaggactcagaaacatccaattaatgttcatgttctct

SEQ ID NO: 11611 - DNA, 711 bp, Oryza sativa
tagatgtctctccaactattatcagctagtgctctatctagacgcaccttgacatttgatctaccttctcttcggttatcataagtataggggacccctgagaagcccaagtcaaccagctcacatatttgtaacacatctcggaaagctctcatttgagcctcacctcttttagaaacagaaaaatgttcaaattgccaaagagtctcattgaaatctccaataatcatccaagggaggggggaggactgtttgagatccaggagccgagaccataaacgatgtctattctccactctcggttctccgtacacaaaggttacatgacatagaggatcttccggagacaaacgcatatacgcatcaacatatctttcattcacactcttaacatccataaagatagactcatgccaaagagagcaagaccaccactcaaaccatcactattacatccaacaaaaccttttaaacctaatctagaacgaagtctgcggattctttcaatcttctgtctcgtttcactgaggaaaaccacctgggaatttgcctctttcaccaaggcaatgagatcacgaactgtcgtggcattcccaataccacgacaattccatgccaagcaattcattgctcctgacgagaccctatcataggtcccgtcagtttaccagcggccccatggctggttgcctccgaattagacacctccga

SEQ ID NO: 11612 - DNA, 14095 bp, Oryza sativa
  unsure (1)..(14095): unsure at all n locations
actagtggnatcccccatagctaagggcataatagactttagcctttcaaacccaataatccatgcctccaataatccagacaaacaaacaactcacggcttattttatatcagcttattataatccagctcatagcaatctggtttaataatctagattataataatcataagctgaaacaaatagggcctaaaagaatcaaattctaactataaatctaaacttatgtttatttagatttgtagataggatctaatttattttggggctattgcgttcttacccctacttttcaagtctaattgtggtttcgcccttattttttagggtttacgtttttgcctctacttttttgaaacgaagttgagttttgcccctgatttggatggtgagtataacgatgttaagttgagcacgaaaagacatatgtacccttacttgctattacatatttgcccctacttttttaaaaaaaacttgtgtttttattccaaatttgtatcggaaacatgcaacttgttttgaactgagattttgtgaaacaattcaaatatgagctaaacatgatgaaacttgcaagttgttttaaactgggattttgtgaaacaattcaaatctgagctgaatatgaaaaagtatgacaaatacaaattgtaacaaatttttggtataatattgactgaacttcgacacaaccagcacaagtcaggtattggggggggtacaaatgtaatctcaagattcctaaatcatttttcttccttttcatttctattcttttaactcagtattatgggacccactttactctcatccatagtaggggcaaacggtggcttcattggaaaaaaccaggggtaaattcacaaacccaaaaaagtgagggcaaaattgcatttgagattgaaagttggagcattaacgcaattctcctatttattttgttggaacgaaggggtactttcttgtcacacccacaacccgtgtgcgactaatacctgttacaccagttctaaaatataagaacttctaggttgaatatatgcatggattaatactaacaaagtatgcaaaaaaaaaaaattcaaacgcataaaaagattacatgtcattttattggaaggagcaaatgatagttttgcatgacatgacagccggtatccatcgcaactaattaaagtgaatgtatgtaaaattaaatgaaaagaaatattgtaattgattgagaaggagtagttgaagaaattaaatggttgaatgttatatatgtatggttggttgacaagataattaatacaatgtaggttaagaagttgttatattttaagataaatttagtacgttataagttgcttttatcttgggatgtgggagccgagttctatactccatgcatgcatgtccccattgattaattatttctttacttaattatcacttaggttttattatgtctttatgatattgtggtctaaagcaggcgcatgtgtgtgattactattttctactactataatcatacagtaatgaaactattaacttattaattaacttattaattgtaagagcaccttttttttagcatactgataacatttttggcgatcaacattaatattttttatatatattaggtacttaaatttgaggtttgacagcaggcatagggtgtcatatatatatagtagtacatatttttgcttgaagggttccctatatttaagaatgctatctcaatgagtatactggcttatttgagtagtcataaggaccacatggtgacatggacatgaaaatactcaaatggtcgtcatacatacaaacatacatatattttttatgccacactttagtagcctgacatattttattgttaaaagtattttgcaaaagaaaatgagtggtcaaagtatgaatagtgtccgttgtcagtttatttaaaaacagatgggtactatccctaaaattatttttttagcacaaacaaagaatggatttgtttcatgtgaatcgtaacttcccaaaatgaataatctgatttaagtagttgtgttataccttggtggaaacctagctaaataaatgttgaacccgcaacaattatgatctcatatacttgagaaaatttggaaaatacataatacataaaaatcgtgaattgagcgtagctcaactggttaggttcttcgagataaaaacatgtacatacgggtgcttgtaaagggtgcttgtatttacagttaattgttcttttaagtagttaggcgatgtattaagatccgtcggttcagtctttagagatatggtgtgtgtgagtttataggtatgaatgtacgtatatctatatgagcgtcccgtcgatactgtcttttgaaaaaataaataaatataaaaattaacgagtagtattgatcatctaatccatccatatatatacatatatagagcagaattgatttcattgcatacagtatatcttcaattgattgcctctctatttcttatctgcctcgttgcatatatacccttttcttttggaaaaagtacacatgaggtccctcatcttgtcaccgaattacaaaatcattcctcaacccaaaaccagatatatagcatcccttaacttacaaaaccgggtctctaagtccttaggtagttttgaccccggttttgttctacgtggcagctgagtcagcgtgcgacccacatgggtcccacatatcaatgactacttcatttcctctctctacctctcttcctctctcttcttggcaaccgacggcgcgggaagactgaggagcgcagctgacgacaggcggggagaggagcagaggtggagacggacacggcggcggcgccaccgacgatggcctcggtttcgcctcgttctcctctctggtcgacgggaggcgactccagtgctcgcccacgcgtccccctgggtgctgcatcctccgccgctcccaacccggcggtggtggccctcattggaggcaccggctgacgaacaggatctgggcaatgggagaggaggacggcgtcgggcggcgcaaccggagaggaagacggcatcagacggtgccaacctgtagacgaagcgcgtcgcctctctccccgtcggccgctgcccctatccttgcgtcccgcttcccgccaaggacgggctcgaacgtggcggcggcgcggccggctgaggaccgcgcgtggtcggagcagccgctgccagagccgtgcaagcagcgccgccaccgggagcttgagcggcaggaggcagcgacaggcgcgacggcggcggcttgccaggaccaagcgccaccatcgccaggagctggaggggcgggagggatggcgccgggacgggggaggacggccggagcggcagctcattggggctcgacttcgacgacaacggcgaggtcttctgcatgggtcgctcttccactggggctcatatgggctcgctcttccactcctctccctgcccgtcgccgcacgtctctcggcggagctgcagcgggcggcagggcgcggccggagaaggtggagcggcagcgtcagcgggcgagcgtggctgcgaagcggcgacggcgggcgagcaacggctccggacacgggcgaaacagaggagcaggcgagtgcggctgcggaaaggcggcaggcaagaccgctctcggcgcgccgccttgttccagcgctcctcctgctcgcgcacgctgaggcggcctccagcaggcgtggcgccgcgacgcccccaagtcgtcgtcatccctcagcgccgatgaacctcgcagagcccttcccgttgctcacgtcatctcgccgtgagcggtcttaacatctcgcccgccgccgacgcgtcacccccttcttcggtgtcaccgcaccaccacaccgcccgtcgccagcggccctttcccacctcgccccatggtcggcctgtatgagaaaactaggaaagagagagggaggacgaagggagagaacacaggagagagatgatgatgacgtggtcaccctgacgtgtggggcccacgtgggtcccacactcagtcagctgccacatcggataaaatcggagttaaaaccgccgagagatttagtttgcactggttttgttaattgggggatgcgttgtatccggatttgcggttgggggacgattttgtaactcgatgacaagttgagggacctaccgtgtacttttttctttcttttcttttattttctattgggccaaactgggctgctttgcacttgggccgtacaagccatctcaacccatttgcacccacgtcgccgtgcatccgcttccgacccggcctcctccgccgcgccgccgccgaatcgctcctcctctccggccggacggcgagcatctcgccggagcaggtattgatccatctctcatcgtatatccctccctcctccccgcccctcgctcggaacaatcttggactgattaatcgattggttgatttctatccctcactgaattgtcgacttcttgcgagttgcgatattttagaccggggatggatggatggatggattaatctccccaaatggaacactgttggaacattggatttcatgtcgctgtcaatggctgccgggatttgtttattcttggtgcgaattttgtctctcggattatgccagatcccacaccctcacgagcttatctaagcctgtcgcaatcttgcttcggttcattttgtccctttgctcatcgtcctgtcggtatccgtcccccctggatgcttctgggccgtgtagattttagcttaatgtgttcttgggttgccgtctaaatttgggagtaggataacgttgcttggattggtggctagtgtagtggtggtagccagccaagaaaccatttctttccggtgtattattagcaaccggagagagggtgttgtgaattgggaatttcgggattattgctttgagaagagggcagtgatggctgaggaagaagcaaaaaagccggcggtggtagtggccatgaagggtcatccggggtctggcaagtccacggtggcgcgcgccatcgccaccgcgctctgctgcccactcctggacaaggacgatgtccgggactgcacgctgccacttgagcgcgtcgacggccttgctgtcggcatgctcaatgagctctcctatgccgtgttgtggcggatggcagagaggcaggtccagctcggcttgtccgttgttgtggattccccgctgtcacgccgcgctcaccttgacgcgctcacccgcctcccgggtgcccttgttatcgttgtggaatgccagccaggcaatgaagaggaatggcgccgaaggctggagaagcgaggggctgcagtgccagaagatggtggtgatgggtggcataagccgaagacgtggaccgagctggaaaggcttcgggatgggtaccaaggttgcacagattatgaatttggggatgtgccaaggattgttgtggatacaactgatccgacagccaattcagaggcaatttctgtcagggttgtagagtttattggatctattcttgcttgtgaccattaagtctgctattatttcttatcgagcatcaaaaatggggagtaactctaggtcagaatttcattacaaaatgatgatatgttgtcctcttcatgtatagttttcatggtttttgtgttctctttcttgtttatcctgtcccgacttattcaggtcaataggtattcctactctgtttatgaatgttatgtgaatagtgtacatatatgcaactctttctggccaagtttaaatctctttctgatcttaatttctcagaatggacaatgaagttgttgcattttcacattttaaaagaaagggaaatgggaaataagtgaaactacaacactagatcagtgtggattctagtatgcaatgtatttttatgcagtcataactgctttacgttaccattttgtaaattttcacatactttcctactctgtaaatcattcattaagtctttaggaaaatcattaatttgttattgaccattagggtatcctcttgttcatatcatcccttccctgtgttattagtttctttcaggagtcaccattaaattttgtagcaatgttgatttccatgtatgtctaatgggatatttttttctagaatgtttttcaacattaccaaacagctggtgcaaagattaatacaacaggatgtaatcatagctcataactaatggataagtgctatattctttgcaaatttttcatgcttccattaccttagttgatgggattttggaaatttcagaatgagagagatatcatttagttaacctgttatgtttatttattgaactctccagcatgagaaacttcacgcgaaagctggattttagcaatgcttgtggagttaacaagatataccacatgctctagtctttttttattattattttctgtttgacatcttgttattttattgcactgttgtaagacaattttttcctattaccttgtgcgcattccgttaagactaatataaccacctcattttctgttgtttcagtttcctggtgctagatggcatcttctgttcttcagcctggggtgcctgttaccttgcaagaactagagccttcctcagagtccttcagacaaggagcatcgcttagagtaactggagtgtaagtgtacgatgcaactattctaagcctcctatatatttctttctgaacttccactcataggtcctgaattatactaatcttgttgtattttctctagtctgcagtcgtatgatttgaactctgcaattgctgttattcaagacggcggtgcaagcctcaaggtagacactcagaacttgagagagatcagcttccgcacaaattcaacctaccagttcatcggtgaactcctgatcaaaccagataacgatgtatgccgttctcctttcgaaagtccatcagagcctatttgatgcaacaatggaagatactttgataacttatttacatctctgcaggccgttttgcaagcacgcgtaggtaggaatgtcgacggtattgacctgaacctctaccagcaatctttgctcatccgacgacaatatgaagctcaactacggtccaggagagcatgatccaaagccctgtgaatcaggaaaatgttcaatgatctgtctgcttgactgcaatggttcccagttgcaaaggggagcagagtatcataactaaatctctgaaggcagatcatgtcagtaggactaggaccaccataaacattggtggtgagaattgagatgtagagcaaattgtctggttgttttcatgcctggagatttttctgttgcatgactttgttaggaaacatgtacttttcaaatttcatcaaagtgatgcagagaacaggattaactagattggtgaaaaaggtgtcgctcgtatgcagaatcattagtttggacagtgaagtgtgaagcagaaacaaagatagtgccgcagtgtcaatagtctcaattttactacagttatttttgtttctttccttgagaaacgtaggcaaaatctgataaatcattctgaaaatgggatgataattggcaggtggcaagtggcaactgcatggtgtgattcggtaattaatatctgaaggatacagtggatattaacagtacgagaggagtatatgtgtactaatctgaaagtgggagcttacagtattcgtctatcagtaacaacaatatgtttgaataatgaataatagtacaaaccaaactggagaatatttcaaggggtccaataccaacatacaacttcactatcaatatatcatcatgtggtacccttttaaccgatataatgatatgtacaatcagttttttcttaaccggatactggtaactacagtagggctatgatctcttctagttgaaaattcttggttcagcttctacacttgtgtgaactccagtgcatttccgtccgggtcccgagcaaatattgctggtcgccctgatttgctaagtgtgtatttgattcctgcattccaacagtttaaaggcggtcatcaaattgttggcaatggaggataatggaattaatagtttgtactgcaatgcagattaaacattgtaaaggtgcaacaagtgaaatggtaatgctgacacaaagtgtaatggttctaagataaggaaatgaaataatttgtcacggcacttcataaaaatgggaaaatgtttgaaaacattatacggatgtgaatggacgatgctatgatcttaattgactagaacttttaagtagtctaatgagtattactttcaagacaacagaccttttggatgactagcaatggtggtatgtaaaatttaccaaaaacaaaggatgaggttttcaggacatctataaatttctccaaacagggcaggctttcaatttaccacatcagaaaaaaaatagcctgctgtcttagtaggttttactgtaaagatcagtggttttttaataaggctatgaagacaacaagcagagaaacagggcatttactctttatcagttgttgctagtgcactgtataagcaacagataataaagtaaaaattcattagtaccggctttgtcaaagatttcttttaacttcaacacatctttgatcgccatacaggtatgacgatcacgtcccccatgctctgggcgcccagtcaatggatcgggatttggcagctccatcaagtgaatcatctcagaaccaacccagagccaagcacctctgtaaggaagcttgtcggttggcctagcaggattcaccttaagacctaattgataaagaattagttttagtttacaagcagtgaggacatttgctcctgtgtgtcagttttactttacaagcagcatgacacaagaacatgtacaactgataactaactcaccaagcagatctttgtagaaggccattgacctttcaagattttcacataggatcccaacatggtgaatgctaacaactccataagcaggttctgcaccagaaatcatgcatgtttgatttggttcagagaaaaggggcacttactctagctatagccaatatgagtaccaaaaaccaaacaaaagctatacaaaggaaaatgtagtcagcatctcagcacccaaaatttcaaagcaaatgcacattgtgcttatatgactattaattaactttggaattattgtgatgattcttgtttccttgatggaaatagtggcttaactctcttgctcaagacaaaaaagaaagtaaggattgttgagcagttcagtctggtcatggctgtttaacaatctacacaaaaacagttttagtattccatattttgccttgtcagaaccagccaataaaaagcactactggtttgtggttttagatgtaaaaaaactaacatgaattttgcatgtttagagaacatatttcagtgtgattcttcatatcgatgtatgctacatagaactgtaaaattaaatgtatgcacggtacaagcatattgaacatttgcacctctacaacttaaccacaattgcacatatgcctatactctgtaccatcaaatcagcgagtatcaatttcatagtctgcagtctgcactacattatccactctcctccactctaataggcaaagctgcaacccccctagaacttcgaatttgctactaaaagtaatactagtgttgagctaaatagattggtgcacatcgtgatcaaattcccctaccactaaacatcaccaagatttactaactcttgttcatatgtagctccagggtacagttcagagttcagactgatcttgattcttgaaacactcccgaaatcagccagtaaatctttaacaggaacactcaatcgaacagctaccactgcaacatcaagcacccaagaactcactcactcactcaccctgggacgcctcctgcgccgtgacgagttgctccccgccggtggccaccgaaaggcgggtcccgggacggcggcgaggggcggcggaggaggggacgggcggggaggccatggccgacaccttcccggagctggagggggagggggagaggagggcgagagaagagaggcacctcgccgccattgctgctgcctttggatttcttgatttcttcagagttcagggacgcttcgcctgcacaaagctgtgggctttatgggcctctactattttgtgtggctcatatgccattttttttcctcctgcgatttttcccccctttttttaattttggttttgttttttttttctgtttttgttgtccacctgaaaatttcatgaggctgatagccactgaatgacctgaacactcaaaccacaaagctccatagctatgtccacaaccaaggagagaattgtagctaagagcagcgggtacaataaacggtttaagccagcgatagcacatccaacctagcaaaagtgatgagctggatggaaaaaactaggagagagtgccagcggacgactaaattgtcgctgactacacacgaactccaagacaagggaaacagcggaaaaaaaacttatcccatggttgcatgtgaggcaatgcgcgggaacagtaggataaggcgtaaaaaaataataatcaattcattggtgcttgtgcatatagccagcagctatacagacaccatcttctagttatctctatcgctgatgtggtcttttttaccgcccgcagtcgtccgctttattaaactcgctctaataataatatgcagaactacatgcaagagcatctaactaattctatccatcataaactaaactcctctgcattgaataattacgctaactgacgacaataatacacaataacactactgttatgtaaaatcgtgaagagatcacaatctggagggaagcaggagtgtttagcgataagcgagatatagcataatcttttcagtgctttgctgcctcgacagttagaagtagttccccccaggatgcgatcttggtcgcaacccttggaattgatcactttcgatcagttcttctaaacctgtaaatgtgtatatactccccttaatgaaatttggttggcctccttcggctgacccggcgaactgctatgtaaaatacatgtgactaaataagcacagcagaataaggatgtgtttggttatgaattaagataaccagcttagctaacttttatgcagattttatgttgagtgaaatacattacttgtccctaaacttgtgtggtgatgtcacttaggtccgtgaacttgaaaattatacgtttaggtccgtgaacttagtttaatgtaccactccagttcaaacgtcctttgactgcgtttgaccgccaacgtggcataccacataggcaacacttttgctctcagccccttccacatcacaacacgtcacatatatctccttgtagctatatagtgacaccagaatcccccaaaaaaaatcctcaaatcgttattccctctcattcttctccttgcatgtatagaaaatgtggtctcgattagcaattgctattgtgctgcctcccgccgctaatccggccgcactgtcaccgctaaccccgctgcaccgcactgcctcctgccgctaatctcaccgccaaggccgccacaaccgctacctctcgcctccttccgctaaccttaccgtcgaaaccctagccgatttagggatattttgggggatttggttgaaatgcactagtcagggtaagttatgtgcgaagatatatgtggagggggctaagcacgaaagtgttgccggcggttaaacgtggtcaaaggacgattagaccgggggtggcacattaaaccaagttaatggacctaaacgtgtaattttcaagttcacggacctaagtgacactaccccacaagtttaaggaccgggtatatatttcactcttttatgtttgatgaaaaagttctagtttaaggattcaatgtttagttagatgttaaaagtttgaatgtattttagaaacctgatgctagaaatgaagagaaccatgtatgccaatagcattactttcaacattgaaaaaaacacagagagaatatttgcgagggtcatatggttcaaaagtcttatatatgtgcaaatgctgttaatctatacaaagctactgtccaaggcataattcaataaacttgatggtctgagagtggctctgtgatccagctcatcgttcttttcaaagttatgttcttatatttacaatttttgtgtcatatcattctcatattatcagattcattggagataatttaacaaacttgatggtctgagagtggctctgtgatccagctcatcgttcttttcaaaggtatgtttttatatttacaatttctgtgtcatatcattctcatattatcagattcattggagatagttcatttggaagaaaggtgacaatgttcctatgtggttttgtgattttgtccattttcccctgtgataataaaaaagacaataaactgtagaaacctgaactttcaaaaactaataataatggaattgcagtataaagctgggtaatatcaatttgtactaaatcgatctagggataggaacatcattacaagacaacactaacatgcagatgcaacataacatgaaaacatgacattcagatgaaataaagtcagttgtcaaatatcaagggctgtagaaattgagtgaacagcaaaaactttaagatgagcttctaccaacaaccaaagcagtgaaacccacatgaataatgtaacacaagggagcctaaaatggttcggaaaataggaacaaataagttgagtacaaaaaagaataatacgcagctcgttaactcttctgacaacaagcttgcagatatgtcatattgcaattaaagttgctagaagccatagtaggtaagaactattttgatgtatgacatcatacaaacttctgagaacctagcaacgctactaatacctattcctctactcatggcaggcactcactcagaactccgttatactattctcctcatacctagccctcgtggcacgcaagcaactaaaagagccatacaaattagtcaaccctaagctattcccactcacaaaccaaagtaaactaccaagcataccactcattgaaccaatgactattcctgttcaagaacgatacagagtaaactaacagctattgtcgctcctcctacttgtagcacctcatgacttttacttctcgtatcccacaaaagagtaatctgcaatacaatagaatcagcgatatcagcaatatctaaccctaaacagcctcttccagcagattattaactctggctttcagttctcccttcatagaattcaggtccagcctaactgacagtggcggacttagaattttacaaatggggtacgataaactaatctacttataaaacaataaattatctattttttatacaatattatctctaaagaaatataaaaacctgaatatatcataaaaattggactagaaataaactaaatcttatttttatctctagatcccattgtaatgcattgacatgtaactagtaaatagaatgccgtaactcacttgaacaatatatatagctttataatcattggattcatatcaagtgtcgatctctaattcatccataaaatttgttatatgattatatattattcaatattattaatctttatagcattttagattgtgtttaacaaaaatatctttccgcttattaaaaaactagtcaggtaccttatataagtacaataatattaataaatataataattattttttactcatacaaaaacatagataatatatattacgaagcacacacacatgagttagctgctagtattcatgtgcaaataatagtgctggttgtatcaatatttattatcaaaaataaataagaatgagaaaacaacaagaagaagaagatggaacaacagaagaatataaggttaaagttttagtttcactccgtattatgacgaagaacaattttaataatattagtatattatcgattaatatgatcatataccataccatggatgtgggt

SEQ ID NO: 11613 - DNA, 1914 bp, Oryza sativa
tcctccccagacttcccctcctcccaccccaccctccccggcgagcgcgtcgacctctccgcctcgccgatgcgggtcggcgccgcggcggtcacgcggcccgacgcggtggtgcgccccgacggcgtcatccacgggatcgagcggctgctggtcccgcgctccgtgcaggaggatttcaaccgccgccgcagcctcgccgcgatctcggcggtgctcccgacgggggcgcccgaggtggatccgaggacgcaccgcctcaagaagcccgcgccgcccgtcccccccggcgcgccgccggtgctgccgatctgggacgcgatggcgccgggcccatccatcgcgccggcccccgcgccggggcccgggtccgggaaacaccacttcgacgggcacagccaggtgaaggacttcatccagacgctcctcctctacggcggctacaacgagctcgccgacatcctcgtcaacctcacctcgctcgccaccgagatgggccgcctcgtctccgaggggtacgtgctcaccgtgctggcgcccaacgacgaggccatggcgcggctcaccaccgaccagctcagcgagccggggtcgccggagaacatcctctactaccacatgatcccggagtaccagacggaggagagcatgtacaacgcggtgcgccgcttcgggaaggtgaggtacgacacgctgcggctgcccaacaaggtgacggcgagggaggccgacgggtcggtcaagttcggccatggcgagggctccgcctacctgttcgacccggacatctacaccgacgggaggatctccgtgcagggcatcgacgccgtgctcttccctcccaaggacaccgccaccggcggcgaaggctcaggctccggctcgtcgggcgccgctcccgccaggaaggcccccgccgtcaccgcccactccaagtccaagctccgacgaggtcagtaaaaaaatataattagcaatgctggttaattaatttgttgtgattactgattagtacacttgagagggtaaaaacggaagtgagtgtcggtgcggggtgtttttactgttggaggtagtgggtcgctgtcgcgggcagtttgccgggaatcgaagcaaaagacgcatccagctagccaagcatctcaccaacatttttttttggagttaattagtatagcaaagtactcttattaaataatgataaatattactccacttaatcatggcccggcctccatcttaatcgattcatttagctcagcttagctgtgtcacgttgaagtctttaggacagtcagctagtgtgggacccgcagcacagcgaccataaattggcggcacgttattccgttgggtgggggagcgaggtaaataaatgcaagctaggtgccgtggttaattattgctcccatctattctttatagtaatatttcatcttggcacatgcataattaattgtacttatcatccatttaaacatgctactaatcattcctcgtaaacaagcgattcattaatatttatatttctagatacccatatagccaatcttgagtagagaaatagagagtcacgcattaatttcgagaaagtcattaagatgatagtcatatttttaaatctgaaaattttatttttaatagtcatatttcaatccaacaacttatcatcttaatggctttattggatttaatgcatgactcttcatttttccacacaagattggctacataggcatcgagaaatgtaaatattaatgaatcgcttgtttacgaggaatagtagcatgtttaaatagatgataagtacaatcacttatccttggtctgtgtgccaagataaaatataactatcataaatagatggaggaagtaaaatttttagatttaaaaatatgactaataaaagtaata

SEQ ID NO: 11614 - DNA, 1225 bp, Oryza sativa
agctcatatataatggagtatcatatatatacatacatgtggcctctcctttgtccttttctcttgcaggaaacaggtgccattcttgacatgtatcagcaaagctagtagctagccagggtccagggcgggcatgcatgcagtagcaagctatgcctgcactgcatatcatgcatgaatgcatgtgctcgatcggaaatggggtggcagccttggcgtacgcctgccaatttaaccaagccactacatggccggcagactggccactttactttgtcctctccctgttccgcgtacaccgcccggatacatattgccacactgtttgatcgatcgatcgtcgatcgatctgctttgatttctctttttttttttactctcttctcgatcaccggctacagctaccaacccggtccccggcatttttagtttcattgtgtacatcccgtcagtcgtcgttttactgttgcttggtagtcgttctatgtgtggtacgttcggtggttggtctatgagcttcaagttctgatcaggcagcaatggaagatatatactaccagcaagaatttgaatccatctattatatacaaaggcagggctaaatgtaacatcctagcccttttgtttgtatcttgtagtgtggtgatgtgtggtttaggtccgtgtggctagatgtgtttctagtggtggtttaatgctaccttaccccagtttaacccttttaaatgaagcggaactatatgtaaccttttacacgtaggatggtaataaaaagtaagtggatactatgtaaacatgggcctgttcaacattattaagagtggactaacatggattttggaggctatgtgttgagtgttacactaaagaggccaatgcaccttctctatatgcctagaaattataccatattagttggagaaaaatatataaatttacactgtttaatcgtgactttctagaaaaatatattatcgatattagttgtatacaataatatacaattgtaattaatatttataaaaaagaagcaagagatgtttataaaatcttactttatttttaaaatctaggtccatacaaattgtacggaaaaatctgctagctagttatcaaatagatatcgggtgttcatcttttagtttttcatataattttttaaacctcaaaaccagtcttcttcaattcaaaagctttggctgattgttggctagctaggcacaat

SEQ ID NO: 11615 - DNA, 10958 bp, Oryza sativa
ttccgccacctccacgcgacgctgttcccgccccccgccgcggcggccgcggcggcgcgccgccaacgccgcctcccgagctacatcgaggtgctcgacggcgagccgcagatggcgtcgcggtacgcggcgcgcggcgagggcgccatgcttcccgaggtcccgttcgaccggttccgcgtgggctcccagttcttcacactcgcgcggcgccacgccgcgctcgttgtcggcgagcgccgcctctgggacaagttccggcagccgtgcctggaccagaacgcgtgctacccggaggagcactacttcccgacgctgctcgacatggccgaccccgccggcgtcgcgcggtacacgctgacgcacgtcaactgggccggcagcgtgcacggccacccgcacacgtacacggcggcggaggtgtcggcggagctcgtcgccgacctccgccgccccaagaagaacaccacccacgactacatgttcgcgcgcaagttctcgccggattgcctcgccccgctcatggacatcgccgacgccatcctcttcaacgattgatctccattgctgctgctctgctcatcaaaggtaatattcagaaatattcagagattaaagatttattactaattcttgatcatgttcatgaactattcatgatggaatgatgcatgccattttaattaagccataaattttgcaattacgagagcatgaaaatcggcaattagtggagcactattcaaatctgcaatcacaaattcactaagtgaaccaaggcgtcaaagcctcgaatttattttcaaatttggaaaaataaatgcttgaattaagttttgtttgctttcacgcgacagatttgtcagctccgttatcaatccacgtatatatacaaaaaagaaattaagtctgttgcttctgtgatttacaaatgaaaaggacatgtcgattagtcttagcttggtcctgcatttgggcagaaaattatgtacctttctcgcccaaaaaatagaaaaaagaatttaaaagtctctacattttgtaactacatagtccttactctatgagatcatggtacttgcgtgtcaatgtttgacaatgatatcctaacctctacttgatcagagtccttgctaatgctacgcattgtcttccattttgactaataccagttgattttttttgtttcaatcctatccatccatgcaagttttaggttaggtttatgactggttgcttgcacatttgcacagttgcataatcaatcaacctcaacagatctaatgagcctaaattatacacctttttttttccttttgcaggagttgattttgcagaagaagtggcctctgttatttctcccggtgtctgaaacctgagaagttcagagtttcagagtttcagtcccttcctcttctgttcttgccatgatacttggtgtaatcgtctgtagattagaaaaaagaaagcaagtgagcaacaacctaatgcgaagcagcaggtgttgcctggatcatctcatcagataacatgatgatctcatgatccatctatataatcatccaatgcatttgcctagagctagcagcctaaggctgcctgtgcctgaatgcattagctgatgaagtgtcaaatgtcaattagtgttcagtaatcagtactagtatactgcaattaataaacctcttgcaaagctactactacttgtcagctcctgtgcataagaagtaattaagcagacaggtttttgtagcaagtttcatgtgatgacttttgagcagaaataaaataaagaaaatggcagaatcaagcagctggagagagaagagtagcactgcatgcatgaacagatgtgcaaagttaatttacatattaagcgatgcaaagtgtgtgtgattaggggtgcaaatggtgagttgaccccgccagttgcggatcaaggggcttaatgctactatactgtattatctttcacgtcttcacctgaagaaagcaaacgcatttgcatctgattaagcaacatatatattatgcttttgttaatgtttatgtagactgtattgtactactacgttccttcttgcagatgcatatggcaggatccatcctaattaagttacagaagcatgaggtagcatcacagttaagtaggaggattattaggaacaaaagaattttaggggattttgtggagttgatgttaatccgttccgaatgagctaccaatgatccttaattttgcttatacggtgtatgaaatgactgggggctactagctggcgcgtgcgcgccagcagcgagcacctcacctccctaattatctatagtactattagttaacatccatttaactactaatgacgagtaattagggaagattctcaagatttttttttttgggagattgttgtaccaacagattaaaaatttttaagtcagttttgaaaacttttgatttaagatttaaatttaaaagtcaaattttgaaaactttccattcgaatttgaaaactttcaactcagatttgaaaactttcaacttagatttgaaaactttcaacttgagattcgaaaactttcatgtccagatttaaaaaaattgaaaactttcaacttgagattcgaaaactttcaacttagattcgaaaactttcaagtcaagatttgaaaaaattgaaaactttcaacttgagatttgaaaattttcaactcgatatttaaaaactttcaagtccagatttgaaatatttaaaaactttcaacttgagattagaaaattttcaacttgagatttaaaaaatttcaagtccaaattttaaaattttaaagttaagattttaaaaaatactagtaaactaatcactagtaaaaaagactaatctaaactaattacgttacgtacggtacggtagaaacagcgaaaaagaaaaaaaaaagagaaagaaacagcgaaaaaaaggtaccagcgagaaagaaaaaaaaagagagaaactacccagcgaagaaaaggagagagagagtgcgggccgcgtgggccgaaaatgctcgttggcgcgcgcgccaactagcttttccggaaatgactgacccggtcgtaacaggagggttgtacggttatattcattatatattttgataatgtagtatattaataaattccacaaagtactaatattttgaccaaactaatgtaaaactatagatttaattggcaattatatcataaaaatttaacatcaaaattatcataaaagcacatgtttaatatatagtattgcagaattatagatttaacactaattgaactaggggtgagaatggatcgggtagatccactccaaatccattggaaacaaggatatggtatgagattttagaaatctgacggatatggatgcaaatgtggatagtatgatgtggatgcagatgaggatatgatatggtatctctaaaatctgataggccgtttgccggataatgtaaaattatcaacacatgtaacataagttacggtcgggtcagtcatttcatacacatgtaactattgatttcatacacacgtaacatccgataaatttaatctgtttttaaccgattccgcaccatttttgatatccgaaacaatcctcgtctgtattcgcatccgtacactatccgcacttgctccgaatctgctccgttttcacccctaaatttaactcaaaactgcagctagtgtaactccacactaatgtgcatctaaactttaaaatatgtagttttctgttaacttttttacccattagtttttgacttcaccttaaatctacaggttcggaacaaatttagtaaaaaaactatattttgttatatattgtattaaatcagctgttttgtgaaattaagatgtatgtagtcttgtaaaatttaaatatttatcttactcaaatttgaatatccttacttttagtactttatccaatttaatagtagtactacatgtactatgtagaaaacggacaggtgtactcagctaaagcaatagatatagagcaggataataaaccctccatttcgtacttttctctttttaaagtttaatcaagtttataaaaaaatataatagtatttttagtataaaataaatatattattaaaatatactcaatgctagattgaaactaatttgagaatttagatatcggcatatcgctaaattttcctatatttttttttcaaactaaacaaagtttaacaaaagtgttaaacgacgtataatatgaaacgaagggattaatgagcaataactataagcaaccatgttaggtaggtgctcgcacagtctcttgcaagcttagttggggaaaatttttaagtttagttatcacatcagatatacggacacacatttaaagtattaaacgtagtctaataataaaataaattacagattttgctagaaaattgggagacgaatttattaagcctaattaatcatcattaataaatatttactgtagcattaaattgttacattatagcgtaattaggcttaaaaattcacctcgcaacttatatccaatctgtttaattggttatttttatatttaatatttcaggtaggtattaaatatttgatgtgacagcttttgagaatttgccggccgcatacgaggagaatacacctgcgttttcgaatgcaggtgtcgcacgggcacacgtacgtgtgcggcatgcagggagcgacgtatgccacgtggacggcaacgctgcgtttgctggcgcggatgcaccgtgatccgtgggtttgacctgtacgcttgcacatgcgctcgatgcattgagattcggcgagaagaagatgcacatgcgttgtgtgtgtgcacgcctgcatcgttcatgttgttggcactatgtagtattatttacctcatccatcctaaaataacaatgtttcatactaatatataaggttaattattgccagtgagagggagatattatttttatgttttcagtgatgccgacataagaaacaacacattcatttacacatttaattgatgattaaaataactcatataatccattgttctcatttttgttgtttcatacgtattatatgtaagacaaactatattataaacaaaatatgctgacttagataaatatcattacaattcgtctattcgtaaccgtatcactgaaatcttacaaaatagggaccgtgccattgtcgttacgttttgcatccatctccttccttcttcgtatgttctttctctcttcccatcttcttgcattgagatggcagcggtagtagtgcgagcggtgggggtgtcaacgaggccgggaatgaagcaggagtgttggccgagccagcaatgacgacgccgtgcttgtccaccggcacaacgccagacctccgagtagcaagccctttgctctgccccagtttgcatgctcggttgcgtcctcatgctccatccagcactcttgtcctccatagtgctgccctcgccgcaccggtcgcgtgcttggcgatgctgctaatgcgccctcgtctccgctcctccgcatgctcaccgtgtgctcggtgacaccgcccttgccacgacggctgcgtgcctaacagcgctcccaccggcccgctcctctgcagcggaaggactgctcgcactcggcgaagatgggccgctcatcctccccagccgtgcgctcgaggacggcgacgtacggcaaggccccgaggatgcggacgacgattgtgagaggtgccgctccgctacccctctcatgatgatggcgaggggttctcgctatgcagccgcgcgcaggaggacaacgaagatgaggtgctcgtggtcgttgcttctccctcactcccgttctcgcgctctgcaagggtaagcctcatatgttccccatccatgctctcgagaacggcgatgagaggtctgccatggcgtccgcgaccgctgagctcgtgctgccctcgccccagagatctggttgcagctgctcgtgaaaggaagaagatgaatttgacgggtaggtcccacgtgcagatggggggagaagatgaaaaaagtgacggtgatagtatggttctgatttatgtgattttgaatggtatggatactcataaaagaattatagtaatatttatctgaatcaatatatttacattggcatggatccaattaaccctagaggcctagagacaacatatgcatgaattcatctagatgtggcttattttgtcttccacttcattaatttctgcacatcattaaaaatactgacatggcatcctatttaatgggaataaaactcctattggttgtggcctaagacacatatgcatatatacaattaattagcatcttcctttccttttaattcttttttaaaaccttcattcttaatatctctaattttattatatgtatgtattgtatttattagaatgattagatgtgataataatatttttttacttttgcgttagagatagttacgccttatattactaaaattaatcgctacttcctccgtttcataatgttaaactttctaacactgctcatattcgtatagatattaatgaatctaaacatatatgtgtctagattcattaatatttatatgaatgtagataatgctagaaagtcttacattgtgaaacgtagggagtaaatactaaaaattgctacatttctaatactaaataatggattatcctcaacaagaagtttatttttgaaatgaacaagaaattaaaatagtaaaactgcaatcatgaaagctcaaattctagaccaacacacatggatgtgccggatttgggctatcgaaatgaggcctaatttattccaagttcttggatcacatttacgaattacgaccttgttctttgggccttcagtcccagctcatctagtacaaattcctggcctatgtacccggtcctcatcgtttggcttatttcctaataagccaaaacggcttattaggaaataaaaataaatttatgggtaaaacttttataaatgtattctttgtgacttaaaagctaatgttgaaaaagaaattacgttgaaaatatctcaaaatcaatcttaaaattaagcttgaaaatttaaaatttggctttttctttggcttattaggccatcctatgggagcctggctggaattaggcccatctgagacagaaatgggccggtatttgggctttatctaaccagccacatatgtcaattttgcttctctttgggaagcaagcagtccccaattttttctctgttatgaaaatgatttgcgtaagacctaatattggtaaaagtaaagtagtatatataagaaattttattactaagtagtactagtagatgtataacaacaactatttaattgcatcgaattcatcgttagcaagataactataagtagcttccctgtatatgatcgagatctatagttaaaaatacttatatttaggatgaagagagtatttaataacatgccactctttagttgccagaggctatggttctctaaatattatccagatttatagttaaaaatatttacattttaggacacgtacgtgcagtgtcgctcttttgttaccagatcgaggttgcgcttctctaaatgtcatccagatcgaggttgcttatattttgaattaatgacgtgccaatctttagttacgagaggttgcgcttctctgaatctctctccaaacagtggaagattgaaaccctttcaattattttgttttgattccagaccaccactgtatagcgcggcggcggcccagatgacgacgtcgacgaggaggacccagatgacgacgtcgacgaggcggcggctcggcagcgagccaggcgcggcagcggcaacgagcgaccgattcgctttttttattattatttttggtatttttgatttcgtgcggttggtataacacaaccgcatgggataatcgattatcccgtgtggttgaaccgtcctgacacgaaaatgctgattttttcagataattggctctaggcgggccagacaaccacatggaaaaatcaaaatgcccgtttggaaaaatcttgaatgtagttgtgagcgtttctctctcatgatttcagttaaacactagagatggaagcacattgtgacacactgacaacgacaatattgaatcatgattactaacagttattttttcaataaaacataaaaaaaggcatgggtagttttcctgctttttttttgttgacatggttcattaaagaaacccgggtgatctttccccgaaaaaaaaaaagaaacccgggtcttagaagttagaaaatgttaatatggatgaaaataggaaaagctggaatttagaaaccttaaatatactttctcggtaacagtaaaatttcttatagttggaatccttaactaacgctttggtgtctctatgtgatcagttcgttcttctctcaatcgatctccagttttaatcgtttgctagatctccaaaacagagctagagagcatatatagctaactatatagctatatataagccatttctgcaatgctttcgacaacatctgatcgatgtgagcatatccatgcagggccggtcctatgattttgagggccctaagcgaactcatcgcgatgggccctctaaactatatataaaattttataatatatagataataattttacttgcaaaacgataacaaatatatccatatattaaatttaacatgtctggtaattatgaagaaataaaaataacaatatatttgtaacttggaactaatatcattattcattaacttaatgaagaacaaaaccccatcatatcctttgctcccatgaaaagatatttcttcgggcatttcttgatgcaaaatcatcaataacggtattaagatcaatagtgttcaagatatccttctcaattgagcacatacccaagccatttaacctttcttgtgacatagttgatcttaaatagttcttcaaaacttcaagtttgagaaacttctttcagctgaagctaccgtcataggtacagttaagagatttcgataggcaactaaaatatttggatagcaatctgcatccataacgaacttcagaatctcaggcgcgaacatcgaagaatcacacctttaattctgaataaagatcattgatctcaacatcggatgaggtactagactactagtattaggtgttggcccctccaccatcatagacccccggcggtcacctcggctgcatagggccagggccggccctgtatccatgcatgatctgctgtgttcatctgctgtacattctgcatatggcgacaccacctgacgcaacagtgatcttctgctaaaaccactgtatactgccgttgctgctgcctctacctcgtccgtcctgcaataataatgctgcaggatcatgatcatgctccagcttaattagccatattggcagcactgcctcgtcgtcgatatatggaagaaattgtgagagcaacagagctagtacgatcgatttatgtttcagtgttgcagagatcggtcgatcgatggatcaatagtgcatgtacagtactattgatgggagtacgaggaagctgttggccggtgatctgtccatgcatccatctctagctgtattaatatttacgtactctttccgtccaataataataataataataataataataataataataataataataataataataataataataataataatcctacagacgtattccttccgtcctaaaaaagctaacttctggctatgtatctggagcctatatctggatacatagggatagagagagtatctggatatgcagatatattattagaattagatttttgttaggacatggaagtatatatatattgctacacaagagttaattggacatgtttgtgtaattaagtgtctgtactgtgtactggcaaacagtgcatgtctatgcaagcatcatcagtgtgtgagagagatgtagcagctgccagcaaatattgctagctctccaacatagttaacttctgtttgatcctgagcattatgtcattaataacagttcatgcctgcatgtatagtatatgaagaaatattcaatatagttattagatatcctctttgatcatatggatgggtattatttatctcttatatatacgtgtagtcgaaattaactaccgcctcctcctccatgtcagaatataacaattttaactataaatctggataagttcatatcctaattcttagctaaaaattaatagtatattttataacggaagaagtaattagctctagatttgctagaattaattagagaagtcagagttagctaggaatctaagctacatgcacgcccatcttattcatctcatcatatttgttcactaacttctaaaactcactagtaattattatctagagtattttaaatatcatacaaacatgatatatcatttacaattttgttgtattttagaaactcaatatgcaagcaatataaaagcattatctccacatcatttaaacatatatatttaccatttctataatatataatatgtattcatccacatatcctgcaacaaagtaaggcgtatcaacttagtgcacactgaattgaatatccaattgtatgagtgacggctaagatcagattaaccagatgtataataaataagcactccaagttgaagaaattctggaccatgcattcctccacgcatgcatttaatcttcagttcaatttacaactccaaatggttaatttataaattctaaacccttaatcgatgacgcacaagtactagcactactgttcttcgtcgtcgtaattaattagtactccctccgtattttaatgtatgacaccgttgactttttaatcaacgtttgaccatttgtcttattcaaat

SEQ ID NO: 11616 - DNA, 3158 bp, Oryza sativa
tactgaaccaggtcgttagcttgacgtatgcacggtcaaatattttgatttgattgttacaataacattatcggcgatggatgaataataatgccgctctccgcgtttgtgtttagcaataattaaagatcatctatctgatgatagtagctgtcatgatgacaattaattaggtcaattgcgtaaatttcttgtcaaccggtggcttctagtccaatcgtagaacaggtgtggcttgtggttaacgttaacatgcatggctcacactaacctatctcatctgggtagtattcccttgctaggatttcagtgtttggttctaatctctctatcaaaacttggttaatactgccaatactgcatagtgccaaaatgttggtaaggacagaaatgaagtgattgtgtttggtactttggtttggtggttggtgccaaatagtgttaattaatgtgagatgaatatatcagctagcccagcccaatcttactagagtaagctgtttatcaaatgtttgtctttattactttaccaaaattttgaggggtaaatgaatcaaccaaactagctagctagccttgaatctctcgaaacactactatgagaaccaggtgacccaactatacccttttgtctttgccaagaaagaaagagaattacctctctggttcttgcctccaaagggctggaattaaataaactggaatggtacttgttgctccaacaccgtgcagggatctacagcatcataactagtaccctgtagctctcactgcaaggccacaacttctctatcagaacaccgtacaagatgctccagatcagttgctagctagctcgatcacctatctagtagctggtaactgtagaaaaaagtttactgaaacacacaagacagtgttgtttaccttgaaggagcaagcaccgtatcaatcgtgaccaccatcaatgttaggatactgtagacgctgatagattgtacttggagcttgggccccggacagcgatgcaggcgtagtagcagagcagcaaatgcaatgctttggtcttcttccatcagaggggaggagagggggggggaggggggtctcgcttcatcaggtgcccaatcctatcatggatctgaccattcatgtgggtctctctcccttcactctacagctcacacaccaatctcttcattgattgtattttgtcatccttatcagggcttgttcatcttttttttcaatctgttcttccctgcgaaaacggggaaaaaaagatctcaaatacgaatagaattcgtgcaggctacaagtaggtactatcagatatggccgcgtccgaaagttttcttccattatctcagaaaaaaggtacgtggaccataagataaccagacaccagtactctttggatcgaaactaagataataaagtagcaaaaatgaatcacttaagagattatcagccctacctgaacagttgccgactgcagctagtgagtggaaacatcgtccctcagatgacaaccttgacaacacaagcacaaacgaacgcacaaagtttcagagagagaaaaaacatgggtaaaaggagggaattagcatattagcttgcacatgaagatcagctgttcactgtacctggggtatggagttgtcattcagaacacagtttgtccaggacaccttgttgcacataaagctctgatgcccatccaacctggtctggtcctgtggtatgtcaaggcagaaaagatgttgttgagatatgtcagaatatttgtccaaggcaatcaggccaaacagcactgaggacagcaataatcttctgttatttgtcaaacagcagagttctggagataggtcggaatcagagatgatcatgtatatattttcctggtccataaagcaaagctacagaatggggttttcagaccttcaatgatcatcatgtcagtgccatctgactctcaggaattggcaaatagccattcatggatggagcaacacaggagtagctatggcgtcgcactcgcgacaggaacagatcgatcacacgagttaattaaaaaggagaggttacatcgttttaaaaattattggcaacaattcggtgacaaaaagaattttgtagaacccaggctaatcactagcaggcaattacattgtaggacccccaagccatgtacaaaaagaatctggaaaagaatagttcattagctaggtcttttgttctcctgtcggcaattgaatctgtacatgctattgtataggttagtgacttgagagattcaagtgccccatatgttgaatatgtaggaagatctagacttggcaaaacatcccgaaaaaatatttgatgtattgcagctgtatcttgatcattctcgtctgtagaacagcacataagcagcaggtgtctttatactgtcttcagttataggtctcacgcactcatcatcaaacttataccatcccttcccttcttcatgctgcagaaaccaaccagccttgctcgttatcaagacattgaaaaagatggtttaaaggctgggtgtaatgagaatacatgaaagaggaaactcacgtagatgctggcggtgtagtgtccacctcccatatttccatagtgattgctaatagcatacaagcgatagtggcagtctgatagttcactcttgtcaatgatatatgatgacagatccaaatcactaatggggaaatccacaaatgtctcaagcttatttcttgtgaattgggtgtacgagaaccttttgagatgaatgacaagaacttccggtagcctccacagatctaatttcttcatcgcttgttgatgctttttgcagcatgggcagtacctgaatgcaaagcagagaaaaaaagtgggtatcagtaatgcaacaacagtacaacagtacacttccaattcagaatccaaagcaagctagccatgtattgaggtaatattttgcaaaggtaatcaatctatttcagttcatacatacgcacatcaacctattttgggttaacaaaagaaatgaagattgcaaagaaggctattcaataagcagtgaagccaaaagcataacagttgttcctcaggggggcactcatgactcaccacatgtcttctgggcccaacggttcctcttttagaaaggcttccagaca

SEQ ID NO: 11617 - DNA, 717 bp, Oryza sativa
gaaaaccagtttcacccacatcactttaaggcaaagattgcttgttttgcccctcagttcagtggcttcaatcagcatgattcacaggagcttcttgctttcttattggatggcctccatgaagatcttaaccaggtcaagtgcaagccatatgaagaagctaaggatgcaagtgggcgccctgacaaagaagtggctgatgagtactggagtaatcatttagctcgaaatgactctgtaatagttgatacttaccatgtaagttctttaaatttttcatgtgttaaagcaattacactattattttctcctgcttctcctgccattgacccttttctgacatctacttgcaggggcagtacaaatctacattaacttgccctacttgcagtaaaacatctgtcacttttgacccatttatgtacttgtctttgcctgtaccttccacggcaaagaggacaatgactgttacagttttcagcactgatggtagtatagagccaatctcatatgatgtcactgtgccacaatttgggagtcttaatgatcttgttcaggctttaagttctgcttgttcactgggagatgatgaaatcctgctgattacagaggtatgcttttatctccattgagctttggcccttttgcgtttttgccactttctatctcaggttaaacagtatgagtcatattaggccttttacttactggaagtga

SEQ ID NO: 11618 - DNA, 3999 bp, Oryza sativa
atgcatataggccgtgtttagtttcaaatttttcttcaaacttacaactttttcatcacatcgtttcaatttcaactaaattttcaattttggcgtaaactaaacacaaccatgtgctactacgtggtatttcatcacatagaaattaaatgcaagcgactactccaaccgtatttttttttaaaaaaagtcaacctagtaatcctcctcctagatttttttttcgacggagtgtactaagctcagtatagttcaccttacctacactgattgggtgatttgatgtcaagcaccataaaaatataatattactttagtataataaaacataaaataatttgatcagatgaaatacattctaataccacgaatctaaataaccacgtgtcccatccaactcaaccaaagtctggcgatcctctcaacaggaaggacagttcgtccgtttggtccgtacggaattaaggttttgagatttaacagaagagctttgcaatagagcatattctgatttattacactaaaaaaatagagcatattctgattattggagttcacatatcatgggtagatccatgtaacatatatagtagtgttgaggtttcattggaagagctttgcaatagaggattttgactgcagtttatacgatggatagataagggggaaaaagaaaggccaatacctgattgtagttaacatgaaaagataaaatttaaaatagaggattctgattgcagtttacatgatggataggttaaggaaaaaaaattgccaataccgtacctgattgtagttaacatgaacagataaaatctgcaatagaggattctgattgcagtttacatgaaatagataaagaaaataattgccaatgcctaattgcagttcgtacgtgaaaagataaaaaaaactaaaataaaagaaattgaaaacaataaaaaaaagaacaataaaaaaacaagaactaaaaaaagaacttgaaaataaaataaaaataaaaaacaagagcttgaaaataaaaaacaagaacttaaaaaagaacttgaaaataaaataataaaataaaaaagaacttgaaaataaaataaaaataaaaaacaagagcttgataataaaaaacaagaacttaaaaaagaacttgaaaataaaataataaaataaaaatagcaagggcccaaccgggttcgaaccggtaacctattgatctgcagtcaattgctctaccactgagctatggacccttttgtgttgaatatccttatcaaatttgttcctcatttcgatgcatggagctatctacgttttttcttgagaattttctgtgacaatttacgtgacatacatatttattataatgtatatatacatggatcattaaccactcggatgataagtttaatcacgtagtccctacgttcagaagtactatatatgagtcatattttgactatgtaattttaattaagctttcgccaactactaacccccatcaacaatatttagttttttgaccttaaaaatgatattgttggattttcatcccacgaggggatttcctctacagataaaatttatttttttaaaaaataacaatataagttaatacgggacatatcactccacaaacatttaagtttaaatttgacttatacggattacatattataacttatgaaaaaattaaactaaaactagtatacatacattcgcagttatatttgttgtagtttataaaattcgaatttgagcatgcatatctgtcaagtgatcgatatttcttatattaattatcttgttattttttaaaaaataactatttagatgattaaaaaagaaatgagtggatatcaattttttaacttatatgttgactattggatataagtttaataaaaaactatgtaattatcatttatttattgtgacatataactaatttttatatttacataaaatttttaaataggatggatggtaaaaatggagggagtatatgtatgcataaattataatcattgatttaccatgtccaagcgtgtcaatgttggtcagaatgtgttgcaacttaattggaagcgaccaaaaaattaccgaccgggaaaattcccgtatatatatataacaccaacgagatgatgttggcatgtgcggccggtgtgccgtttagataggttgagaaaacgatgatgtgagatgaagtactcaatcgcgagccacgcgcgtaatttcctttttaaaatatagaacaaatacaaacattcgtatacacaataattgtgaccgtaaattcccgattccttttattgtgatatatatatatatatatatatatatatatatatatatatatatatatgtgtgtgtgtgtgtgtgtgtgtgtgtgtgtgtgtgtgtgtgtgtgtgtgtgtgtgtgtgtgtgtgagtgagagtgagagagagaaagcctctcgtgagagatgaaaaatccatctccacaagtctatattagtggaggagtttttttaataatagaatacaatattaacctttaatcaagaagctacagccaattattacaacagtgaaacacaatcttaaaaaaaaaatgagcgcaccaactactaaagacgcacacaacatgaaaagtttctaaaattattgaattatatttgtgaatctgcatccaaagttaacgaaaaactgtataaccgttgacttaagattgtgacatacagccttcactaactttatatattcatcacacttcagtagtttgagcccaagctcagaagccagtatattagtggagtgaggagagagataggcgtcaaccaattcaaccagctgatcagtggccaaacctagctataattaattagcgtagcacgtaggagtacgcgtatatggccggcggcaggttattgccgtcgacttccggcagcaggcagccatccatggccggcttagacggcggcggcgcaccaccggcggcgtgtgacccaaacaacttgccggcggccatcgttcttgtgtttccggtgatggtggtcgcgctgctgtgttggagggcggcgaggacccgccggaacaaggacgagtgccggcggctggcccggcgccggcgctggcgaaggcggcggcggtgtcgtcgaaggtcagggcggtgctcgccgggcaggtgcacgcgtgggtcaaggaggcggagagagtcgtcctcggctgcacgagcagccgctggccctgccggttcgtgaggtgcgaccgccacggcgagcagctgagcgtggtgaggatgaacctggacgaggcgtacgaccgcatccttcccgtcgtcgcccagatcgacaccgcgcaccgcctgcatcacttgctccagctgcaggtatatgtacttcttcatatatactagtatttcacattattagacgtttgagttttgaatagattcatatatatggatttatgtgttacttatatatattcacatgtcagtgaatctagacgagtgatggatatgctaaaatgtttgtaattcgaaatgagaaggtacttcagttttgatttatagtatcatggtattctctctgtctcgaaatatactatgatagtactattttttatctcttatactttatgataaagataacagtactcctcaaaataaattcactttttaaaccaagtacctttagcttttaatagataacgccattaactttgagtacatttaaccattaatgttataaaaatatataattattgtttatttggttgtgatttattttatctgaatatactttaaatgtgatttacattttagtatatttaaataaataaattgaataagaagaatgattaactgatagtaaaagtgaatgatcatttattaaaaattggagggagaattaattaatcaatacaaactttctagatattcgactaaagccaatataattctaaacataaaaaatcaaataggagtatctaatgaagcatctgtccctggcatttcaggtt

SEQ ID NO: 11619 - DNA, 2070 bp, Oryza sativa
agtaattattaattcttttcctatcatttaattcattgttaaatatacttttatgtaggcatataattttacatatttcacaaaagtttttgaataggatgaacggtcaaacatgtgctaaaaagtcaacggtgtcaaacatttcgaaacggagggagtataaaagagaaaaaaaatattatgttacatacaccactcccatggagaggactcggattcgctatgatacatattcgccaatttgacagatgtggatggaaatgtggatgtcctccgaccgtcttccgtatcgtaagcgccatggcgaacttcggagcctcccttctcacccttacccccatctcaaacgggtgaatgccactggttttttttggtttgaaggatcaactggagctgctgcttcatattctcaggaattcaaccgtgctcaagacaatgaggatagaaccaaagcagacggtagttgctggattttgtcctctgacctcagtagatgcattggcttctgcagatggttacaaagttgctaagaaatgtatctttgcaaggaagatcaccgtggtgttgtccagattgcaggagttcggtttgcgaatgctccattgtaccattgatccacaacggcttcatgcaggaatcatgcctggaagctaaatacatagggtttggttattttgatggagctgacaagatctatgcctcgtttctgtgatttgatttatgccatgaagtatagcaattttatccctttgatgcatcatttttttgtttttttagacaaaatcagtggtcaaacatggagaaaggagacgaagataaaggtccatgaacactgcaatttttgtttttggcattcctcattatcaaaaagcgctgaacatcatcatcaacaaaataaaataaaacaaataaaaaaatagaaaagtttaattgctatacatcggtgtttgatcttcactgaccagtataaacaaatttccatccttttttttttccacctccaacaaccaaccagaatgtctgccatccgtctctctcaactcgttctcatgacaccttatttcttcctcttaattaagcttatgtaaaaccatcatcaatttgttcgtccattcatccatccaaccaatcatcatctgtagccttcatttcggttcatgtttcagcgtcatgagttgagcaaaaagcagtggcagatatacatatttgtccatcaagccattgtcgtagtctattggcagctcgcgaatcgcgatcttcggcctaggaagcccatcacttggcatgccccttccaacaacttccctgcaacatgaagcaaaatgatttttaggagatctgaaaggaattttaaaataacaaaccgtaaagccatggagatagatgacagcaattgtatattagtaaatactaattagttgcagaatcagtactgtgtctttatattgttgtgtcggtgttaaattggttccatcaaattattggtactaagtcacatcaccccctgatgacaataatctatatctatcaacagtgacccttgtaatctttgcttgtaatctttgcttgcaatggacatcacatttggctattccataatacttctagaatattatggcacaagtagcaagcatctctacattacatcagtgtcaactactcctgtttttcagttgtctcccattttctttacatcccataacacaattcatagctatgtcaaaattcaggccacgatcgcatagtagtaattaataataggctaatcgctatgtcaaaattcagatattgcaaagtagtaaatcggataaaacaatggtgtttcagctgcatccattccagcgactgtgcgagagagagacagaggaagcgaggcccagacaggtggagtacagccctcccagacacagacgagcggggcccagcaagaacaacaaagcgacaccaacccgggcccacgagtcagcggcgtaactacccccttcccgaatcacgagggcaccatgaaggcatgaatgatcgatccaccaacgcacggaccgtcacactgacagctgggccccatctaag

SEQ ID NO: 11620 - DNA, 621 bp, Oryza sativa
cccctttttccctagtggattattccctttctgcatcattgttacaaattcattgtagtcgatccggccatcctgcagagacgaaacaagagagaagcagacatttgatgtgattcttagtcttctaggctttcagatctcataatgaatgaaatgtccacttacattgtcctgatcaatatctttgatgatatcctccagatgtgcatctcctatgccaaattcctcacaggctttttgtagctcatcttgagtaatgtaaccactgctgtctttatcaaagtatgaaaaccctgcaaaaagattatcttctctctcaactttgttcagatgcatagttgcagcaatgaactccccataatctattgaaccactattatcaatatcagcctgcaagtcgaagaacatatgcatttattatatcttggcccaaaaatatatcatatattacagctaacgtgcctcacaacaatactttcttagaacataaaaggtccattctcacgtactgggaaacttatcagaaccacaaaatttggatgagatacaatagatttacaaataaccactaccaacgtcagaaaatctttgcaagctgctaaaaaaggatgtcaaatacac

SEQ ID NO: 11621 - DNA, 1280 bp, Oryza sativa
gaagtgccatgttcaatctaatctgttggagtctgtctcggtcaaggactctgtcgttcagtgctataaattgaagagcttagggcaaggatctgcaccctgtacaagttccctgaagacaatcttgcaaagccgcaattccaatctgcgtctctcctgcttgtttggcgttctcatggcgtcctctgccggtgggggtgataaagggatcatcactgcgatggttgcccacccgaagccggccgggggaggtgagatcgtcatggcgaatcaaagggaggaggttctgaataaaggtactttagcaatcggggtagcaacaccagatgaaaaccaaaccacgatggaaggtgcgggtactgctgttgaggtggacagtacgactcatcaggggccagcagctttcattgagggggaggttgtggaggaggatgaggacgcaatcgaagtggttatagaggaagaggaagtgcagaaggctggccaatggactatattagcaagattctattccttgaagtctccaaatcttgccgctctctttgaagacatgcgtcgtgcttggcggctgcgatcagacatgacttacaaatcgctgagggataatttgtttatcatatcttttggtgctgagggggattataggtttgttatccaaggtggtccatggattcataggggggatgccctgttggtggcagagtttgatggcatcacctgtccgtcaaaggttactctggatgtgattccagtatgggtgcggatttatgatcttccactggggctaatgacaaaagcaaggggtgagatatatggtagcaaactgggcagagtacaggaggtggatgttggggacgatggccgcaataaacatgacttcttcagtattcgtgttgatctctcagtcaaggggccactaaaggataagttaaccatcaaaatctctgcacaaggtagagtggaaacaagaagttttgcacttcgatatgaaagagtgccacacttctgtttcatatgtggcttcatggggcatgctgataaggactgcgataagagaggtgcaaatgtggagaatccctttcgcttttcagctgatttgagatgctcacccttaaaaccgtttgagcgaaaagttaacaaggtcagagcaatgcagaacactggagcagctcgcaatctgttcttccgtggagctggaagtgctggctcatcgtcttcaaagcagagagatgtggaacaatgggatgaagccattccacccagagtggatgctcatgata

SEQ ID NO: 11622 - DNA, 5733 bp, Oryza sativa
gtggatcccccagtggaatggtcacatctaaatttgtttatttaggtacagaacagaggatttcaaggtaataactttggaagctatgacatagcttccagaaatcagaggacatcgacagccatgtacccaatgccaaccagtcagcagcaagtgtcacctatacgtcgtatgcacaattaattttctcatgattttatttcattgatctactaaattatggggtttattttttatttctctatataagcatgcatgcaaaatgggtatatataatatagttaaaggttatatttactgttctaggcttctaatgtataatcaaaatatattatagtaatcaagttcatgcatgagctatatatgaacctgatcacactgaattccagtaaacattagttttttccccgtatacgcatggagctgtgttagatttcccaaatgatcaatctataggtattaacacacacacacacacacacacacacatacatacacacacacacaatacatatattatcagcttgcataatttattaaattgccttgttcttctgtattcacattatagctagttttatgtattatatatatgcttgtataatagatttaaaatattggtccttttttcttctttacagcccctgagaaaagacagcgtgtcccatctgcatacaacagattcatcaagtgagatttcaagccacacatgcttgcttgaataagtatattttgacaccaaattaaataatagtataaggtgctaaatatatattgataaagaaccataaatagtcgaagtgcaggtacaaactaatccccacttcaaccttttggggaatatgcatgagttcctaagacagattaattatatttctttctatctaccgcagtgtgcaatcaaaaagctccatacactactatatactcgaccctcaggtcgattgtggacacacacacaaaaaaaaaagagtaaaacctgaatataatgattgggtgtttgggggaggggggggggatatttgaactccgacaatgattaatttgtgggcacttcgtaattatatattattatgtctaggctactacttccttttgcgctcctttaatttgtacacataatctagttagggcttgttcgctttcccttcccatggggattcaaaaggggatggggtgtggaagtaatccccgaaatcccttcaatctccatgggcatgggattaaccgaacaaacccttagtgaagtgatcattttggaccacaagttctgttggtaaattttgtggaaatgtactttacaaagttttatgatcggtcgttgtttggtcattggattttggaactttttgctactagattttttttgaagtttatacttttggaataattattcttattgctaggattttgtccggtgaattctttattttgaaagaacatattgcaaatttaacttcttttgtgtgaaaagaaaaggaatcttatttcgagtaatttttttcagtaaatatgaaactctagatattttcaaaaaggctagttattgagtaccataagaaaggtaccaaaacaaaactcacaatgtaacatatgtggttggatatttatttatatttgatcttgagtttttcttcggtttttagcagtatagaggtatatacctctaccgacatgtatacacctcatgcctaacactatgatgcacaaatacctatctgtacctcccaagaaccagaaaagttttgatgttgttgaactgtatacttttattctaattagttcaactattagggatgaatatacttatatattcaaaggcaggagaaaacctcaattaagaatggggttagtgtaagtgcatgttttatgactttggtagaccttagtctattcggaaacgggaaccaataataatatttactatcatcattttcacaagcctttagtctattagacaatattttttatttaaatacatttagtttgctaaaatccaaggaacatatacattatattgactgtggcaatgtagacatacaaatattgaactgagaaaacatgtttttttaaaatggagaaaacaatttaaaacccccagtgtcaaactaagaattcatggaaatgcaattcatatattaagttgtcatacaacatgcattgaccaaaccattttattagagtaatataaatacgctagtttatctagaggttcatgttgcaagattgtaaataagatttcagtaatatatatatgagacttgttcttttaaaataacaaatcgtgtatatatcaaattgttcaatgccacatatatatatatgatgaatgagtaaattcaacttcatttggagtatgtatagctatgctctaattaattatgtgcaccgatttttttttgtccttttggtctgcagcgcgctagctatcatgtatgtacatgtatatatatgtgatgagatctattttagacgcatgcatgtaatatgtgtgttttcttaattggatcgttatgcttctctaatctctctatatacacagacgacagaaacagatatatgtttaaatgcaaaagaattaaatgcaagtatatatgttaaattaagattaaatctcaagaagctgatttaatttaattcttgtcaatatcaacagggaggagatacagaggattaaaaccagcaatcctgagattagccacagggaggcattcagtgctgctgcaaagaacgctagtactctaattgtaaatacttttctctaactaattagatgttgcaggcagtcaggacatactatactccttcatccccaaagatagtgcataaatattttctttcttacttataatacgtccatacatgccaattaactaacaaccccccccccctcctcctctaaattcgttattttaattttacccacaaaatttttttattttaattttattattgttatacggtttagttaagatgaattcactataggaatttgcttagatatatatatttttttagaaaatcatgaattagtaatccgatcatcttttgttagcatacgagtttttttttaaaaaaatatcttatacaactccttctatatttccaaaaggtagcgaacttaaaacctgactaaaaagggagcgaacttaaaaccccactcaaatacggatatgtatttccaaaatcgaacgaacttaaaagcgacttaattatagacggatgacgtaccaaagtaccggcaaaaacatcttcaatttttataatagtagagattaggtgcatgctttgtgttcattatgagtaatctaaacagatcaaagctatgataataattagtatttcttatctttagattagtggtggttgttacttatattttgtgtcttaaagaaaaacttttgtacaattaagctttctgcaattaggatcaactaattaattatgatatctatctataatttctcatgcgtataatatgcagtgggctcatcttccccggctccattttggcctcagcgtcgccgacggcggcggcggcggcggcagcaactaatcgcggcggcgcggcctgccggccggccaccgatcgccggcgtgcacgccggcgcgcggcggcggccggtcgagaatgcgcgcgcaggagggacgacgacgatatattattatcgcgtgtgcccctctctcttcgccgcgtaattaattaatcagttaattaattacgtacgacctactgtgttatgctatcgatccgtgttaattaattacctacgtatcttgattaattagtctcgtattatacgtactattatacgtacgtgctgtgctatgtacgtagacaacaaaaaaaaatgtgcgtgatgagttctactacgtacgtacgtactgtgttctagtgttttaatttgtatccgaaccaaggagttgtttaattaactgcatgcacatgcactggacttgaatctggagtattatgtaagtgtgcatgcatgctggattatgcaaaataaacgaattaatgaatagaactgtttttgttaattaattaattaaaatgtttggttcaatttttcgatgtgttgatagtgcatgaattaaagctgtgtacatattgatcgaatcccatcaaaattgaacgtgtgtagctatgaattaattaatgaactgacgacgctagctaattcattcggggcaaccaacaaattgtagcctagatagactaattgtttgccttttgtttcaagttgttatggccaaaacttatactcatttcttatatagatacaactgaatgtgttaactcaacggtattgtgtgtgtgtctatatatatatatatgtgtatatatatatatatatatatataaaatctgtcaattgttttgtactccctccatttctaaatatttgacactgttgactttttagcatatgtttgaccgttcgttttattcaaaaacttttgtgaaatatgtaaaactatatgtatacatataagtatatttaacgatgaattaaatgatgggaaaaaattaataattacttaatttttttaataagacgaacggttaaacatatttaaaaaagtcaacgacatcaaatatttagaaacggagggagtatttcttaagcattataatatattatcatttgtgacatatatatagatagagaattaaagatatatcaaaataaaagcagtttgtcacactaataaaatccatgtcaaaaccaaacaaaaaaacatatatatgtacaggctacaagtaaaataccaaaaaatctctttgcttcctggtgccacgcatgccgttaattaactagtacattcatgttgttgatggatttgggctgggaaagaaattcccctggttcttgcagtttgtgtacccacaaaacagttagtttgattaattggtcggttgtacgtacgtaattaacagttaaccaatcaattgggcacaagctaaatcatattagatctcttggattctcatgcattgaattattgctgctgacaaaacaaaaggcagctgcatctgcagctagctagtaattgatatcgctcgatacgtacagatcagtgagctgcaggcatgcacgaaccccacacacgcactatctagctctagattagcttgattcatgtttgctgctgctgcttggttcatggctatactccttctgtcacccaaaatattagggattttataggtggatgtgacataatccagtgttgcaaatctagatatgctatttgttcagattcgtagtattagaatgtatcacatccagctaaaatctcttatattttgggatgaaaggagtactaactagctaaaccaatacctgtgcacttgatctgtacatcgtcgatcgaccatctaaggccctgtttgattcagcttagaattattataatctaacttattagaagtaaactgaaacaaacaagtagattattatagcagattattataatctataagccagattattataatctaactacaattagtgaaatcaacatattgggattagggttttggcgattcccgggcgaccgggagacgccggcgatatcccacattgtgggatggcttaggatggagttcttctccgatccggttacgtcgtttgcagggttttcgcctgccttgtttaacatcatggaggggttttcgtctcgggatcttacgtccttgggacaggtgattggttctcgactcggagg

SEQ ID NO: 11623 - DNA, 601 bp, Oryza sativa
gctaacacaaaatactatcatcttctggcaaatggccgtcacaggaagactcgtattttccaattgcaggacgggaacgaggtcattactggtgatgctcaacttaaggagcacatcaccaagtactttaagaccctgttcggcccatcacagacttcatctatttttttagatgagtctcaggtcgacgacatacgacaagtctctgcagaagaaaatgagtctttaacggcagattttacagaagaagagataaaatgtgctatattccaaatgaaacataatactgcacctggtccggatggtttcccaccagagttttatcaggccttctggacaattataaaggacgacctgttagctctgttttcggatttccagcagggatcgttgcctcttaatagcctaaactttggtacgattattctactgcccaagcagaaggatgttaggactattcagcaatacagaccaatctgtctcctgaacgtctcctttaaaatctttaccaaagtggctactaacaggcttacatcagtagctcagaaagtgattaaacctactcaaacggcttttttaccgggtagaaatataatggagg

SEQ ID NO: 11624 - DNA, 9014 bp, Oryza sativa
atggaaatcctacgggcaaacgtaaagggtcaggtgggtccacacctaaaagtatgcaaggccgattagacagtgattgtatcttccaccctttgggtttctcctagatggtgtgttccaaactacgatgaagacaacaaagcttccctaggaacaaaaatggaacaacaacctctgccatcactgattgttcttgctacctaagctgattgctctcaaaccaaccacaggtgttcaacaaacccagtggtttatgaaccaaagcacctcagaagtacaagaagttggcagtaaaaactttcgtagtcgtacatgggtgagcacgatcatgctgtacgccatctctgggttttccgtatttggcctggcagagttcgaggatgacaacttcacagggcacatgaagagcagagcacatggaacatgtaccttctttgagagatttacagggtaaatttgaaactaagagaatggccccctttacctgagccagttccaactcaaataaattacaggtaaaaaaacatttttataagcagaaagaaaagggtatctcttaatgcactgagcaaaaccgtttccacatgaagcaactcaaaacaatctttgcatgtgcctataatactacatgggaaagctattttcgggtagcattgctggtatctttagaacctccatggtttagcaatatatatagaattacacgacaaaaagataaaagcttgtcattttagagctcaatatactaattacaaacacgaatgccagaaaacagcgacaagacttagcactttttaagcatagcaaaattagcacttttcgacagcagatattatctgatgaaaaaaagctcctgtggctagtcaattgggagtagtagtaaacaagcaactcaacaccacaaatgcattccatggatcggaccattttggggcccaagtgatcagaaagaagtaaaaaagcatccgcctttcccacaacaaaatacactagtaccaaacaaacaattgaaagaagatcaatgctatcacaccaagagatctcgactcaccatctttatcggatccagccgtcgcaccagtgccgccgccgcgcaccgaatcggagcgatgatggtgaccaccgtggcgatggtgcgagtgggacgccgagaacgaggggcggccgcgcgggggagggggcggcggggacggcgaggcgccggggccctgctgctggtggtgcggcggcgcgcggcggcgccacccggcctgctggagcgcgtacgcgacgtcgccgacggggaagaactgctgcatgtggatcacgggcgcccagtggtggcgccgctgctgcaccgcggcggcgacgtgctcgaactccccgggctcgccgacggagcggaggtggagcagcagcaggtcgatgatggcgttggccgccgcgaactctccgcgcagccatgaaatgaagccgtcccgctcgtccaccacccacccagcgctctcaaccgcggccgcacctgcggcggcggcgccgggcgcggacgacgggatgacggcggcggaggccatcgcctttcctcactgagagtctccggtcatagaaaggcgaaccccaaccagcaatgcgagcgaaggagaacgaaactagcgagagatctagggttttgccgtgttttttcttcttcttcttcttctttttcttctttttcctttttcaaaaggcaagctgttttgtctctggtggtggggcgttggaacggaagaggagagcagcagcgcgagatgtgaagaggaggagggaagaggcggatctgggaacggaagattcccgaaactggaggcgaggaggaggaggagcgggaccggcttgtcagtggctcacgtagccaccgggttgtgagaaacctaacgatctcgcgaggtggaggcttttgcttcgagattcggaaaccggggagatggccgttgaggcgattagtgagtggttggtggccaggccccactgtcagcgccctgtccccgcgtggttaactcgttaccgcgcgtgcgtgtacgtaggagagaaaaacggggttagcagtaagactctggtgagagtcacggtgccgttagatcgctccgcgcgcatcggaacggacggccgagggatgcggggggttgcgcggaggaggcggcgggctgggtgggtgtcggttggcgagtctccacgccataatgcgggtttggtggttgcgggatcggattcatggatggatcaccacattcacacacggtcacggggcggtggcgtcgcgccgctttacgccaccacacccacgcgcgcggcgtcagcgacgacgaaccgcaccgcctgctccccacccaacccatacatgccggctcgcgtgcggcgtcgcggcggggccttcgtgtcagcctccgttggtgaaaattaatttcgtgctggcttgggtagctcgcgcacagtacgtaccaggccgtgtcgtttcctcctcggcgcgggctcggtttggaatgggcgcctgctttggtgcaccaggacggcacggacaccagcccgaaaccttagccaaccatccgatctacttcgagcctacgagtgtcactgtgtcagtgtgattagtttggtttaattttagttttgacggcaacggtggcgcgtggacgcacgagccgtctggtcttgacgagcgagtgatcactgatcaaggtggtggcaagtctggcagataggttggacgactgtcactggctcgagcacgttggtttgcagtggaaaccgcgaaggtttcttgcgaagcaatcttgctttgttgacgatgcaaggaacggtttcgggtttcgactttcgagtccccgggttcccttttatttaaaagtccaagtcaatcgagcgatcgtgagtcctaccgtgtaagagaatggcaatcggaccgtgagcgtgctgtgaacgtctcaagttgaacgagcaagtactcgttcagaaaatgtgatcgttttcagaacgattcagtaacacgtgcttgcgctggcccggtaataggaacgtttccgaaaaagacttgcaacagcgactagtctggcagcgggacgtgtcatgcacgaacagaacgaaacactgctgtcgtgatccaagtataaattcagtacacatgcctatccatcgcttgagaattccgatcggtgttcctcttttggcaggtcatttgctgcggcggtacgacaacagggtcagggaagagcacaggtccaagtccaaccgctaccacagtggagtaccactgtaggcttaacttccaagggcgatggatgacaatggttgccacacttgcgtgcaatctgctgcactgctgatgcacggcggaatgggcaaaagtcacgcgcctaactgacggagcgccaaattgctagcatatgttctgttctgtgttaaggaggtatcactaatcagttcccctttatttccattggccgaattatggaagttttgctacacaaatgtaaaaccacgtggattatcttgatatcgcggtcacaagcaattacaaggaaggtgggatttggaggctttttggttggcaccatgagacaaatatacctagccagggacaagtatgagaaaatttaatcttgtttggtttgtgtctgagccattgtaattagttttgttattagtgtccgaatattttagtgacaccccatataatatccgatgtgacacactaaaattttacacccttaaatctaaacacctcataaggtggtgttcttttttcctgaagatgaagatgaagattaagtttttttacacaaaacgatgtggtattaacgtatgattgattgagttttaattactacaaacttgaaaatatattaatatgacattttagagtaacttttattttttattacacgaaatgcatcgtttagcagtttgaaaagcatgccacgaaaatcttaatattcatccaactctttttttttaataatggaatagagcattccagtctttactcaaagagctatagccaaatcttgtttgagaaaagaacggaccgatgatcaaatttggtgggctgagttgcatgcactgccaggcctcttgataaaagtaattctctcacgctgcagctggttgcttcttttgcatgctgaactgctctccacttgattagctaaagatatgttatgagactaaaaaaattacttgttaaatctttcaagtatctatattggatttgtgattaaactccaagcttaaaagagaaagatataaaataatattagttttaagtgttctccggcataggtcaccaaccaaacaggtttgtctcaggcaggcacgaaccactcctacctcatgcaacactcaagcaaaggtcaccaatcaaataggctctcaagccagtttggttcgaggggatatcccttgtctttaaataccatctaaaaagtcatagtttcttgttaacgttttgaaacaatattgagatagatcaatattagataatgtcgttccacgatatgcttatcttgtgttcggcagcagagttttccaacccatctttctcgtttttcacgcgcacactttttaaattgttaaacgatacgtcttttataaaaaaagttcttaaaaaaccatattaatccatatttcaaaaaatagctaattatgtgctaatgagtcgcttggcgcgcgggagattagttcccaactgcaaggaaagaacgcagccttacttagtaaatactccatagaaaataaatgtacaaaatatgaatatagatattgtccgtttttttaatatatgacaacattgactttgaacacacgtttgactatttgttttatttaatttttttttgcaaatgcataaaatataaagcatgcttaaaccttaaagtacttttaaggataaaacaactcacaacaaaataaaagataatttcataatgtttttaataagataaatggttgtcatacttgtgttgaataattaacgattatctatttaaaaacgaatgtactagtatttgttatttttaggctgctaggggagggacgcgtagtacgcgtcgccggcgcgcactcttccgacaagcccacatgactacgtaaggcccatgcaactagcgggacgtgttttgattttttccgtggatttctcaatcatacgcgcataattttttttcacaaattttttctcagcgtgaatttttttaatcacgtgcacacgaacgtacagtaactaatccgtccagataatgatgataattaagataagatttttttttaatatttttttaagtaatagattgaaaagaaatttatacgtgaagtcaaattctgaaaaaattcaacctagatttgaaaattttcaactcgaaatttgaatttttgaagtcaaaatttgaaaattttcaacttattatctcggttttgaaaactctcaactcgagatttgaaaactttcaactcgattttaaaaactttcaactcgattttgaaaactttctactcaaatttgaaaaattttcaactcaaaattgaaaaatttcatctcaaattggaaattttcatttcaaaattcaaaaaattcaacttgaattttgaattggaaactttttactcaaatttcaaaatccttccactacaaatttagaactttcaactattttaaaagttgtaactaaattatgtatacatggtttttctttaaaatagtgctaatgatgacaattgacactaattacttaattagtgggtgggcctgagcgctagggagtcgacacggcaaaagtgcgcgctgcttctcctcctcgcgcatctgcgcgaagtagggtgtagtaggtacacccgggagggatcccgtctaaggatgaggaacacataatacttttagtgaaaccttgtacaaatcacaagtgcggaattgagcggcttaaaacaataaacaataagtcacgtacgaagtgagcgtaacttaattggttaggtttcttgtggtgaaactaacccaataaggttaagttataaacttgacataggtgttcataattataattaattattcttttagtgcaaggtaatataggtgtgcatgtgcgtgtgtttataaggatgagtcatgtcgagtttcgtgtctgttacgatccattttacaccgggccgggctgccaaagtgccaattgatcgagggccggatcagcttttgccgtggcccgtgaggcggaggtcgacgtacgtgacgtgttttttcaccgcctccgagcgcgcgtcgctggacagaggtggatatggtgccgtctacgaactgaccaaagaatggcacgcagaagtaggaagttgtgagaacactatgaccaatggcgagctctgcaccggtggcacacgtcagagaccaggaaactataatcacgtacgacatcacacacggcacgatagtacagtcgagcacgcgcgccaccatcgcgagcggcgctgtgcggatcacagaatcggtcagagcgcggaatccacgccgccgccggcgcgccggtggcgcttgccgtgcctgccgccgcggcggtccgtcgacctcgcctcgccggacgggaggaacgcctcggcctccgcgccgacgctgcactccggcagcggcgcgtggtaccggacgcggtcgtagcagtacccgtacgtcatgtgcctcgcccggaacctctccatcgccgaccgctgcccgggcggcatcgtcgcggaggcggcggcgccctcgcacggcggcggggagccggcggggcagccgtggagcaggaggtcggtgaactcggcgacgtagggcgcgtacttgtagttcaccttgtaccggccgcccgaggtggcccagctcgagccgtcccagatggtggcgtacagcgacatgggcttggacgggaactgcgcgcccatggacgccgtcctcaccacctccctgatcggcgtctcgtcaacgtagaatctgcataatggacaggacagtcagtacaaccgtgcaacgaacaaggaagtgaaggttactgatcctgctctacattattgcagtgtcacacatgacacagttttactccgtagttctgtaggagtagttcagtaaattttgattttatgattgacagttggttctgtaggagtagaagggtaaactagattactagaggcagatgaaccctgtatctctgaactcttgaactctgaaaccaataggttggcagtgaaaactttgagaagttcagactttggccacgtgtagtggctagtaatgaatttcggttttggcaaaataaagacgtcattgtcacccacgaatctaacagatttcatggagaaaaacacggaggaaagtgggtggcagtttttgaaacaatggatagaaagtagctcccggtgctgacatttccctcctccatcatgcgacacagatacaaagaattcagaagttcgcctatgaccgatcgcacaactacagaagttatgcaggttagcggagaaagtaggttatcaaatgcaattatatgcgagaaaaggttggcacggggatctcggtggaaggatatcagatatattgatagagagttatcatgcacatggtatgatcaatgctcaggttcagtggaaactgtaaaagcaaacgcaccacatgtgatgtcaacttttttcacacgatctcgcgtgtagcagtataggatgcatcaatgttttttagagcagttgcatcagtaatttgcagtgatttggttacagaatttcagagtccagtgattgctgtggttaactaaatcagaaaaatattgtgataatgcccatctcagttttggggcctctacttattactcctatcaaagtgtaaacagcacaaggaatctataagctgtaaaggaagagcaaactgatatctcccaatcatggcccatgataaccagaaaataaagaaaaggaaggaatgcaagcatacaaaaagtaatagtgatagtgaatatcaatttgttgaggtacacaacacaccataatagaaagaacacaatcactatgcagaattgcactattactagtttagcacaatgaagaactgcaagtatgacaatatgacatcagagggtagttaactgacattgtactcttctaatcttttatgggaaaaggctatacatactaactttttcttactaaattcttactaaaacaatgtgtcatgctaggaatgcatctagatttttcataacttccatctacctaaattaaaccgttaagatgattgttagtaaaaatttagtatggaaaaaatagtacgtataggagtgttctgcttaatataacactagcagacgctggcttcgttttcagaagaagaaaactgtcatttcaccattctgctatcagcgtatcacagaataatgttatcatatattctgatatactgatgacagatacataactctagtgagtctgcagaatatatactgagtatctctgaagttcgtgaagcgtttgtgaatctcaacgcttgtgaagcgtgatatactgatgtaggcaagctcttatggcgagccagagactgcacagtgacatctgacacgctgcattatcgaagagtaaaaccgagctaaaatggcggatcggttatcttacatgatcgtgtcatggctccagcggatggcgtagcggtggaagtcctgggtggggtcgaaccagaggccgtacctctcctcccggccggccgccgtgctgccgttgccgtacacgttggtctgcaccctccactccctccccctcacgttccccaggaactcgaagtccagctcgtcgtgcgtcctctcgtacacgtccccgttcgacatctgcggccaaaacgacaatgccgtcacaaccatgcatcgcgataaacccaagctatcgagtgctaacttcagtattaagatttcttgccgcattgcacatttgcacctattggttcgcaaggagttggtgatacttacgtagaaagcgacgacgacgccggcagtgtggtcggcggg

SEQ ID NO: 11625 - DNA, 16572 bp, Oryza sativa
  unsure (1)..(16572): unsure at all n locations
catcacatgttaatatattttcataatttttttataactatttgagtgacatgcaaataatgaggggcccctcgagggattaaaatccactcccgataaacaactgtacacacattgtagttctcccaaaaaaaaaaagaaaaactgtacacacattgtctaccttcgaatgtggatgtacatcagatactcctatagtcctatatgaccttatttctgaagaaaacttcaggtgttttcatatttggaggtacagtcttgatgaagtaacctaatcattcatgttctaatacagctacaaatatgtttatcacaagatgcaggtgaaaaatggatttttcttaaaaaataaatgggataataaaatagatttacaagatcaatggatgtctctcactctgcaagaatcaagatagcaacctatagtcagcagccttgtcttggatcacttcatttgttctgcagaatactgacaaatagaaggaacaagcagcagaaaacaagaagaggggacagtcttagcagaacccttgaatttagggtggtggattgagactgaccaccactagtaagtgtgtgtagtgagcaatttgggatggtccatgaggccatgacaatgccacaatagctcttttggaaggtattactgtgtacacatgtacagctaaatccaatgccggatatatagaataagaagattattagaggttcagaatacccaaggtctgacggaattatggcgctgaatttgtctcacctcataaattgtatcccacttgttttgcgatttgaagcacacttgctttagctgttcttcattccattaagatactcgccacttgcattgttcttccattcatttgttaagcttacaagccctgaagcagccaaaaacaacgcccaatgaaacgtaacgttgacgccagcctctatttacacttgcttcatggccacgtatgcacaaatctaatcctccctaaggtggtttcacagtgaatttgtgtttagctgttcatccaagcaaattctagacaaattgatctggtattgtgaatttctgatcatgaagagtacatatgtatagttacaggaagtcaggaacagtctgtatcctagctatactgcagattatatacgaacatttactcaggacagaataatcaatttacattacaccctctctgtctctctgattctctttctctagatctctcatcctcttcttccactgatcctctctctgtttatctgcaagaaagcatcaaatggtgtcgccgaatctcgcgctgctggcggtgccatcctcccggagcaggtcggcggcggcgctcctcccgccgtcgaacctctccgacaggaagaagctccgcagcgagttgaggttcctcctcggcgcccccacctccacctcgaacagcgccctcaccggccggtggtccgacagccgcgactcgcaccggtcgtaccgcttctgcttcagcccggcgccgcgccatagtatccggtcacacctgaaaagaaaaaaaaaaagaacggcggcggccgccggttagccgcggatctcgccggaatctcacgctatttcagccgtttttctttttctttctttctctggcttaccacgccggcgcgcgccgcttctcgcctttcctgccatgggaggcgcagccgtagtaggggtcggagttggggtagtacttgtacgtcggcgagaaggcgatggcaccctcgttccagccatggaatgcgcctccttccgattccacctcgcttcgcagctgcaaattattcagaatcaacaacacgttcagtatgattggtactaatttaatttggagattgattgattgattgatttggattcatgcgtgttgcatgcctggtcattttcgagcagcgtcttccagtcctgcctctccaccagcaacctcgtcttcgcctccggcagggagatcctgtagttgaggtccccaagcaggatcactcggctgcatccacaggagtaaacgaagaatcaatcattaatcatccgtcagatattcagattagtcaaagcccgcctgaatgcctgatgattgctttgatttgaaatgtcgtcgtcatgaaggccggtgaaagaaactaaacgaacgatcaaaagcatgttaattgccactagttaattaccgtctaaaatcgatgcgattttatactacgttgttgactaccggtgtcggtatataaaacagtcgacgatacggcagatatttgtagtgcttggaagaagttaattaatttactgtgcctaattgtctactgtatgctacgtatgcaactattaccgctaatgactagtatcttatgctacgcaaatcctagatacagcaatacctaatcctcgatttttaccggtaccgtggacggttcaaccaccggattaaattagtacggttgccgtcgtgtgcacaggccgtaacaacggtcgctgtatggtaatttagctgacggatatacatgcatgcttgggtgtctgtcagtcagctcaatgcttcttatttccagctctttaattagtcagcgacagcgatgtgtttcttccctgcaattctagtatgcttcgattttcagcgtgcacaaaaaaatgtgttttaatttgggtcaaaaatgaaaggaaaaataggattttgaagaggtcgatgaatgatcaagtgggaggggtgtgtgcgtttgcttactcgtggtctagaatcttctgggggaggttgagcgagtgcccccgggggaaggtcgtccgggagaggatctccgtggcgtcggcgttgcggtgcgcctcgtcgccgtcgcggccgccggacgcgaggtggcagcacgccacgcagaagctcgtgtcgtggagccagaacctgacggacacggcgccctgcacgtccaggcacagccatgcacccgtggcgatccatcgatgccgtgcgtgttaggtacaattcattcccctcgcggcgcggctcgccgcgcgcgcgcgcgcgcgtggcgtgtggtgagcaatggcggaatgataggtcaggggtagggtaccttgttgccgaggcagcccatgacgccgcagccgacgcaggagacgctggcgcggcggacgaagcgggcgaggtcggcgcggacccagacggtgaggaggatgccgaccatctgcttgctcaccacgcaccggtagtccctgcaggcgagctcgccgccaccgccgccgatgccgccccgcaccgggtgaaccttctgctgcgccgcctgctgctttatctcccctcctccggctgcggctgcggctgcgccgccgccggtgcccttggcctctctctggtcacgggaggagttcggcgccgacggcgacgaccggttcagcgccgcgcgcacgagctcgttccagcgcatcccgacgcgcttcttgtccgcgcccagcacgttccgcgcgctcaacggcaccacctcctggaatctgcatgcgccatttgcgaccatgaatccatgatcagctattgatggccgccaccggcatgatcgagctccactactgcacttatggttgcttacccgaggacgtagatgtcgtaggcggcgttcctcgtgtcgagccagtccgacaggtcgaggtcgtccggtggcgcgacgccgccgacgttccacgtgctcgcgaacagcctgcagacgagacgacgacgtcgcgagtgagatcgactaattaatcaagacgccatgagtagtccaagccaactaatggctggcgcggcgcgctgctacatcgtaatgaaagcttgaccgatcgagcgccatatgtacctgtacttgagcgtcttgttgctcgctcgctgctgcggccgcggccgcggccgcttcacgctgcggcaggcgtcggcgtcggggctgcaaccatcgtcgtcgaacgactccaccgccgccggcaccgcctcgccatcgaagtcgtcatcaacggccatcgggaagtcggcgacgaaggcatggctgccggatggcttcctgaagagcttgttcgccaccagcctcggccaaagaacctagccacacacaaacacacgaatcagctatcaaacgtgagctaccaaatctcacaccgacctcgtcaagctagctaagctagctaggtacatacctccgcttgcctctggttctctagcatggcgaccaatccgtagggaggtaggtagggatggacgggtggtgaggtcgaggagacgaggacgaagggaagaaacttcaggcggggaagagggagacggcttaaataggcgaggagggcggaaagtgacaaacaaaaggagtctcccgtcccgcgcatgttcatgcgcactgttaaccagcggtggatggattgacggatcgacgctgatcgatgcatgcattcgcatggcgcgtgcggtgagcggaaaaagggggagagggtggtcgactctcgactggcggactggcggtgacacggtgacagcggaggataaaagcacttttgactgtagagggattcttatggtggggtacgatctgtttggtaattagttaaggtcgaacttctaaatttaggtttagtagttggatctgtagtgaagttttcacaacctaaacccagttacacatttctagtttattttatgatagtgctttaggtgagtggactaaaaattatttggctggacttcagctccagaagagatagagttagagctagagctatgcaaaatagaactacatgctttcacttctcaaattattactccctccgttcatagaaataagcatttttaggttgtttaagtaaaaaataaatctcgagtacaaagagagtaaaaggcattttttttcagttatcttattggtcaaatttgaaaatttggcttgcttagattcatgtacattgaagtgtcctataaatgcttatattgtctacaaaatttaaatcttagaaatactacctccatcccccaaaaaaagttactctctctggtttcatttcataatttttgacgttctggataagtttgaggtcaatttttttgtaactttgaatatcaatatctttaaaattatttaaatgtctaaagaactagaatgacatatatagatttatcttttaaaatactatagtaaaagtaaacatgtatttattgattgtatatattataatagaaaaacaggatcaaagatatattttggagattgagtcattatctaaaatatcaagaattatggaaccggggggagtaatatattttggtacatacgtagtacttatattcggaaatagagggattagaagtaaatatatgtataagattttcaatatatctactagcatatttcttctgtttttagtagatgatgttgttgactttttttttacataatgtttgatctttcaaacattcagtgtaaaatatacaaagatataagtaatgtttaaagtataataataaaataagtcataacaaaataaacgaaactagtatgatgaatagtcaaatattatgtatcaaaatcatcagcattatctatttattatttgtagtcagattttattctgtacgtatatatcaaatctaatatagacccattttcgctgaatggtgtattacccttcttttagagaatggtctttgcatattctattaatgatgttaaaaggtttcacaatttttatagctttttgcatgatatttgtgagaaatgggtgggcatcgctataagagagtagagctnttgttttgaatgttgtctagcggtcaaaaagcggaatcacataagagataagcacgattatttggatagggagggatatgttgggaatctttgtatctgccaagtctgttcaactacagttacaatgagatagatgtactggctcatgctattgtgcagggttaccaaatccttttcaagttttctaaataataataatcagaacatccgatttctttagcagcgataaggacataagattaactttttgagatattttagtccggagtaccataatttattactatctacgtcattgactttttaaatacatatttaatcattcgtcgtatttaaaaagttacagaattattatttattttcccatgacttgatttcttggtaaagatattctaagtatgacttacattttcgcataattgcgtaaaatttctaaataaaatgatcaataaacgcatgttaaaaagtcaacgatgttatctattcaaaactggaggggatttatcattaaaaaaatatgatgcacgcctctcaatttctacttaaggatctctatcttattttgttgttaaattatattcatcgtgatggatgaaaagacttattatatatccaatagaagtatttctcagttagggcatttaaagatttacacctgaaaattattgcgccttttagcaaaaaaaaaaaagccttcgaccttcataaagcatagtttatagaatcgttgcaccacccattggaaaaatctaatcttatacatttggccaatgattaatcaaattactaatttaatgtaaaaatatatcaacagatttatatttctattaattaagtgttttccatatattagttttgtaggtaatggagaaccaacaattaaagtttagtcttaaagactttttataatgaaaagatgtcctatagaaacaaactgagaatggagcgtggagaccaatttaattagctgtacatgtttatccatctggccatctcgtattctcgtatctacaactaactattatttttctactaagcacatacatataactatttttctaacacgtgttttaagtattgtgcctagtatatagactcaggatagggaggttgagacctatagagtttttggtctcaacttgagcaacttgtgttcggtatcacacctcttataactggttaaaaaatcacaacatatgttgtctgtttatctcacatacgtttgtcaatattcagtttgaccttttaaatatctaatgctttatcttgcttgtgttattaattccatatcacatttgattatacatatagatcacagtgttctttatgattttacgcgaacatgtaacactaaatcccattcatttttcatagggtatgattgccttccctctcagacttgaagctgcaacacatctaaaacactatactctatactctgttttaatttactcgttgttttttaacattattttttattaaaataattatcgttctcatattccaaaacatttttagagatgcttttctttcttaccttaatttcatcaatgtagcatgctagtactagcactcttccaataaaatttagtgtttgctgcgaaaaagatgattgtgtagagtattaatgtaatttgccatacttcctaatttaatgtaatatttgttagaacgataagtaaatttttttaaaaaggggtacatatggttgatattcttccatgaatttgttttagtagcaccttaattttacaacatcatagctagggttggttaagctcgcacctcacgcggcttaaaatgatattcatcccacaacttattcatgactttgcttcattttttttgtttgcttcagaaaataacttattcatgactaatacctcagtagtctaatctgaactggaatatgctttcttcccttccttatcttttcagagctttcaaaatacatacttgcttggcttatgttgtacacgttacgttctgaattttaaatttgacattagtactatattgtatatacattgcatgcatatacaagagcaagtgacctatcgatcatgggcatcatgcaaaaacaaaactaggagagagtaaaaaaaagttcagacaatgatgatctgatacacatcgcccacgcatagaaatcgaatgatatatggtggtggatgagtttctgtcacacaatgttacaaatttaagagactactcacccatatgatctcgcatttagctcttctttttcatcacattttgttgtccttgttctttgtcgatcagccggccaatcattgtttggaacaggaaaatggcaaaacgcaggtggggaaagggagctgctcttgacgtttagcctgaggctatacaataatcatgcagaattatctaacgaaccatgttgattaatccacaacaagctgagtcattagtgactataatgatccccatgggtacggcgattcctcgttaattccattttttatatatttcggcgaaagctctatcattttttttaaagcaaagcgactccctactcattccttcctgctactcttttgtgtttgtatcagtttctgaattatcattgcgctgcaacctgcaagatacttcctcatgtctttttttttttgaacgactcgcacgagacggtgcgaagttctattgatagagcaggaaaaaattacaagattacaaccctggagggtcgtaacgaggaaaaaggaaaaaatataccaccacccacacatcgacagcgccaacacacaagcccaggagaaggcaagcaccggaccggccgccgctaagcgtgaccgaccgccgctagaccaacaaaagaacccagacgagatcgccccctaggggatgctaaaacgacgtcttcaagaagagaagcgacggaaagaccgccgccgccgtccgtcggggctcaaaggagccaagactggactttcgcccggtaaccaccctcttgcgaatccacggctggtgcctcgatgctccaccaccattcaagctctgccgacatgtgggaccccagcaccggtgccccccgccggccagccttcgtgcgccaaagaccgcgccacacccaccggcagctctccctcacaccgaggtcgcctccttcaccgccggccgcacctctcgcgccaagccggcctcctccaccggacgcgcctctcgcaccagtccgacctccctccatcggccgcgcctcttgcgccacgccggcctccctctccgctgcccgcgcctctcgtgccaagccggcctccgctgccatcggccgcgcctctctgcgccaagccggtctttgacccctcctccaaacaatgccgcgccagccagaagtagccgtctgccacgccctcggctagccaaccgaagccgtcatgcctccggtgaccacagacacggtcaccaccaccgcagccgctgctgccgaacgcccgtcaccatccacacctcgcacccgactccttccccgcctccactagctatcgccggcgatcgtctgcatgacgtcgccagccgctgccgcatccggcgaccagcgggggagcacatcggcgacggcagcggggagggcgtcggcgtccggtgagaggcggtctcctcatgtcttttgtgatagccttctgcaaccttcggcttataattcagaaagaagtttctgccaagtattagatagcatacataataaagttcacacaaacacccaaattctgtatacaaaaaggagaatatattttgcatgtatgtgaaaaagtcttgttggactatgatatcttattaggttgtacgtaaacaaacctgcaaggctgcaacccaatataccaacccagtgttgaaatctatgtcaaaggtaaggtcttgaagtgttagtcatatagtactacttcccacgtcaagtagctttgatttgcattatccttaggacacccttatatgtatcaaaatcaccatgcgtgaaaatcaaaacatgtactgtactatctaatttatcaatttaatataatttttcaaagatagaatgatgaggatgtccaatccacatagtacttatctttatctagaaagatacgtacttatagaagaatatttaatctaagcaaagagattccatagtggcatagccgaaggaagggtgaaatatatttcaaagtcgataatatattagtggtgtttttttaaaaaaaaaactttcatatttgcataagtgaactttccacatttatctaaaagcttagcattttaggaacaagttgctaatacatgcaactcaatacgatcaggctcaagagtcttgagttctagttatggatatatagcatgattaaaaattgcactccacctctaacgtttgagaattgaggagcacatacatgacatgaggctgggcgtgtttaattataagtgaattgccacatatataagataaaacctcacagggaaagactacccgcatagcttctcaaactaagaagaaaccttagccaaagacgtccgagaaaaaccacgaaccctaacccctttgacacgcatatttgcttcccatgttttaaacaagggggaaatgagtggtcttttctaaaccaactctaaaaattcgctttcgagagaagtcgaactaagaaactggtatgtgctactaaagtattgtaaccactaggctacaaatcccttcaccggtaaactggattctagattacgcattaataacctaccatttacttaaattgtcataaatttgatcaacaaaggtgttcatgctggcgaaatgccatctgtagtttccttcaacaacaacccaaaaaaaaaaaagaccctatcatttactttatttctatcgcttcatgaagaaatctctttattaaaaatatttgaaaaaccttactttatactctttcagattcatattataacttgttttgacatttttttagttaatttttttaagtttgaccaaaattatagaaaaaaattaacatttacaacacgaaattagtttcattacaactaacatttaatatattttaataatatgttcattttgtgtcgaaaatactgctaaattgttttataaacttggtcaaacttaaaaagtctgactatgaaaagaatcaatatgtaatatgaaacggacagagtatacgattagtgtgtaagatatcaactaggctcttgatattgttctaggcgccacatcatcagaagttatagaaacattacaagagacggtcatctgagacttcaatcaagatgccctgccttgtcttccttaaactttctgtagattattcagaaaatggattcacctgcattcaatgaacagagcataaaggtcaagccagggagcgatggtgtttgtataaaagattggtcatagaaaacctaacaacaaaagattctgcaaacaaattgcttccgtcacaaatagcaatttaactcatagaccaaggtccaaggaacactctgtgtctgttcagattgatgccaaaataaaccttaccaaaatttggtaataacaaaactttggcgaattggtaacattgccaatttttagtaggatgtactcaatataatgttgtcaaaattctatagacattaccaaaatttggtaacaaactaaatatagccgcataattatcaatttaatcaaataataacatggtttgaaatgacatcaatctgaacaaaccctctttttaaatgtggcctgaaatgctgtgaaaattttatcctaaagtactgctgctacatctatttctttctgtataaggattaactcataaaaaaattactccatccacaaagttttaatattcctcaaccaatcaaatcaaataaaaatgacctaaaaaatttctctcgttttttctcatccatttcaattggatcagagattggctagtatccagatgcccttgccttgtatttccttaaacttcctgtaaattattcagaaaatggatacacctgcatccaatgaacagagcatacaggtcaagccaaggatcaatggcgtttgcataaaagattgagcagataaaacctaacgacaaaagattcttgaaacaaattgcttccatcagacgtagcaactgaactcatggaccaaggaattaattgtggcctgaaatgctgtaacatttctcttaaagtactgctgctatatctgtttgtttggaaaacaactagctcagaataaaaattaccccgtcttcaatgtattattttttagataataatgtattaatattcttgatccaatcaaatcaataaaaatgatctcagaaactgctctctcttttttttttttttttttttgctcatccatttcgattggatcagagattggccagtatccacgtaagaatagttttgaggagatatttacgaaagggactactggagctatgcaagccagacatctacttgattaacaaatgttctccctgcaagttgcaaataaagttgtcgtgtgtgatatcaagagacaactaaaactatggcactgcgtgcttcagcagtcaataaacccagcccactgcttgttattctaaccaaactgattggattatgtatttagtcagaagagagagtaagccacagaaatttttagtaacccagcaagttgccggtgatgatgcctgcccatatctgtttggatcttcgtcgacagcaaatcatcacaggttaagtaacaacaacttctacttgtaacatatatatactaatgaccaagaaataccagggattattaactagtaaaaatgcctcctaattatcctacttatgggtttagctggcatggcatctcttctctcaattcatatgaaagttgctattgtgttaggtttcacattgacctggaaaatcgtttttcttggcgcatcaacttgccaccaggtcaaactatacttccaatcatgctacaacaaaacggccgtcggctagtacaagaaaacgcattcgatcgccatcactgggagcaacttgttttgctgctactaccacaacagaatttaggcacaggtcggcattgtaatctgtgaaaattggtcacagtctagcatgcagggagtatgacataattgttcaggcatgttgcctgatcagccgattttcttggctgggtcgcaatatatctctgaacttggacgacttaaagatatataactatttctagttcttgagaccgtatttgcttgattgcaacacaagcataaactgcacttgtcatgggcgccacacgaagtaagttctagaggtaatactgttatcatggccattgccttttttcctgaaccttcgagtcttcaacttgctaacctccccactgcatgattctgtcacaaatccatctcaatcttttacaacagtattgctgttcggacaatctgaattctgaagtttcttatgctcactgtgatatacggagtagctagcaaatgtcaattgtcaagtagcataacaagcttaaatcttcttttttttttcagcaacagttttggcaggagctagatagttgctctgtgtttgtcaggtgtgtctgtcggatacaatcacagcagtgacagcacgaacactaagcttatttactcctgttaattatccctcctcatgatgtaacactgcacaggtgatcacacccagctggccccatttcgtcagtggacgccgccggtgatcgctcgtaggtcggagcaaaggtaaagacaagcagaattagttagttgataaccgaaattattgccgactaaggaagcatcaaactgcaattttgtgggtgtcttgttgcgccaaggcttgctaattacggacttgggccatgtgattttgtgctgcgcctcgtgattgagacagcaatgtcgtggtgcagttaagaggattatatcatcataaagtaggcgtgttaagctaactaaaatgtgagcctagcagctacttagctagctaggtttgctatacttttacaaaggatcattagctggtggtgacaggaaggaggaacagagctaatcatgcaagtaaactaaagcatacgccttgtcgtttttatggacatgctaagggccatatctttaaaaatttatcggtgtgttttgtccggttgatgctagtttcaaatttgttattgttgattgtgatgcacacgaagcaccaaaattgtcgctggaataacccgcgggtgcagccgcgctcgaccgccgcctcgccggtgagctgtgcgcctccgtcgccggccgccggcgcgccacctgacggcattctctgtccggcacaatgaaaccttattagttactccctccatccctatgatataagagatttttgagtttttgcttgcactgtttaaccactcgttttattaaaaaaaattagaattattttttttttacttactttattatccaaagtactttaaacacaaattttcgtttttttatatttgcataaattttttgaataagacgagtggtcaaacaatgcaaacaaaaacttaaaatcccttctattatgggacggagggagtagtaatgtaagctgcagttgataataagtagtgaagggtgtggatgcaaaaagcgtgttccctcctcgtaatgatattcgatctgtgccgtacaaactgatgggccgatcagattaacgcccgggattggatcgcaagcacatgttgtactaattaagccatagtacacgggcttatccgtaaatctgccgctccttcctgtttctatactacagccgggccgcacaagctagtgggtcggtgggaggaggccccatggcaacgtggcagcgatcaaatttgcggcccaccttcattgacaggccgactccgccgtgaaaaaatggcccaaataatcttcggggcctagtacgttggcccaacaggatttcagttggctttcgtgggctcgcgttgaaactatggcccaaataatcttccgggatctcgaaagcctcgcgcctctacattatgggcttaattgccgggtgataaacgggccacgtaaacttccatttgttttcgtgggcccagcttgcggtagcaggccaatcggcgcttctgcgatctcacaagtgacaagtctcacttcttcagtctccacagcattcaagggaagagtccatttcttcaactgcaaaccaattcatgaaactccttaaactatgtgatggactcaggccccaggtaaactggatcatgaccaagcatcaccaagagattatgtactccgttctcatttatgaatttttgggatttttaatcaaaggcaaattttgctacaggacatcgtactttgcgattttaactataggacaccgcacgaagtgacttttgagagaaaacactcccaaaagttggatagaaagaagagagataggagagctgacatgtgggtccaagggcatttctgacatttcgcgtgatttttctctcttctttaaccgaaaattattacttcaatgcgtgtggtgtccatcagcaaatatccaacttttgggagtgttttctcccaaaagtcaactcgtacagtgtcctacacctaaacccgcgaagtcacggtgtcctgtagtaaaatttgccttaatcaaaaggtagctccaaccgtttccctattctattgccaaaaacttggagttgccatccccgtatttcgcactctcgacttgtaaggaacgaacgaggttcccaatcacaccgtcctgcctcgttcaaatcataatcgtctaggagaagagtagtttcactttcgcatggggctcacttttttgtttcaaggagtcaatgttatccaatcttttggagggatgtttagagttctcataaaggaaaattttgtaatggaatttaattagtcaatatcttggtgatgctctaaggcttgggtggcaaagcttatgtaaacgtatgtattttcaccatatgattttcttcttggtccaataagcaaaggcatggagcaatcttgtgtccgcctatgccctcgactattaaaactagtacaaattccctcgacaattttgcgaagtgttttttttccaaagaatttgcaaagtggttttgtccaaactagctccaattgttgggtcgtcaccaccgtctcggccacttctctaagttggggctcaccggagctcgacgaagacgaagcacggattttagagcagatctgaaggttttaaatttggttccatggactatgaggcccaactgttaactgcagctactacacaaacagtaatggtagaccattcccgtttctgagacaaatgcgcagggtggtagtatactactcgacgattgatagagtctggtatagtcttaatatctcctttgcagaagggtcgtattttcccgactagttttgttgttttttttataaacttcacaaaatcttaataaactggccgtagatctatatcgacggctcagcaaaaaataaattactggagctgttccgacaaggtcacacatcgcatgtgcacgacaaaactctcgcggtgaatggacggatgcagaggcggattcaggaagaaatagcagacgtctgaacaaattagaacaaagctacatccctcttttccgtctgtgtatggcaaaaaaaaaagagtaaatttcacaaaactatatgttttatggtttaagttggagaaaaccacacacattttgacacttgacacttaagtacatatattttggtagtttagtttcacaaaaacacactatcgatgaatggattcacccgtgagatgacgtggttgctccatttaggatgatgacgtattatatcctattaatttcgtgagatggct

SEQ ID NO: 11626 - DNA, 7556 bp, Oryza sativa
tatgagtacttcaatagtactaatattagtagtggaggctcgaaccccacctcccggttggatccgcccctggacggatggatggttaggatggatcatgacgactcgactagtgctggagcacacagagagatacggcaccaacgaatatcccaaggatcatgccaagtgaactatggtgaaagtgatcgaccaaaaatcaagtaatcaacccctcggaacatgcacctcgaatattcgcaccgggacagcaacttcaccgcttgattacaaacttatatacggacacgacgattgcttcggcaaaatgctaccaaaaggtccaaagtaccaccggttcaggcactcgtatactcgtattctacaagcaacgaaaaagttgtaatagcacagaaaaagatggtgataccggctgtatccagaaacggcgatcagatgcaacgcgcacggtatttctacaacccgtataaggagaaaaacactagtatgcgttaacgttatggcagcaacaacttgccaaacctaacatgatccaccggagctccaacttgcgtgcacatctcgcctcggtttcgttcgtaaaatatataaaaagcgccgtctccaacgtgcaggatggcgagccaattggctcctcggctagttcttacctgtccgagctgtgttctccttctaccgttctctcctctccctgaccggcccaagtaaaggccgcgataccatgcgatgcagtaggactcaactgagaccgggtaaaaaatacttttctctacaaaaaaataaaaggactcaactgagcaagtaaaaccacaggcagcgtcgtttgtccccgacagcgatgctaacatggctcgagccgcacatggtggtggtcacccaagacccattttttttaggagtactattattgcgaaactacaaaaagacagccgctacgcacacacacgttttgtttattgcagggaatgtccaaaacgtgactggcttcgctggaagataacccaatttttcccatcggcgcaacgcaagttgaggagcccggcggcccatacatacgctgataataattagtagcctccaataatgcgcgcttatgcgcgcgcgcgcgcgccacacgcgtgttgggaaagggaaagcaaaaccataattaccgtggcaatagacagcgatcgtggctgttcgtgacacgaaagtgaaaacgacgttgacgtcgccggccggccggccagacaaacggcatgagaatactctgtgagcctgtgttgtgagttgtgacgaggcaagcaagcagggaaaggcccaaacacaaacacaaacagaaaggggagggagaggccacgtcgtcagccagccagccatttcaatcaccagttgctttaatttcttttcctcctaacaactacgcttgcaaaggcacctaacctaaccaggtgataacttgtccttgcaaatcactatcatctacatactccagtacaaatagcctcctaacccggagcctctcgttaccgagagagagagagagagagagagagagggcagtgcaggtgtcgctggccatggcgaggaggagcagcagcagagcgtgcgcggccatggcgacggccgccgtctttgcgctgctggccgcgacggcgacggcgtcggggctcgtacgggtggagcacccggccaagagcgacgggtcgctgagcctgctcgtcgtcggcgactggggccggaagggcacgtacaaccaatccagggtcgccgagcaggtaaaaccaaacgccccctcctcctccgtcggccgcgatccgtttcctcgcttcccgggatttaactctagttgttaaattttgctctaattgctgcggtaaatccatggtttgagctggccgttttaaggtcctaaccgcgcattacgggctcggataattggattggatggaaaagagagagagagagtgaggagacggcgagatgggggggagggagtccagatgggattcggtttggcagttgatggcgtgtgcgtacagtgctgggttggttggttggttgcttgcttgcttcgccagttggcatttcgtcgcgtatggtttaaactgacgaagtcgccggtgacgacgccgcgatggcgtgggcttcttttggtcttctgcccgccggtatgggcgcgcggccgaatgaaggaatgggaggggagaatatcagagtagaactgccaatacgcagatgcccatattaccgaactggccgatgtgatcagaaactattctcttgttgtgtgctcgagcaattaacagtttacctccagtgaaatggctaccttcatttctgggattagcagcggacagttttcagaagacatctcttgaccattattttctatttgtattattaaagtgaatactttttttaaaactgaaggtattattttttaaatagcaaagacaaacaatattaagtatggacaatttatcatgcagatggggaaggttggggagaagctaaatatagacttcgtcatatccaccggtgacaatttctacgaggatggactcactggcgtcgatgaccaggcgtttgaggaatcgtttaccgatatctacacggcaaagagcttgcagaagccatggtacctgggtaagctttctgcttcttgtcacttatgtcaccaataacatttaccaagtacccctgttacgaaatatgctaatatgttatttgaacgtgtactaaaacatgaacatttcttcagtgctgggaaatcatgactacaggggtgatgtgctagcacagcttagcccagtcttgcgaaagatcgaccagcgattcatttgcatgaggtcgttcattgttaatgcaggtaggaaaaaaaatgcagtatttggttactacttggatatgatgatagagttctgaactgtaacgtgcaaaacaacgctaactttgtatgatctgtcatcaacctttttttttcagagattgtggatttcttctttatcgacacaactccatttcagctgaaatattggactcgccctaaagaccatcattatgactggagaggagtggcacctcgacaaaaatacataactaatctacttaaggtgcgcatttggaatggaacagtcatcaatgcttaagaacaaaaaaaagctattcctaggttgctgagcaaaattgttttaatattttattttatggggtctactatctaggatatggatgaggcaatgaagaaatcaacagcgaagtggaagattgctgttgggcatcataccattaggagcgtcagtgaccatggtgacaccaaggagcttctgcaacttctacttccagttctgaaggttatacagaagttgcctcgatattaagttctgaaggatccacaaaaagagtacttccttatcactgtttcatggaatttcaggtcaatggcatcgacttctacatcaatgggcacgaccactgcctggaacacattagcagcagagacaggttaacatcatttgacacaaagtttccgcttttatgtcacagtaatatagaacaaaacatgtttgcataatcgatgaaacttgtctaacctgaatgcatgcactcctattgttacagtcctatccaatacttcacaagtggaggtggttcaaaagcatggagaggagtcttgcagccaaattctgataagctccagttcttttacgatggacaagggttcatgtccctccagataaaccaggaccaagctgacttcatattttatgatgtttctgggaacatcttgtacaagtggagcaagagcaaagcaaactacctccagccctccacctatatcactgaagcatgaggcagatgcaaaaccacaaaacggagaattagcttggctaagatatttgtatcaaatttgaatgcattattgtggcacgcaagggaagaggaccggaaaggaaataggaaagtatttaagcatggcatgtgattgatctactaaagaaatttgagacaaggccgagaccatcctactagactaggaaaagagatgttcagtatggtatccattagatctgattcatacaacttcttgccagaggaccatcgattatgccatgtataatttacaaagaaggcttaaaactctaaaagctagtagtgacctttgcatatcggcatcagggttcttcagtattgccaagcattcacatataacctttggagagagagagagagagagagagactttgggggtttctaagctggtattttcatttaaaagagacaatgaaaagaaaatttgatctatgataatcaagcatgtgtcggtgaagacggctattagttactgcttctggaaaaaggttgtaattcagtacagagttgtgtacgtgtccatttgaataaaaattgcatataacagaataaaattataatgaaaattctggcaagcaagttatgaaaggtaaaatgaggctttaacatgccatataaaagctctccaaaatgcaaagctagataaatccaacattcttgacacatcgttcttttcaaagaaaaaaaacactataatttgaaactaattctaggtaacatcatcgcgacgttattactattaatgtattgaaattatcaggtcaacatttagttcccttcagtgcatacctggggagaacaggaactgacaataaaaatggcctcactggacagccaatatggcaaaaatgtcaacagctttctctgcaattcttctgaataattctcccacatagatacggctaattcaaaatcactccattcaaaatcaatctctacattcttatgtgatccaaatatggtttgttcaaggccatggttgcatggcaatggtagttttgttcctctggattgactaacaggacagcagactgttcctgaaccaccagaagtttgtttcctctttgctgacagctcaggtgctttccagtagtaaaactgcaccacctgtttcagagatttgcaaatcatagaacactgacacgcttaacagaacaggatataacacatttgaatgccatgtttggaaagcaggaatatcataggaaacagttccttttgtaaaggaattagaaaaaaaaagcatattctaatggggcataaataattttttatttgtattttctaaaagatgtcaacttatttgaggaatgtcattctctaatacaaccacagaattttctgttgttatagcattctcatgaagatttagactataacattgaaataaaggcatcttacacgtgcagtaaaggataataaagtttgactattgtaatctaatggacatgatctgcagactaaaactacttaaaaagtgaaagtatgtagatacctgaagagcatgcaagccattggcaaaaactttgtcaaagacatcatctcccctaccaagtcgtactggcttcccaagcaactctatagggtcatcttcagcaggtgcaacagatttattgtcttcatcaatgcttgagtggaaagagaacccaagaatgtgcactctagcacatcgtacgtcaaaaccagaatggtcataggcaaaccaatacattatatcagaggctggcaaaggaatataagaactctgatgaactggttcatagttcagtgatgtctgagaaagaaaggaaaggagctttgggtcctcgtcataagcactgtctctggtgaaccaaagagttagggtgagtctttcaccttcagtcacctgcaaaaatagctgcactttattaataaacaagaaagggcacgcatcaacctcagaagaaaaataaaatcccttgacaagataatactttggccacatatgaattgattgtttacaaaaaacaaggtgcaagggaaaaggatagacataaattaggactaaatcattgataacaaaatgtagcctcaattacctgttgcaacttagagcacactcaaacaaataattttatttgattcatcaaaacaacaataatagtaacagatatactaacatcttgctgattatccaagtgaaaacagaaaatgtgacaaacaatgccaatgaaaagaataggcatgaacccagtacagaaacaatcaactggcccatgcaggaaacagaaatgtacctcatctacacaatgggtattactattatctgcagtgtagatgacaacatcctgaaaacaacagtacttctcagaaattccaagaatatatattcatttaattattaaaaaaaatgcatgcatgcaaactgtaaatcaaaatgcattagcttacaccagcaactggagtaataaaggaaggttcaccatcctgaaactgcaaaattccacctttatagtccttcccatgatcgtttaagtagcacactgccttttgattgaaagatggaaatggtgcattccatgccatattttaattcagaaggaaaaagggtcagaacaagaactgagaagagtgttagtcaaaaaaaagaactgagaacagtacatttgagtaaaaagggccgcattgaaatataaacaactacaacaactgagaaaatggaagagtatattttggacaggacctagatagtcccacaaacagagataaattactcatacaaaataagattaactagataatcatacaaaaaaaatgcaattcacaatatcagaagcaccgaaatgaatgcttgcatgaaatacagtttgttggaacagacaaaacaatatgtagacatgaaaacaactataaaagttgactaaatacccaaagatagattgaccctcaccgtgaaggctctttgcctaagataaggtttgttgtcatcactgtgccacccaatagaagctcccttgcaccaactgcagacccaacagacaggattccaatacgaatagcattttagtgtcaactgtcgagtattttcagagaagaactcttgaactagctttcgggaagcaagtgagtaaggtgatgacgtttttatatggtaaaacatactgttcattcttatgcagttgctagaacaataagaggggctgtttttagatctcaatgttttcccatgtactaatagttaggaaaagctgtcataacaatggttaggaaaagttttcccatgaaaattaccacgattccacaatagaactcaaatgtgtctcgctggatacttaacaggacaggaaatcccacaaacccagtgatatttccacttgacctacggtgcttcagcaacctggaaactcactctaccacccattcactgaatatgcatggcatcgtaacggcaagcaattccgaacttacactgcacactaaattcctcaactacgaacagcaaccatttcgatgtggacgtcaagctgcgaacgtactagaatcgagtcggcaatgaatgcacatgcacatcacgtgattgctcagcacctgatgagcccggtgaactcgatgaagaggtcgaagtggcaggagaaggccgactcgacggcgtcgcggagccgctcgcggacggggacgaacgggaggaggaggtggccgcagccggtggcagccaggtgcggaagcgacgtcgacaccac

SEQ ID NO: 11627 - DNA, 1867 bp, Oryza sativa
gatcagtgccatatgtccccatatttacatgtcttgctggtcaatgtatgtatcgtaccaaaaatttgattctggcgtattggaaataaacgtttcagaaacacggtaaacttggttcaggtcagtatagcctcgagtatcggagaaaatgattcagtagtaagatccttcaggtaaattgcatactacaattaacttaactactcgtcacgaaaagattgtcaagcggctctacatgccagaacattgtcagtaaagaacgacgcatccataggcatcagcacgcacatttgctacacaaattctcattccccagatgctaggagcatagaatgataagagattagcaaagaacaaatgccgcagaaatggtcatagcacatagccccatatctccataagataattgccaaggataacttagagcagagtgatcatccagttgtgctacagagcagctacaaaatttaatatagcattcagtcctaagaactcgacagcgaggtctcaggccatgggcgacagccgcgacagcaacactgctgtcgatgaagctctcacttgagcgcagcatactcctgggatttctttctgtgcttgcaaccacacgatccaaaaaattgaagtttcctcatctcttcatgtctttttgttgttgtctatgtactacaaccctgcctctattttgcggcattcggctggaccttgttgctcccaaccttcttcatcccaccattctgctgctccttacttacagcagacttcttatccaccaagctactgccaccattcgagctcccattgcactctggtttctgctcaaccgcgtcggattgttttgctggtgagctctttggagaaacgtcaccgttggccatctcccccatggtgctggtgctcttgttatgcacgtaagcagatgaatctgttgaagagattggctcggcaggagactgagaagctgtcatcatctgatgaggcagtgcgtgacccgatccaggaggaaggaagacccccgtgccaggaactgggagtcgttgtggagcagaccttggagcagcttctgccatccaagctgttgttgagtttggcaaaggaacaggtgatgggaaaggcatggctgcagcagcaactggagcaggtgctacaaagagtggctgcattccatctgatggaggaatgtgatgcgctccaatggccggcgctggaagtacgccactgtttggggcatatccaaagtgtttagggcttgaagaatgacgcgccatgttagccggccttggaggaccccagggcataggaggtggtgtcaacggggtagtaaaccgtgaaacactttcagatggtacttgttttctcgataaagacttcccgaagcttagtaggatccgctgcttacatgcagcaggaatagctcgcttagcaacatcagcactcttcccatgcaacaccagaagagacctgtagtcgagaggaaaagaaaagagcatgaaaattatacggtgcttttagtgaaaaatgatactccatattgtaatgcatcttaaatacagtattgaattacagtgcttttagtgaaaaatgaaagcatcttacacatttaaatactaacggggtgtaaaattttgagtaatacaaaggggaaccaccatgcttatatccttattatatgggcatattgctacataagaggggtaaacatggtcattatgatattcttataggggactaatccacacgattatgtagtaagtaaataaaaatgaaagtgttgacatctaaaatattcatcacacatacatacgtgtgtgtgtgtgtataccaaaccacaagtattaaagatttttcaagaaaacatcaataatca

SEQ ID NO: 11628 - DNA, 7849 bp, Oryza sativa
tcccgcgcacgcgcgcgcggcgcgcgggcggggcggaggggggagcggggagagaggcgctcggggcggctctcgcacgcgcgagcagcgtgagggcggggaagagagagagagagagagagagagagagcgggagagcgcccggggggagagggagagatgggccggggaagaggggaagatgggccgagcgagattcggcccatcgaccttgggggaggcaaaatagacttttgcggaggaatttgattggaaggaattggattcggagttgaactcgacgatagatcggggattgatatcttgagatggcacggacactagacaacaagcaaagaaacaaatttcgcaattagggtttttaagagataattttcccgctaggcgccacgacggaacgggcgctacagaccaacccccctaacaagaatctcgaccccgagattcagcacctaagggagcaggtccgggaactcggcgcggagaagatcttcttgctcccaggttgcctcgtcttcggaatgattgctctattggactttgtagaacttgatggtcttccttcgagtctgacgttctgcctcttcaagaaccttgatcggtctttccttgtaggtcagattcttttccagctcgatattacccaggggaacttgctcttctggaactcgaagacatttctttaactgggatacgtggaacacgttgtgcacatctgcgagaccttcaggtagctcaagctgataagccacttcgccacgtctggcggttatgaggtaggggccgatgtagcggggtgctaacttgccggacatcccaaacctcctcataccacggaggggtgatactcgcatgtatacatgatctcctttttcgaactcaaggtcacgcctccgattgtcagcgtaattcttctgacggctctgtgctgtcttcaaacgttctcggatcagcttaacttgttcttctgctgacttgagtatgtcaggaccgaataccagtgcttcgcccacctcattccagcacaagggagtgcggcactttcttccgaacattgcctcattcggcgacatcttaatgctggcctgataactgttgttgtatgagaactccgcatacggcaaacaacgatcccaagtgccttcgaaatctaaggcacacgcacgtagcatgtcttctaggatttggtttaccctttcggtctgaccatcggtctgcggatggtaggctgtactaaaattcagatcagttccgagggcttcatgcaactgcttccagaaccttgaggtgaactgagtgcctcggtctgacacaattttcttgggacagctaaatctacatacgacatgggtcatgtagagttctgctagtctctttccatcataggtggttttcactggcacgaaatgagctgatttcgtgagtcggtccacgattacccaaacggagtcgtacccgctgggggttcttggcaaaccggtgatgaaatccattccgatctcttcccatttccactcgggaatcggtaggggttgcagcagaccagctggcctctgatgttccgccttgactctttggcaaatgtcacacagggctacgtattctgcgacgtctcgcttcattccagcccaccagaaatatgccttgatatcttggtacatcttcgtacttcctgggtgaatggagtaggcggactcatgagcttcctttaggatgagatctcttaactccttcttggccggtacacagatgcgtggtccgcaccaaactgtgccttgatcgtctatggagaaattggtgtctttcttctcctgtattctttttattaattcttttatcccttcgtcgtctttctgagcctcccgatttgcgactctagggtaggctgtactgtcaagctggcagggacacctgactgtaccacggtcagtcttaacttctccaattctctgcacaggtgatcttggtcaggccgtatttgagctacattgcaataggccttgcgacttagcgcatcagcgaccacgttggctttaccaggatgatagtggattccaagatcgtaatccttgattagttccaaccatcttctctgtctcatatttaactcggtctgagggtgtaacatcccggcctagggcttaataggattaatagaatactcatatcaacaagttgcaacttcttttccggaagccaatctccaaagaactccagggttaagcgtgcttggcctggagcaatttgggatgggtgaccgaccgggaaattcttcccgggtgcacacgagtgaggacaaagtgtgtagaaaagacatgtgttggtctgtgagggcagtctatgacctatgaaagctatcatatgtaagcgggcccggcctgggggaaggcgggacgttacaaagtggtatcagagccgactctcgcggtttcacgggcgcgtgtgtcgcagttgcgcaggcatggtgcgcatggctggtgtagaccgagagtggttacacagcatggcacatgcgctggcactggacacatggacgtggccaagaaaggacgttcctggcctagggttgatcgacgggggcgtcgatctctcttaagggggtgagggtgtaacatcccggcctagggcttaataggattaatagaatactcatatcaacaagttgcaacttcttttccggaagccaatctccaaagaactccagggttaagcgtgcttggcctggagcaatttgggatgggtgaccgtgcttggtctgtgagggcagtctatgacctatgaaagctatcatatataagcgggacatgtgttggtctgtgccagggttgatcgacgggggcgtcgatcagtgtgcccgggtgcacacgagtgaggacaaagtgtgcagaaaagacatgtgttagtctgtgagggcagtctatgacctatgaaagctatcatatataagcgggcccggcctgggggaaggcgggacgttacaagtagttacacctcatttatgtcccacttacatatgtaattagtatgtaatttttaaatttacatttataattttagtacttacatatgtaattttgagacttacattgtatatacactaaaattacatatgtaatttagggacttacaatgtaaatacatgccgactattttttgatgaaaaatatgacgccataaatatagctacacccatgtcaaaaatcaatttcaaactatatttacaaattaagaaagaaaaatattcaggtgtgaatattaccaaatactagtatcatacattgaatctcttttttatttctcgatacatagtttttttagacttcagattttctatgtggtatatgtatgttgtataaatgctattaaatttttaaatatttttttcgtagctatttgaatgtttattttacaaacgaaagatttcccgagcgattgaaagagttcccttcttcaaataaaagaagagtttcccaaactgatgcccttttgtttcctccggggatactgttgtaaaaaaaatacgaggcacggcaccatgataaattaagggactataataacaataaaatattaaaatatgccgtcataaatttagcaaatccgtaaatgaaataaattgatcttcaatccgttttacagtacaagaataactcagtccttcgagctaacgggtcctcctcccttaacttccattgacaaatctgcagctcttccggacctccccctggctgcccgtcagcggctggatgttccccatgttgaccatggacctggcgaagctcttgaagaaggccttctggctgatggcgaagctgttgacgatcgccgccgtgggcgcgcccggcgtggacaggagctcctggtcggactggaggaagccgcggttcacctcgatgttggcgaagtagttcttgtcgaaggcgtccggcgtggtcgggtccaggtcgttcagcgccgacgagttcccgccccgccgcgggcagctcttcgccagcgcccgccggtagccggcgtccagcgtcgggtccggcttccccgtcccgctgaagttgtacagcctgtccgtcacgaactggcactgcaccctcccgaacgtgtgcgcccctgcccatttacattcattttcacccacaattttcagtttcagttgattgctattccctccgtttcaagttataagacattttaactttgatcaaagtcaaactgctttaagttgtaaaaaaatagtaatatttttaacacaagacaaatttattataaaaatatattcaattattgatttaatgaaactaatttagtattataaatattactatatttatctataaaattaatcaaagtctaacgttttataatctggttcggagggagcagtaggtagcgtcgtacgttatctccctatctgttactctgtttatttacctgagagggcgacgaggtcggtgacgtcgaggccgacggcggcgaacttctgctgaagggtggtgaggttgtcgcgggggctggggaggttattgtcggcgccggtgaggttggccgtggtgccgtcgcgccggccgaggggcacgcgccaccgggggcctccggactgcacgcattgacacacggacattgtgggcgtcatgtggccgtgttggagtaaagtgcggcacgaaaagaagggatttggtgtgggatctcgacgtctggtcgtcgacacagccgatgccacatgatgtgtgcgaggacataatccacgtcgtaccatgtggtctctgttttttggtgctcataggattattatttttttacagacggttaatgttggtgagattatgatctatctgcagcattgcggttcaattatttggcaccgacgtctagctagctttatgtctcgctccagtccagttcccagcccagtcacgggcatattgtaggctgtagcgtcaacctttctactggagataaagctagcacgaactactagcttgccagtacgttaatttgtcactatgctggcgtgaaaagtatgtgaaagaacgtagctaaactgcttcgttggttagcttccaatgaagttgacgtgcgattgttatcgggagataatgacgggtttacgtgcaaagcatatgcacgtatatatatcttcgcgccggcagatcgatttctcgcgagcgtacacataccagttcgacggagatcttggcggcgatggcgaggatgtcggcgcaggagacgacgccggggcaggcctcctcaagtgccgccttgatgtcgtccaccaccgggtacccccgcgccgagttgttgttcggcgtcgcgaacttctccgacacgatgctcgtgctgttgtccagcaggatcgacgcgtcgcaaccctggaaaaaacggaaacgtcgcgtcagacgaacatcctgcgtggcgcggcgtacgagtgcgcgcgtgcacgccggcaatggtgtggcaatagctagctcacctggacgaagcagtcgtggaagtggaggcgggtgaggctggcgaagatgcgggggtcgtcctgccgcgccctcttcagcacgcgccgcacgatccggtgcacgtccgggcacgtcccgtcgtagtacttgtcgcacagctgcgccgacgcgccggccgccgccgcggcgagggccacggccacgaccaggaccgcggcacgaaccgcagccacagcgcccatctctctctctctctctctctctctctccgctgcagccttgagctagtaacgtatgtacactgctcactccgtgacgcacaaatgagaaatgaccaagtgttaagtcggtgtgacgaagaagaaaggaagctggctatatatagacacgcacacgcgatcaattaatctgacatgtgtatgacatatctcgccatgcacaggcttaattgtttaagtatgacaaactaactagcggcacctttgcttgaacccgaaggatatataaccaatcattcgcggaagaatcgaacgtgttaacaacgtagatagctcttcggctatcgcggcgtcgttttcagagtgcaacgcatgcatgcatgctggtgtgcgaacagaaacactgtgctttagaatagtttcccctttgcatatggccttcccttccctgtgcgttcgttgggtgcacctaattctctcgcccgatcgtgtgtgctagtgccaccagattcaggcagtacaacgctgactcccgtttagtttcagtttgttgcaggtgcagcaatgcagcagctaagctgtgatgccttgactgcacggtccctcgctctccccatcactttctgaacgaataattgcagggccaatgaaagtagtagtagctggcaatatttggagccttcttcttccatcgatcgatcagagaggtggtcgttggctcgtttggaggggaatgatttctccggttgagtggttgctgacaactagtgctatatccgtacgtggtaagcatacacaaattaaggacaacgtacctgcttcttccctctgaatattttgtgtacagtatgtagcttgtacagagttctcgtcaaactaaaattaaactcctcaccgacgtttttccatgacattttagcgaatttttcaccctttgtccttctccaaactaaaaatctgcctgtcatattcaggatcatcaaggcatgatttttggccacatcatcagtcactgtatcatgcaccacgtaatgaaaaagtagttgcagtagtagtacgaaaaagctaaacctgattggatgctggagagaaggcgaggcatcgttctcggaacataagtggtcgatgatgagattaggtggcagatcgatccagaaatgcaaagtcaaaaatctaaaagtttctttgcaacggagtcgttagcattcattccggttttttccttgcttgttcaaggagctgcatcattcagttcggaggacgtacccgagcacctactgataaaaccatatggcagttgcatattctttcttttactctgatagacacagcgcgtttgtctgtgctctaataattggtgatacacccactgaaaatgcagctgcagattcgtgtaggacgagcaactttgcatgctaattgcttattctactcgtgcattggagagagaatcctagatagcttgaacaaaacgaaacatgtagcgctccacaacacattaaaaacgacagattcacacttgagtccaagaagacgatatagcttctggcaaatccaagatggggtcatggcagatgcaaaaaatctttgcctttttgctcatcagttgacggccctgcagttcttgcgaatctggccggcagagccggtgagagggctgatgttgcccatcttgaccatggagttgccgaagtcgcaggagaagcgctggccgttggcgctgtaggcctgcaccagcgccttggtggcggcgacggcggggtcgccggagctggagacgaggccctggtcggaggcgaggaggcccttgttggccagcaggttctggtagtagtggttgtcgaacgcgtcggcggagttgacgtccagcgccgccagctggtcagcgccgccgcggcacacctgctgcaggctggacgccagcgacgagtccagcgtcgggtcgacggagttggtcgccgagaagttcgccagccggttgctgaacagcaggcagcgagatcgcccgatcgtgtgcgcccctgttcaggttcagaagagttcagatcagtcttggattgattcgtagccaaacataactatattttgaaacggagggagtaacaaattggtgcagaaactagtttttgatctgacaaatgctaaatcatgcataatccacgtaaactgctatgcatgccacaccga

SEQ ID NO: 11629 - DNA, 1559 bp, Oryza sativa
gatgttcaaaggtggcttgccttgctcgagatctggagcttgatcctcgaaattctcgcactgcgggtcttcgggttccggaactacacgcgaaacgggacaactcaacaaacggcgaaaataaagccctattaaagacctctaagcgtgccactagatagatctcgagatttgggaaattttagaagttgaacggagtcaaacggaattacggttgggaagatattgaatttctaagattattggatttttggtctaaaggaaaaggatttaattaaatcctttttgaaaaagaaaagaaaagaaagaacagagggatggaaattagacttttcctcgggcggctagggcgcggtccaaggtaaatggagcggctcggccgagcttaacgggccggccggcccaagacggcccaagcgcgcgcgcgggagggaggagagagagtccggtggaccgggctcaccacgcgcggtcccgggtgggacccgcttgtcagcggctcggctcaccgtgcggagggagtacgtggctcatgcgcgcgggcggggaaaggacgcggtgcacgcgagcggtccgtggtggacgcaggtgcggcgggcccacgcgcagcctcacggctcgcggtggaacgcgcgcacggggagggactgaccggggtcggctcgatccggtctaggctgagctggcgccgacgtggcgcctacgtggcggccacgtgggctggcgggaggtagacgacgacccggcctcgaatggacggcgggcggcggcggcgagcggcggagcgaaccacggcgatacgggcaacagcgagcacaccgggcggttgcacgtgacaagggaaggcgagccatcggctcggattcgccggaggttgctcgacggcggcggattgcggcggtggcaaccggcggcgggagaagagggaaacggcgacgaggtcacgagaggtcgattcccggcggtgagagcatctacgcggcttcgggaactcgacgctagcgtcggattgggtggaactacgccgagcgaggccggcgacgagcgggtgctacggagctcgagcggcgacggcggcgaacacacggcgaacgacggcaacggtcggggcggcgccggctaactacggggaggctactcaagctactaccgaaagctagggggaggagatggagcgaggaggaagaacggagagagacatcaccgagaagaggaggggcgatgtgacgagaggccagcggcgcgggagtaatctctccggcctcgggccggggaagaggaaggagagggcacggccgaagtccccttccgcgtcctcgaacgcaccggctctcccggcgcttggcgaaggacggcggaggcgagacagagcacgggggcggcggcaacggtgaggaggcgaatgggagaggaagggaaagggggaggcttgggtttataggatggcaatgtcggtttgggaaccgacttagggcggtcaagggcgcgagctggcgctcggcggtcgcggccaaagcggcgacagggaggatgacgccggcgaggaggaaaaaggggaa

SEQ ID NO: 11630 - DNA, 1676 bp, Oryza sativa
tctgttcccctgctggggtttcatggatttcttttttagtgaacttttttttttggtgtcccttttgcagcggatattgacctggccaccatcacggatcggatggaggtgaagagagcggtgcaatcagggaatgttcaggaggccatcgagaagattaacgatcttaatcccacggttcgattccattacttactctagcaatttttgtgccacctcgaaatctcgaatgttgaactgcctttggtggtgacggtggaggggcagcaatggtgttgcagaattgggttctacctgagataagaatgtcatagtagcctttgttgttgtttagtaatgctagttttggtgcttccctggggtatgagaattggacaacgagaaggatggttgtttctttctgaaatttagagggccagctagttttggaatcgagggcaaagtccttgaccttgtccgtgttttctgtgcttggcgtctttcgatgattaatgaatactgtttatttattgtattgtgggaattaagtagagatgatggaccacttgatttgtcaaattggattttgccaactggttatttgttcttgcctcttgtcaataactaggttagtgctcctcttgtcaataactaggttagtgctgtctagttaaacacatgcccaaattttagtttccttttctgggtctaaggattattgtggtgtattttatttgacaagttgtttatattttggaatcatgaagcttattcaattttcaaacatgccaaattttttttattcaattggacggggagaaattggaaaagtgaataaccttgaactatgcgaactattcttccctgttttttttttttttttttttttttttttttttttgctttacatgctagttttctgcgataagtttgggaacatttaacttaattggaactgattttggtgagctcctgacataaatcataaagttcagacttgagcactatagtgttattgttcagagtactgacgtgatccccaaggatctaacatattttcataaatatcctgtaacacattggaacaaaatgtctcttgctctattcaccgttaaaatcttcacagtttcttttttcaatgtcccttttaagttcatcaatccaatgatgttgctccattgactcctcggtaccgaggtgtgtctactgtggtaaatggcagctctgatcatgttatttgggaaaaaaagactcaacagattggtcataaatactttttttagtattttactcctttctttaaacaactcagaaatatctacgggaatccagaaattacatacgtggttgattgacgaactgttcatatcgacagtattggccatcatgtgatgtgcaatcaaatcttctccaagtttgacagtttatgtaccttaaaagagcacctagaagccttgtgaaacaacaccttaaatcaaaagtcattctcttaatgctgtatgttctgctgcgatgaattttgtaaattaacaggaagagttctttaacttctgattcttcatcctgacttaacttcccatgtgcagattctggacacaaatccccaactgtactttcatctgcaacaacagaagctaatagaattgattcgtgcgggaaaaataaatgaagctttggagtttgcacaagaagaactc

SEQ ID NO: 11631 - DNA, 11407 bp, Oryza sativa
ccagaactgatggccacagcaaaaatctaagggcatttacattgatggctctcagtctaggccaaagttttccacacatgaagatccatcagaagatagcttcccacttccttttacactatgctccactatctcgctgcatccttcaatcgcaatcttttgataaaggacaaaaactacgaaaataaattccgtagtagttcttcaccaaaaggaagagatttcataaggaatcaccgagaaggaagagcaaagagtaatgaaagaaatgagattttacacttcctccggtcttcaaattcggtgtggttaaagcaagagtagtcatcatcgagccaaataactgttttttgctactctgatgctcacaaaatagctgaaagtaggggataaaatgttatataagtgttggacctacgagaaaatgcgagaatctactggaagaagccgcatgtccagaggtccccataatttatcttgcatctcttcagaaaagaaagcttcaggtccacttaatggtgaccgaagtgacttatctttaaagctagaagagtgcaccacaaataagtaacgaaacaataaaaatattatcttttttattccaaggctgaataaaaatgtgtctctaggttttggctccattcctgacgaacgcaattccatatactcaaaagataaacggcacaagtacaggagaaacgcgctggctagctagcctgcttataaacatgctaccactatccatagcatcaagaaaggaacgaatatgttgtatggctggataaaagtaaagtaagatgatttggtgagaagtttgtagcttacttgcggcagatcatcttgtcctggttgtacttgcgggcaagcgcctgaagcgacggctcgatgataccgccacggagcctgaggacgaggtggagggtggactccttctggatgttgtagtcagccagggtgcgtccgtcctccagctgcttcccggcgaagatcagccgctgctggtccggcgggattcctgccgacacaaacccccatgagctaccgccgcaaagccacagatgaaggaggaggaacaacaagaagaagagggtgtagtgggtgcgtaccctccttgtcctggatcttagccttgacattgtcgatggtgtcgctgctctccacctcgagggtgatggtcttcccagtcagggtcttcacgaagatttgcatcttggcgccctagctgctgcttcttcttcttccccggggctctctcccctttgtctctctagctccttgctgctgcggcggcggggggagaggaggctggatgttcgccgatttatacggtgcgagctagggtttggtctgaagaggaggggagcgtggagtgtaagacgggcagccgaaatggtccgcacaatccgagggaatagttggcccagctgcgcctctagttagtgggccgggcaagttcttgccgaggtagatgatgatggaataagttcccctaccatccctcaactttacgtcgagtctgtggtgtccctaatctccaatatcagaaatcttcaccccttaaatgttcaaaaccgtgtaaaataggtctcatatcagtatatatgggtgttttcactgacatggcatcccagttagcaatctagacccacatgtaagggagacgaataaaaatgtggggtatgcatcccttctttcttctcttttctcttttctcttctcttttctttctcttcgccgtagagaaggatgtggaagcgggtggcggcaagaccacaagagtctagagcgagtaggcagagcaacgcgcccgcgtggagcggagcaggggcgccagcggcagagaagagagcgactgcgggcgagcgcggcagcgggcggcggcgagcggcttgctccgctcaccgctccgccagctggcttcgcctgcttcatcctcgcaactacctcaccgccggccatgccattctcctacgttgctatggcctctagctctgcgtcctcttctcgcaagccggttcccatcgccacagccagcgcccatcgattagttccattgccggcagcggcggcggtcgtggcggcacctacgccctcgccgtcaaacctagcacggtctccgagaccccttctcgtacttctccggggaagatacctatctcaccgcctccgatctggtggccgcttccgtcatctcctcccacctctccgttgtgggggatggcgccgacctctccaaggtcgggatcttcctcaactccacggcgcggcaccgctctgtaaatggcatatgggctctgtaatttttttattccttctttgctgactaggcggatgccatgtcagcaaaaccacccatatataatgctatgggacctatgctatgggacctattttgtacggctttgaacatttgagaggtgaagatttctggtatttgagattagggacctcggactgactcaacgtgaagttgagggacaataatgaacttatcctatcttactataaagttataacccactaattctaaagctcaacatgcaaagatgtcacatcataatacattaacaatatatcacatcatcatccattaacaattattacatttaaacatcatacaagcatgttatcttatctataattttataatttattaaattttagagtttaaaaatgtaaacatgttaaatcatcactccaaataattcacataatatttcaatatatatcttcatcatttatgataatatcatatatacctatatggtacatcctcacttagttagtgttatttctctcttctcccattaaatcatatcacatcaattatttttagccttaaatgattaatctatggtccaaactatctcactccctttattctcttataatacttcaatatcttacttttacatttgaatcgtctatatactatttaaatttaaattatcataaaccatatcaacttatgtaagtatatgttgttagccatcttacatattatttttacttattgttatcatactgaaatcccgcagcaacgcgccgggtttcacctagttccgtagatgattggtcactaaaaaaaattaggaaatgccttttttttttcttcaagaagtaaacgttcttgtactagttagatgcttagtttgagttgattttttcagttatacagactcataagaaagtacgtgaagatcccttctaatcatcagactaattctatgtcacgaaaattacttatagcagtaagaatccaagaccagttcatcaactggtaaatactggagcagttggaggcctgaagaaggtgcaaggcaaaacacctgacaagccaaatgttgcacgcttttgaaattatctaatgcgtgtgtgcagagtataatactaaaaggtttactgtttgtactaataataatacaataaactaacaattcagcgatttctggccgacgagttgctctctcgagtaatcacctctatctggtcacgatcaagaaattagaccccttctgtcacatcagcagatcagctcaagtgctcaaccactacacaagtacacgatcaagtaggcaagtagtacgcgttggcgttggagggagtccacacatcattgcacgaaaaagcggcgtctgcaactaccgtagccggaacatgtcaaacctcgttcgagccctggtatataaatacacccggcgacgccatgtccgctccacgaacaacgcaacaccaagcttagctaatctcacagtcaccgagctgaggtagctggcgagatagatatagctagcacagagagcaaaaatttcctagcgagatcactttaattcgccggcgtgcatggcggcggcggcttcggtggtggtgttgtgcgcgctggtcgtcctcgcggcggcggggggcgcgagcgcttggccggtgatgagcccgtcgtactacgaggcgtcgtgcccaagcgtgtacgacatcgtgcggcgcgtcgtccaggaggcgcgctgcaccgacccgcgcgcccccgccagcctcctccgcctccacttccacgactgcttcgtcaatgtgcgtacagtgtgtcctaggttgcgtgccatgcatggcgtttgcgtgacatatttgagctgggattaacgtgtttgtgtgtgcaggggtgtgacgggtcgctgctgctcgacgacttcggcgcgatgcagagcgagaagaacgcgcccccgaacaaagggtcggcgcgtgggttcgacgtggtggacggcatcaaggctgccctggagaacgcctgccccggcgtcgtctcctgcgccgacatcctcgccctcgccgccgagatctccgtcgagctggtcagtccatgcacgcacccatgccatcaaacattcaatcacgccgaaccatatagtatctgtggatcgctgacacgtacgctttcttgtcgagcagtcaggagggccgagctggaacgtgatgctggggaggagggacggcacggcggcgaacttcgagggcgccagagacctccccggaccgacggacgatctggacctcctgagacggaaattctccgaattcaacctcgacgacaccgacttcgtcgctctccagggcgcgcacaccatcgggagggcgcagtgcaggttcttccacgaccggctctacaacatcagcggcacggagcagccggaccagacgctggacatggcctacctcaacgagctccggcagagctgcccggcgagcgaccccgaaagcgcggcgctgcgcaacctcgacccgcccacgccggacgcgttcgacaatagctactacggcaacctcctgcgcaaccgcggcctgctccagtccgaccaggggatgctctccgcgccgggcggcgccgcctcgaccaccgcgcccatcgtcgtgtggttcgccggtagccaggacgacttcttcaggagcttcgcgacggcgatggtcaagatgggcaacatcagcccgctcaccgggagcatgggggagatcaggaggaactgcagggtggtcaaccgcggctgatcatcaggttgatcagcgtctccgtgaaattgtttgttgaaaggaaaccagttgggtggcccgcgcaattgcgcggttagcacctatacaaaattatatatctttaatatgattttatttaaaatttattaaatagttatattgttgttaagactttgaaatttcaaatcttatcatttccatgtttctaattttatattttttattaaaagtcacaccagttgctatctgttacttctgttatatccttctttatttgcttgtccgatctggcactgtttctattcattctatttggagcctttcaaaattagatcttatggtttttagagtttattgtcccgttgggtttcgattttataatttttagaagtcccgtcaaacgctaccattatactcctatacggctcatccactacctcttcttttttattgtcgttgttattttcaaaatagaacataattatcgcttgggttcattttttactttctaagaagttccgccaaaacgtcagcagctttgtcaatgtgctcctctatggctcgcccgttgccttccttctttattgtcattgagattttaaaatcaaacatgaatatcattgaagtttttttttactttttagaagaccgaacttttaaagttggaccttatagtttttataatttattgtctcgttagaattcattttttataattttttgaaatcacgtcaaacgatgccactatattcctgtacgacccgtccgccgcttactctttatattcattgggattctaaaaaccggacataactatcattggaattcattttttaatttctagaagtcacaccaaccatccgcggctttgccattgtactcctgtacaacccgtccactgcctcttcattttattatcattgagatttaaaaaatcaaatatgattatcattggttttttttttactttatagaagtcccgccaaccaccttaaccggttgcttcacggcctgcccgtcatccttccttttgttaatagtttttagatgtcccatcaaccaccatcactctactcctttataggcctattacttaaataatctcgtcatatgttttagatgatctttgtctttcaatagtctttattttttatcaccaattttagttatttataaattgtattcctagttaaatcttatttttctttttctaatttcataatttatttttattttttatttcgaattttaactaatattgtattgtgttcttttaatatttatttcagtcttcttaaaatggaaaattggaaccatgccattataattttgtaaaatttgagatatgccatcatgacccacatgtcattgactcatatgggtcctatatgtcattgagataccgatgacatatctcaaactttgcaaaattataatggcatgattccaatttacttttaaaattgtattcatacttgaattatatttttaatttgtctagtttcagattttattttatttttcattccgaattttaattaatctcgtattgggttcttatatgtactcttatttcaatatttcatatatctaattctaaattttagttaattttaaattgtattcctagttgaactcttctttttttttctagttttgatttttttattttttttctgaattttaattaatctcgtattgggtttttatatggactcttcttccaatattgcttaattttaattctaaattttagttatttttaaattatatttctactcaaactcttctttctttttttttctaattttggatttcatttttttattatgaatattaattaatctcgtattggattattatatggactctttttttcaatagtacttatttttaattccgaatttcagttatttttaaattgtatttctagttggactctccttttcttttttttcgattaatgttagaatttctagcctccatagcaaacgcgatacctccttttaaagctgtttttaataatatagttatttttaaattgtatttctactcgaactcttctttcgttttttcaaatttcggatttattttattttttattctgaatattaattaatcttgtattgggttcttatacgaactctcttttcaaccgtacttatttttaattccgaatttcagttatttcgaatttctagttggactctccttttctttttctccgattaatgtggaaatttctagcccccacagcgaacatggtgcctcctttcaatttgtttagtaatataatagattgcacatgtgttttatgttttaatttcgtttagttatttcttttctatgaagattgaaatgtacacgtgaattaataattagctacgcaaaaaggtaaaaatgaatagcttctatcaaaagagaaatggtttgacagatactttctaagacgaagtaacgacggaattaagcacaaaaggataattaatcatgcattcaaggcgcaatggcacaacatgcaaaaacactcgtgcatacagccatcaaatttcttgtctagtacaaacatccagcagcataaatagcacaagtcattgcataaaactatgttaaactcaaacgctgaacacagccggagaagacgtttacatggaggtcaaagtttgttgttgggtaagtatatgtcgctcgaacgactatgctaacgaagttacaggccagcagatgaaatgctgtttcagcttcttcagatttttcttttcttaactaaaacggcaacaccaaggctacataagagctactacaacacttgaatacaaattgggtcggttttacacttctacgaatgaccatcatgcttcccaagctcgctaggcgggggtaagagaagtgcaaggcgctgcttgtatctttcaatccgtcggagccgctccttttgcaaactgccaaagaaatttatgtcaaagtggaacacaacactcagtaactctgtctaatgaagataacattctcaaacagccattcctcaactaatgttttcaatctgccgtctatcaaaatgacaacctaaaacctctccactacaccacataaaagggcgttaagttagctaacttaatatctccacccagcaatataagtttgattgagcttgcgattaaggtgttaatatatgttatataaactgactacaccaaaacaatcaacatgacaacatcacactacatattttcatttgtcttgtgaaacactttcataatatatcttcttaccatttttgctagtgcatcattattgtttcgttggatacctgaagaatcaagctggacttacatattggaagcaaaagccaatcatcactattgcatcaccatattttgaacttacttgctcacttcacaaatcatacgtaaaagggctggaagatgaaaacaaatacatacccagcacggatcttttttgcacgcttcacatgctgcttcagcaagtcacttgcagtatattcaccggtttcattctgcacagaagatcaaagccaatggtttttgagctaatatagtaacactgcgattatagatgtaaaaaactatgcttgtggtgatagaaaagataatagaaggaaatagtaacaatagctacaaagtggtcagtaacagaagtcacaagcaagtagctctccccaagaatatcaatttacagacgaaaaagggactcctttatcccttcagtctcaagaactttttgggatactacatttctatggcaaggttgaaatgaacccggatttctcaaacatgttggatgaaaccgtcacctaatacctaatattattgaaggttgtaactgggaagcaaatctaactattttgggagcaaatggaacacatgggcaaataatggaccaagacaactgcaaataagcaagagtgggatatgcaggacataagatagacaatatacttcattttaaataacagggtaaagcgtaaaattcagagttggtatgtgcaactcctaagaaatacagcaatttttgcatgtattagtcataatattagttataaaaggcatacacgcttacatgccaaaaatcagaaaatgccagtatgatccagaattgcctggaaagaatataactaagtgttatgctgtacgatgaattagcataactaaaatgctagattcattgaatcaaagatcaaaacttcaaagttagttttttacaagataccttctcttcctctgagttctctttctcagcatcattgtccttttctgatatcctagagtccacgactgaagcaggcagtggtcttggaagaattggtgcaccagttccaaagcttggctgcaagaactagtaagacaagtgcatggatagcatgatgcacatacaaaatatggactatgaactgcagatattcacatattaagagccaaaaggggaattccttgtggtggtggtggaggggagtaaagtgacaggagccttgcctgtctattagtacaaaggaaagaagaaagcatgcagtgcaaaacaactcacattgtctctacaggagacatcgctccactaggcaattacattttataggacaattcaatccatacaaagtgcacctggcaaaattctcacaagtttgaagcttgttgatgttaaaccaaactttaaataacagagagcaaatgtgtgtccgttcaaagtagtaagaggaaaattcaggcatacaacataatcaatcaagttgtagtcctagaattgcatttataaattataactgagaagaaatacactttagagtaactctagaaattataagaccaccagaatgacaattgaggcgtgtaagaacctgttaggatctagtttaacataactatagagaaattttcacatggcaagtgcccaaatcattcatttgtaacgagtgagcatgctaacctgactttcatgtggaactccattacgcacccatgatcgacaaagtgcatacaaggatcctgactcactatccatcaagttaacctttggaacaataaaaagaaatgtcagtttgtgctgtccacttgatctgtcgggataaaacaaggtatagattatattgtgaggttcctcatatgtgggccaattatatttagaaattagaatttcagcctcgtagcccaagtatctacaaaaccatttggataattaagaaaatgaattgtgaaatagaagcaatttgcatttgcatgaacagaaaaaataaggtgtgaagagccgtacgttttaaatttctttggtaaatgttaaaccaaacaaaatcatgtttatcataggagctgaaatagtgtcactaatcagagcaaagaaaaagaatttgtatcatataaaacgtctaaggtgagccataactggtatcccaaagattcatgataatgggcaaaagtgattgggcatgttccaactatccaaaggtacaggtattctcctcatctagccaatgtatttgcattaacacagcgcaaatgttctagaaaaaagtttaagaaacataaacttactttacggtcattaataaccactgttgtagagtcctccttgctcctttcactacaaataaacaatcaaaattgacagttgggaagtctaagtccaaaagataaaacactatagtttgtaactatatcccctcaaaagaaaaagataacacactacagtttgtagttttcttacctatcttttgagttgttgatctcttgaggagatggagttacagctggtagtggaatgacctaagaaagatgccagaaaagcataatttaagggaacttcaaaattcacaatatttaagtccagaatttatcaataaggaatagcctaattaacacagcacccaaaatagaccagcaccatttataatcaaaataacaataaaaaaacccatgaattcgtgtcttcgcttttacaagatctaaatccagtacggaaccattcacatgggcctaatttacctcagaagtagcattgtgctattaccaaatataagttcactaagcaattcaacatgcacatgaaacgtagcatgcccaacaggtaataagttccaaaatctaccataaatcgccaccgaaatctacaagtagcgtttaattaaaaagctctagagagtagaacgttcaagacttcaagttctcgtctagttccccttccttgcaaagctcgcagactaaaattagtcactaaccttgggctgtgcttgctgagctatagggactcctcggggaggctgctcggggcgcgacgacacacctgccaccaccgccctcggggcggcggggaacgaccggccatgcgtgggcgccaggggatgctgcggctgcactatgggcaccgcgacggcgtgggcgcgagg

SEQ ID NO: 11632 - DNA, 1079 bp, Oryza sativa
gtaatcattttgagatgctcggtgagagagtttccgtgtgagtttggagtgtgtttgcccgagaggcttttgtattaggattagtttggagtgtgtttgtccgagagattttaagtttgtgttaatgttcctctgaaggtgtatgtttgctcctagttgagcggttattttgcatcacctataaatgaaatgatttgaaggatttcatttttgccttgtccatttaaattccgcaatttaaattccgcttgcaatttgaactttgcgatgatgagttttgctctctctttctcacctcacttctagtttcgggaattccttttctcttcctcctctagtttcgggaattccttttctcttctttttctctcttcttttctagatccggcttctctaatagccgcgattctagtaaggattttgagaaatccggcttgatgagtattttcgggggcaagatttgaattgctatattcaccccccctctatagctgttcttggtctttcaattggtatcagagcccggttaagttcgttgtaacctaaccgtggcaacgaacgcagctatggaggaaaaatactctgcgaaaccatttgttttcgatggacacaattttgtcatttggaaggcacgaatggaggcctacctccagtcgcaagggcataatgtgtggaataaggttaaatctccttatactgtgcccgatgatgctgacatcacgcctgcaaatatggctcaggttgattttaattatcgtgcaagaaatgcaatcattggtggaatttcttctggtgaatttaatcgtgttcaacaccacaagtccgctcatgacatgtggactgctctgtgcaatttccatgagggaaacaatgatattcaattggttcgtcagaatcaatttcataaagaatatcaaagatttgagatgcacccaggagagtccattgattcttatttcaaacgttttggagaaattatttcgaagttgagatctgttggaaaagaattttctgataatgataatgctcgccatcttttgaattgtcttgattatggtgtttgggaaatgaaagttact

SEQ ID NO: 11633 - DNA, 1659 bp, Oryza sativa
gtgagcatgccctccaattgcccgtttcatgcttcaaaataggttgaccactgaagcctacagatccatcgcctgtgtagtcatcaacatcctacggagagaagcaaagtactagttgattctaaattattcatgtttttgtcaaacatgtttaacgcatttcactccatcagtttcaatcaatcttcaaacccatccaaaaagaaatcaaaacttaaaagttacaggtcaaagtaaccatcagatttttcaaggaaatgacatcagagtgcagacaatcaatcaaatttcacagagaaaataacttccacaagtaatttgtacgtgtcaatccaataaatcctcaaaattgttgcgtgttccagcataatacccaaggtgcatcaaggctctaagcagtacatcaaaaaatgattgtctttatgagcgggaccctgtggcctgtgggcctcacctgtcagtcatcactgcgcctctagagtctagaccttcaccttccccgttcccctttctctactcacggccatcgttttgcaaccgactaatcgaagtgtcacacgccaatctgaccaagctctacgcgatcccaagaatccaagaactgagcaatcgagctgtccatcattttccccctcccttttctcacgatttctttgctaggccttttctcacgatccgggccaatttaagcattttcaatcgatcggaacataaccaaaacaagaaactaaagaggattgggaaaccctacgaatcctcgaatcttggtggaacaaagaggggaaaaaagaagtttattctttttcgtgtggatattgtgggagtacctccggctctgtcgtccgcactatcaagctctgctgctccgcctccagcgacgaccccatgaatgcaccttttgcagctcggaagggttgctgcaccctccacgaagaaaggtgttcagctttgaactgcttctttggcaactcctgctgcaaaaggactccctccatattttaatgcataacgtcgttgactttttaaccaacatttaatcattcgttttattcaaaatttttatacaaatataaaaatatttatatcatacttaaagaatatttgatgatgaatcaagtcacaataaaaataaatgataattacataaagtttttgaataagatggatggtcaaacgttggataaaaagtcaacagcatcatacattaaaatatgaagttagtaggaataatcccagaggccagaacgcgagagcttgagacgttaaagaaacaggcttatcatttgagttttatgaaggggcctttcctccaacatgataggacccaattaaaattggtcgccatctctcatatgtatctctttgtgaaaccatgtgtggttatagttcttttgtgatgggaaattgacaagtaccggatgtgcaagaagtgtgtgtgtggactaacgttggtcaggttgcgacatctgtgccaagacaacggttgtttggttcatgtgtgtgcaggtgatcggggtcgatcttggtcaacggcggatcgggactagactcagggaggagttgaggtccaaagcgatcaaggatgccgggtgacaagattggacacaaggttgcacacggtggacgaacaccgtgtgaaaaggtctttgcaacaggctt

SEQ ID NO: 11634 - DNA, 14801 bp, Oryza sativa
aagaaaatgtagttttctcaatatttgctacttcagttctgattcagcagttcaaatcacctaattaaaatgttagagagatttctttgaatagttctgttaacatcacactttgctgtgacttttggttcttttctttttattctgcagcaagtctttcttgaagaaatagagaaaactgtagcacttttggtttttgaagatataaagaactgtccatatggggaactattggatgtttcccaacgattgaagaccgcaagtgaagttaatgctgccattcttacaagccaaagtcatgagaaaggttagcacatgtgctttgatatagtattcatattgagacctaatatcacttggttatgttatcatgtatctacattgcaataccagttttgtgcctataataagttttcattacttaaataaataaagatccacaagtgtaaatcttaatcaggaaatgagaatgcacagaatgtggggtgcctgttctcattttatacattgaaacaaatgaatcacccatttatgtgggattttctgccacgttaaaaacaacaaaggcttaactgaaaatctttcagagactaaccacaaagttactaataatactgacaagaatgggttgaagaaagggcactttgcagtgtggtactaacagatctatctattttgatgattttaagatatagtgatcagatttgcactagatttcagttttgttgctcattgattatattttttttcttttttacaatagagttgaagttgatatactgtttggaacttggaatcaataaaatgctggtccggaatgtgacttttactgaagttattttgtatatgtttcccacataatgcagatccaaagctccctagccttctaaagatgttaatttggactcaaaaccaactggacgaaaaggcagcatatccacgaatcaacaatttctccactgccgcacttgaagatccagcgatttgaggccgctcgggaggggatggctaaagaatgtaggcaccataccatgactgttttcacacattgtacttcctggatctgttgtgctcttcacctgcaaggctgcaacagtgaatccagtgctttcttcggtctttgatctcaaatgcaaaaaacgtggaatcagaaaaaaaaatcgctcgtgttgtacatgatgtagaagatgttcatcacattttaatctgtgaaaaatgttcgatttgatttgagttcattcaacatcttttgtcgaacctttcacttctattacacgaaatgttcttcccagataatactttggctgtttggcaagatgacgctcatcatgttgtccttgcgatttcagaattgcttacgaatttgaaagaaaccaaagtttcactcaaatcgcccagcgaaaaattgtttcactcattggggtattctcccatgagggtcctctgcggtactgctcactgacatgtgagcccctagaccctcgggtccacatgtcagtgacatcagtactgcagaggatcagaattgcttataaaggtacatacctccttatgattgaaatatacttttttttaatggagttatcaaaactaatttttaaggttggaataaggttaaaaactcatctttgttaatattgttgaatttttattttactttaagtacatgtattagtcagctgatatatacctcataattagcaatatgtagtatatatacctccgtatactttctcagaatcagaaaagcttcgtcattatcgatctaaatttattttctaatcaatctagtttctttagcactaaaacaattggaaggatgggagaatacctcttcactcaaatgacttgcttttcgcgcttctggatcaatccctttataggagtttcctgctgtgaccatgcgtagcaatggcgtcgcgctcgcgcgccgtctcctccggcttcacgaaggcgccgaccttctccgtcaccaccgcgtcgcagctccacgacgccatcgaccgcctcctcccgcggctacgcggcgacccgtccctcgcccccgccgcgcgcgcgctcgccgcggcagccaccgcctcgctgccgccctccaccgtcctctccaaccgcctcctccacctgctctcctcccacccagccaccctccccgacgcgctcgcgctcttctcctccatcgcggccccggacatctgctcccacaacaccctcatctccgcgctctctcgctccccgcgccacctcccctccgcgcgggagctgttcgaccgaatgccccagagggatcacttcgcctggtccgccctcgtctcaggttacacccgacacggccagcccgaggccgcgctcgcgctctaccggcggatgcaggaggagccggggaacgatggcgcggacaacgagttcaccgcgtccagcgcgctcgcggcggccgcggccgcacggtgcggccgcgcgggcagggagctgcactgccacgtcgtgaggagagggatcgacgccgccggcggcgacgccgtcctgtggagcgcgctcgcggacatgtacgccaagtgcggccgcgtggacgacgcgaggagggtcttcgaccggatgccggtccgggacgccgtctcctggacggcgatggtggagaggtacttcgacggcggccgcggcggggaagggttcaggctgttcctccacatgctgaggacccgaggtgttcgaccaaacgagttcacctacgcgggggttctgcgcgcctgcgcacagttcgccgtcgagagcttcgggaggcaggtgcacggccggatggcgaagagcggcactggagactctgcttcgcggagagcgcgctcctccgcatgtactccaagtgcggcgacatggggagcgcggtgcgcgtgtttgaggccatggcgaagccggacttggtgtcgtggacggcggtgatctccggctatgcgcagaacgggcagccggaggaggcgctgcgctacttcgacatgttcttgaggtctggaattaagcctgatcatgtcacttttgttggtgttctgtcagcgtgtgctcatgccggcctggtcgacaagggcctcgagatcttccattcgattaaggaacagtattgcattgagcacactgctgatcattacgcttgcgtgatcgatctcctaagccggtcaggccaatttgagcgagcagaaaagatgataggtaatatggcagtgaaacctaacaagttcctatgggcgtccttgcttggtggctgccggattcacaagaatgttggcttggcaaggcgggcagcagaagcattgttcgaaatagaacccgagaatccagcaacttatgtaactctggcaaatatttatgcctcggttggtctttttgatgaggttgaggatgtcagaagaatcatggaatcaaagggtataaccaaaatgccggcctcaagttggattgaagttgggagaagagttcatgtgttcctagttggtgataaatcgcatcctaaagctgatgaaatctatgcacttctgaagaagctgtatgtgaaaatggtggaagaagggtatgtggcggacattgaatttgttctccatgatgtcgaagatgagcagaaggagcaggacattggctaccacagcgagcggcttgctgttgcatttgggatcattgccactccggagggttccccgatcaaggttttcaagaacctgcgcatttgcggggactgccatgctgctattaagctcatatcgcagattgtgcagagagatatcattgttagggactcgaataggttccatcacttcaaggacgggatatgttcttgcagagattactggtgacccgcacactgcatatatgaagtagttttgtctcccgattggagctactattactctttgtacggctaatgttaatatgcggcagcaactgatctgaccaaaggttttcactggttcgagtgattaagttctggaaaagaaattccttgtcaggctgaccctaggtaaacggtctcaccttttatcattcgtgcctatcctgatgaaagtttatgttatgtacgttcgctttattttattaacatatcctgtaaatatgttcattttttgtttgattgttgattgggggttagtaataaagcaatagaattgaaggggtgaaattttgtgatattttaactgatcgtccagcttcacaatttcccattgcctgcacatgatatcttactgaacaaagttgacatatgagtgggtgcaggaacagcatggtgctctcaaatagaaaagggaaaatacatataactctgctacccatggtgactcagtcacctcgattctaaaattttcatctaaaataaatcaccaaatgaactacaaagcaaattcatgagagcgtttagctaaggcatcttaacttacatggtctagtctgtacaatgcattggattcgatgaatgtaaaatctgttattactaacacaaactgaccttaccatgagtacagtcatcatgctttcttgtatctgtatctcattgcacaaccagtgaaaaccagtaaattcacaaagttgatcccagcaatcaatgaaaagaaccgatctaggtggccttcattcaggttatctgggatccatccaggatcccctccttgagttgtaaaatatgacaccaaggttaatatgattgagcttaaatagctccccagtgagactgttacaagcgcaaatgcactacacaaactcctcatggcatcaggggcttcattgtagaagaactcaacctgacctatggcagcaaagacctcagcagcgccaaccaagaaatactgcggtatttgccaaagaatgctcatcggaacagcaacatcctcatgaataagaccttcagatctggcgatccctaaacgcctcaactcaacaagagctgcagatagcattgcaaggatggagagggctaatccgattccaatccgctgtaactcagagaaacccttctcccttccagtgaactttctagctattggcacaagcacacggccataaaacggaatccagatgatgacactgatgacatcaaaagttgagagggatgcaggagggacaatgaaagatccaactcgcttgtcaagaaccattccctgctctatgaacatagaagagttgtgagcatacaccgcgttgaatataatagtagtggcccaaatgggaaacattctgattagaattttcagttcttccacctgggtgacagtgcatagcctccacggatttgtaaaggagtcactcttggcatcatcagatgagatgatggcagccttgtcaaagaatctgtataacaaaaagtaatttcagtcagacaagaaaacacaatatattatattgtctaaaaaagtaaaagaaatgtgtctgtaaagcaagccacctactgacatatattgcttgtgctaccctgatattttcagtcattatacaaatatacctctaatggtcccatattaattataggcaccagtaatagtaattataagtagacttataagaattgcatgccatggacaaactactaatatactactagcgttctgctgtatggccttatccatattctttttgttgcatttagtatttaatttccaccaatcccaaaatggaacagtacaagaaggtagtgtatcagttttatgtatacatccaactgcaaatggctggtgttgtccccatccagactttcctccttttttctttgtaacagaatgaataaaagtgagacaatgatgcattgcaaaaatccaggaattactcaagttcacttgtgtgctccagcttccggcttccctcaatcgctgaagtctggccatcaacctcatataaaagagatgtatcatgtggcacttcagtgtgccacttacggaatgctgcaacaacaacctgacacactcttgtaagagggcttccaccaggtttctgaaatctgtacatatttgaggcaacaaagaaacttgcaatcgctaatgccataaatatagtaggaatggcaaatcctatcccccaacctgagttatcttgtatccaaactataacggtgcctgatacaaatgcaccgatatttatacagaagtaaaaccaattgaagaaggagcccttctttactctgtctgctggatcactgtcatcaaattgatcagctccaaaggatgatacacaaggtttgatgcctccagtcccgagggctatcatatagaggccagagaaaaatacaccatactggagtaagcttgcttctggacaaatagatcctgaacatttaggcggctgcagagctggaactgatgctgacagcgtcaaagcaaccagacccttcagtaaaaaagttcagaaattatccatgtttcagatatgaaattattttgaaaagatcagttcagcacatggtgcaagtgcaccgaagtaggtaatatctaatatcttctatagcaataggcttgtacttacaataaaataaattgctgagaaagcagcaatagtccagtactttccccagtaagaatctgctaggagggcaccaatgaggggtgttaggtagcatgtcccctgccaagttgtaacatttcttgcagcttcaaggttgccttgatgaagatttgttttcagataagtaactaggttctttgcaataccataataggccagtctctcacagcattcatcccctgtcaccaaactagcatttctgaaacttcaaagctactcattgcagaacagataaaaatgtgcacagcatttttcaattgatctgtaaagtatgctatctggtacttcgaccagcatttcttttgtgttgtatatcaccaaaatattttggcaaaaggtaaatacaggattgtacgattcaaaaccatatagaagcattactcactagtgcgaagaaacaaggaattccttcaagtactgtgccaaagttttatgggatatgctatgcatctttaacaaattacctaggatgaaaaaacatgcacgccaatttccagtggcatgctttaatgcagggcgccctttgatatcaacagatccatctccggtgtaaagattagcatcctgctaagaaaaaaaaccatttcagtctgaaccacctaacgagatctgaaaggcaacaagttgcatccctcaaaatgaacaaataaatggaaacaaacaaagagaagtcaaatcaatcttcgaaaggaaaacttcaaaaatttggaattgccacttcagtattttggatgggttgattctctttcttttttttgctggcaaggaagtgaatcaaattaacaacaccatatttgatcagaaaaaaaaaatccaacatcatataatccggagttcaagagatagcaccaaatacataggaggcgcctacaaatcgggcgcccgattttttttttgtctaaaatcgggcattgtttcaccaagtagatcgaaaatgtttcagtaaatagatcgaaaatgtttcaatcttttaaaatactgaaacacaaccaaatcacctcatgaaacattttgctacaacatacttcctccgtttcacaatgtaagtcattctagcattttccacattcatattgatgttaatgaatctagacatatatatctatatagattcattaacatcaatatgaatatgggaactgctacaatgacttacattgtgaaacggagggagtatgaaacaacggtttctaaaaaatcggacgttgtttcaccctatacaaaaacaatgttctagcaaatagcgaaagaatgtttcaattcttaaaaaaaagtgaaacacggtcagatcgctagatgaaacaatttggttcaacgtatgcaacaaacgatttaaagccattgcaacacttaaatcccatgtacatcaacaaaccacgtgtccatcaaaatgaaattattaaacagtattaaaaatccactgcaacatttgatccatacatagtgaaacatcatgagtaaactagctgaaacattgttggtggaacaaaaaatgaaacggatcccccttaatagggcgtttccgttatatccgggcggccgttgcaaccggtgcacgtggtgggggtgcggaggcgcgagcgcggggcgccgatttttttctccccaatcgtgcgcacgacgcggatgattcacgaaatacatgtgttaactgtttagcagaagaaatttgttgctaccctagctttgatcaataatcagcttaatctttcacagaccttcagaagggtgaagtacacctacatacttcagaaccagacaagcaaaacggaacacacacacacacacacacacacagaagacttaatgtcattaacagctttaaggccttatcttacagtctctggtttcagttgtgactcaagagaatcggttcctaaatccccatgcttctattttcctcaagtaaaagaaaacagagccagctaccataaagaggcgaatcaagcgtgacgtactaaccgggataaacagcttatcctgaggggaaaaaacagagaaaatataacatttttacctgaggaagaagaaggagcggttcttgatcaccaccctcttctcgcacctgcaatcgcctatcttctgctgcctcttccatggaggggggggggggggggctcgtcccggggacggaagcagctggagcagatcaagaagctatacaggagcaatggattgcccccatctgagtagagttttgcgaccgcaggggagcaggtggacttcggcacttcggatggatcagagattgaactgatgattggtgaatgcagtaaactactgtcacgttttgcataaaacccctgcattttggttggattttgatttgagagtttttttttttttttttttggaactgggagtgctggttggattaggaaatgcaatatactccctcggttccacattaataaaacgttctgggtttgtgcagtttgatcgtttggtttacagctaataagctgtaaaataacttaatcagcaataaaagataatttaagggtatttatatatatatatatatatgtccttagcaattaaaaaacggaaatgctaaataccggtatcccgttggactcggtcgagacgggacatgttctttcagggatcaccagatatcatagcaccaggtatctgagtacatccccaggccgggcccacttacatctgatagctttcataggtcatagactgccctcgtagaccaacacatgtcttttctgtacactttgtcctcactcgtagtctccaccaacaacagattcttcacgtccccatttctctcattcctttttttcatccatgccatattgtaacacatgtcttttctgcacactttgtgctcactcgtatgcacccgggaagaatttcccggtcggtcacccatcccaaattgctccaggccaagcacgcttcccatcccaaattgctccaggccaagcacgcttaaccctggagttttttggagattggcttccggaaaaaaagttgcaacttattgatatgagtattctattaatcctattaagccctaggccgggatgttacaccctcacccccttaagagagatcgacgcccccgtcgatcaaccctaggccaggaacgtcctctcttggccacgtccatgtgtccagtgccagcgcccgtgaaaccgcgagagtcggctctgatacctttgataccattttgtaacgtcccgcctcccccaggccgggcccacttacatctggtagctttcatagatcatagactgccctcacagaccaacacatgtcttttctgcacactttgtcctcactcgtatgcacccgggacccgggaagaatttcccggtcggtcacccatcccaaattgctccagaccaagcacgtttaaccctggagttctttggagattggcttccggaaaagaagttgcaacttgttgatatgagtattctattaatcctattaagccctaggccgggatgttacacatatacatcgatttcctaattttgattttcctttctccatttttgcgatttctaggtttcgttgaatccctaacctgtggatgcgactcctcatatctcatccaaaattgaaatcgaagtaatctaaaactccccatttttgtgtgtatttgttcattcacatggggtgtttgcaacagaggcgaggatgtgtgtgtatatatgctaaatcatatgatacttgcagcaaaatgttaaaatcatttggatttttgctttgaaatgatgtgattctttggttcaactgatctaatattcatcattaaaatgatattttctttattctttcaccttttcaataatctcttgttacatctccaattaacaaaatcagttgatttagccaatgaaacctgcaggaaaccactgtacatctcctaaagtatcacctatgaaacctgatgataccggacatgatactaaagaggatcatgatacctccccgatttcataagatcctactcaagtatcatctgtgaaatccacaggaaactactgtaccagacatgatactagacatgatcatgtgatacttcacaagtatcacatataatgatactttgaggatcatatatcatgatacctgggtaggatcatgtgatacttcacaggtatcacacgaacctactaaagtatcatctgtgaaacccacaaggatcatgttaccagacatgttacctaagtaagatcatgcgatactacacagatatcacacataatgatacttatcacatgatcctcctagggtatcaactgtggaaacctaatgataccggacatgatacagaggaagatcatgatcctcctagggtatcaactataagttttatactgtctatagaagcatttcatggataacttatcaataatttacctgtagtctattgcatctctgtaccactagcttcaacacttgtttctgacttctttttaccgcctgaattattgaggaaataattcagcgcttctctatacatctactatttgttgtcacaactgactcactagccacaaacacactagcagaacgtgtacacaaaggggattcactcgggggggcatcacttttttttattctccctgggcatcaaaagaaatcgcacaaaacagggagcaatgttccatcagacatttcctcgaatacattgcatgcacaaaatagctataacagagaagtggcttcagaattcttacacagggtagtcggcgttgaaacgcaggctgatgttgagctcacatcacacttgtagcagaatcaattgaggaggtaggagcaaaggagctgacgaaatcaactgaaattgctggattgtagaggaaatcgcagacggcatgtgtgccggcagaatcaaccgaggaatcgctgagttgtagaggaaatcgacagacggcgtgtgcaacggtgaaatgaaccgaggaatcgcgcacggaggcgcgcgattccgaggaggattcgctaggatgcggaggaaaaactgggggcaacgctcgcaccggcggaaggaagcgcggaggtgcgtgattccgaggaggattcgccgagatgcagaggagccggcggacgatgctcgcctcggtggaaggaagcgagaaatcgcgtgcgattctgaggaggtttcgctgggatgcgtacaagccggcggatggcaatcactggtcgttctccttttttttgcaacgctcgcatgtggtgatactgtagtttcagaatcatcccgtttttgaacgggatttcggtatgtagcagccccttaaaaaaatactaaaaaaacccttaaaatcactccaaaattaagtttgattaaacgtatttgcgttgaaatattttgattaaaccgagttcaagaagctcaaactcaagaagctcaccggcgacgcatggtggcctgatgggcaatctgtcacaggatgcaagttggcacttctgattagtcatattcagtcaaatccaaataaaatacctatactagccaagcacgtgtaacgtgccaaatatcctttcagtttcagcaaacagtacacatggtttatttattctgatttctgacaggaaaacaaacagatcaattatgtctgcaatagaaaatgtttggaggggaacaacatgctttcatatgaaaataaactgactagcaaaagcaagaagaagattgttttttttcccattctccaagtaatattatgtaccagtaccactgaggagaatcaatgtacatatacaagagattattcagtattttttgagataaaatatatacatacaatttgctgtacaataaattcctttgtccaagtaatattgctctatgaaggctgacattaaattgcagctgctttcttgcacttgtattgctgtgcatagtagacgaaaagaagaagattcagaaaactaaggccagctatgagccagaaaaagcggtcaagatggccttcattcaagttatcagggatccaacccggattatcatctcgagttgtaaaatatgaaaccagggtcagtatgaatgaactaagatagcttccaagcgacaccgtaacaagagcgaaagcggagcacaagcttctcatggaatctggagactggttgtagaagaactcggcttggccaatggctgtgaacacctcaccaataccaaccaacaagtattgaggcgcttgccaaagaatgctcatgggaacaggtaccttactatggatcagatcttctgaccttgcaatctccagacgcttaatctcaaccaatgctgcagttgccactgcagtagtagccacaaacagaccaattcccattcgttgaagctccgagaagcctctctctttaccagtcagtctacttgctatcggcacaacgaaagtttcgtagattgggacccaaacaacaatgctgataacatccaaggatgacagagtggctggcggaattttaaaggattcaatttgattgttgagggccatcccttgttctataaacattgatgaattttgagcacatacagtgaagaacacaatgccagttgcccagattggaaacatcctcattaatattttaagctcttcaacctgtgtgatagtgcaaagtctccaaggatcatgagaaccaccacgttcattcgacaaaatgacggcagctttgtcaaggaaactgtgaagaaaagataacatattaagtaagagtgcatctcagtctgtgcatctgcactaccgatacacaaatcttgtgttacattacctgtcatgactctgaaaaaaggtcattgtgtccaggaagttccaagacacaaacttgcaagatgtgaatgtccgactcagaccaaaataacatatttgtgtccatgccgactttgttacataataacactttttagactaaattaattttatgtactttttcaaaaagtatttttttaatctagtaatctaaactacatgtcaccatttggttgttttctccccatttctttgaaaattgggtaggaactctggcattcagttaagaatgagatgcacaatcaagtcaattttagcatttgaacccatttgaacccgggtggatggggaggttaaacaacctcctcatagcatttgtttctttaaggaatagtaccatgttaatgaagcaaatataccaaggtggccaagaaaaatacctgaattcactactatgttccagcttacgactcccctcaattgcagaagtcttaccatgaagctcataaagaacagaactatcaaccggcaaatcaacatttctcttgtggatggctgcaataaccacctggcatactcttataagggggcttcctccaggtatctgatatctatatctctgagaacctataaaaaaacttccaatagctaaggcaatgaagatagtaggaattccaaatccaattccatatccacagttttgttgtacccaaataagaactgtgccagatatcaaagaaccgatgtttatagcaaaataaaaccaattgaagaaagcacccttctttgttctctcaactggatcagtgtcatcaaattgatcagcaccaaaggatgaaacacatggcttaatacctccagaccctaaagcaatcatgtatagtccaacaaagtatatcagatactgaggcacggttggttgtggacaaaaggacccaaaacattgaggaggttgaagagaaggaaccaatgctgaaaatgtcaatgctgccatccccttcaattaaattgacattgaggagccgttagcacatgttatcaacagaaatgagtgtgtaaataatataacagattcacaacctggacaagtaggttttcaattgatgtatcatgccagtatgtatcaagctggtgattgctaaggtcaccattatgcatgtgatcataatattattatgagataagctttatgtctgccctcattttccctgtttatagttaaccttccattcatgaataaactacaatgcagaaaacatctactataattatttggcgcttaattcactagcacatgcatagccaatacaagtgaaccaatgaaaaagacaaaattatatgatatctctcccagtatgaaaatttctcaatatatgcatgtatttgcatcttaccagaaagtaaattgttgagaaaacagcaatagtcttgtactttccccagtatgagtctgctaaggttgctccaataagtggcgtgagataacaagttccttgccaagttgtgagttccttgctgcagagacatttccttcatgcaatcttgtcgataggt

SEQ ID NO: 11635 - DNA, 844 bp, Oryza sativa
ataatattcatattgtcccctgataaaaaatgaacttcaaaaaaagaattcttttgattcaaccatctttttctcaactcagcaacgtgaagtattaatcttatatttaggatatcaagaaatcacatcagatgataatatatatcaataccctctaatatatatcaatattccccgtcttttttctatgcaaaacaaaaaagaatagtaagtgattccataaatctacgcagttgcccaagaattaactattcttcttaatcaatgatttcttatatagagagaacggccctcacaaattgcaaatactaatttgttaagaatcaatcgaattgaagtcatagtgtcatcgttggctggaatcgatatattcgcgagatctgggtcacaatttgtatcggctaaagaaatagtaggaatccccaaaatggcacattcccgaagagctatatactctttttgctgatcgaggacgatcacaatgtcaggcaacctcgtcatatatttgatcccgccgagatatctttgcaaggtagataattttctcttcaagattgccacatctctttttgggagatggtggaatttttccatcttttcttctgctcttaagtctctaaattgagaaagtctagttttagtaatcgaccaattcgttaacataccactgaaccactttttattaacataatgacaacgagcccttattgcagctgatgctactaaatccgctgctctttttttggtaccaacaattaagaagccttttccctgacttgctgcatcaaaaactaaatcacaagcttctgataaaaaacgggtggttctgatgaactacttgcag

SEQ ID NO: 11636 - DNA, 10242 bp, Oryza sativa
  unsure (1)..(10242): unsure at all n locations
gtgaccatggctactatggatatccattgctcacatcatgaatcaacaagaagacatcaagatcaagtcctccatgtgctgcaatctgattcggccacgtgttacattgctgatttcaaacggccgccaaatctacatacgtgctccgttttgggcccgtgagtacttgatggaaagctctcgaagtcctccttccaacggatccagcctcatctcggaattctatctcgtttggccgcaatcacagaagcaaggtgttgcgtcacctgtattgggccaatggacttgtaactttgtttgggaccctggcctatgtggggcccatgtggggtgcgccccaatctggtggagcacgacccttggaccctcttggtcgtcctcccacctctataaatagttaggtaccccttcagggtttcttgggttttgatagattgaagtttagccattgctacttgcttgcagcgcgcgtgtcggctagaccgtccgtctgcttgttcttcggaactccaacttatcatttgtattaaattcctatttgcaatatcagattgcttttatcttgttcttgcttgtttcttcgatttccttgcaggaatagggttgatctgcaccggcaagatcaacaaccaatggagaggtgtatcgatcgctaaggcgcaacacaacgtctcgtacggttgtagtcggatcgtcaacgtttctcccaaatcgtagttatcacaactcaccaaaagatcgggccaacaacagtcttgagtgtcgagaggaactcagggtccatcataggctcaaatgattcttctcgcaatttacatgtaaactgtgtaattagttttttcctcacatttaatgctccatgcatatgtctaaacatttaatgtgacgtttttgaccaaaaattttttttatctaaacaagtcctatatcaacaatccctgttcgagtaaaaaaaaaaacaatccctgttcgtggcagtgttggccaagtagcaacattcgacgaattaatgatcttgtgccgtgcacccgtgccgcagtatatccatcagtctacaaacattgaaactagctaataccgaattagacacagcttaaaactacaaatctatctagtttcaattcgttatgtttatctaattcttaagcaactacacatacttgtaccacttggcactccttaaacactaatctatttattttgtattataagttgtttggactgttttttagcaaatttatagtcaaatatagcaatatttttatattttctgcaaacctaatcaaacttaaaaaagtaaaaacgattaataatacgatgaaacgtagggagtacatataatcggaagtactccagtatttacatccggtatttaaatcttccgcctagactctagagaatcagaattcagtggcgtgagatagttacggcgtcacgccgtttgctttgtgtgaattcaaactgatgtcctgattaattcatctggtcacaaatatataattcatctgtgtacaaatatataattcatctggtcacaaatatataattcatcacacaattaattcatctggtcacaaatatatatcaccggagcagagcatgaaagatattgcacacgtacgtacacaagannnnnnnnnnnnnnnnnnnnnnggtcagggccggccggccgtcaattcgagtcgggcatcgtcgtcgacttaccaggcccgtcagcgacgatggcgatggcgactggtttcccctcgataacttcgcctttgtcctcctctgcagctgcgttcgcctcgctcctcttccccttcttgcagttgccgtcctggcccttggtcgtcgccgcctcgatgtcgtcggtggtagtgccgccgccgccgccgcactcgaagaccgccatctcgaacgccggccgccacggcgccgacctcggcctcttctggcgctggtccccgccaccgccaccgctaacgtcgtcttcgcggcagctgggcagcgctgcctccttgaacatggctctcagggcccgaacgtggccacgagcgcgtagaacctctccatctgctgctgctcttcctcctcgctcgtcgtcgtctccgccgccgtctcctcctccggcggcagcggcgacgacggccgagaagtcgtcgccatcttcttcgtcttctcccccgtgctcaatcgggcttccatttcctccactggtagttggtctatatatgtgtagcagtacctgtagcctatatatggatggagttgaatgtagtagtaagaagcaaactagcggcgtcccgccccgttgtttcccttgttcgggaaataaaccaaacgacatattacaaatgaagaataatttatacatatacttttatatacataatcttaatgatttgaaagtaaatacttgaaaataaatctcgataaaaaccttaaaatcaattttaaatttaaggttggaaatttaaattttattttataagcataagtatagatatgagtgaaaagatagcagggttagacgggaacgtgcatccgcttgcagtcacgcgcgacgcgtgtggtggtgtgggcgcaccgccgtgccgggaattatttatcgattataccttttaattccgtgagatcgagggattactagtgtcattaacattattaattaccaaggggcagtgggcctgcagattcattgctgtctctgtatgaccgtcacttccgttcccaccaaaccacaggtctcgatccgaaaggtcggtgaggaactacaattttttttttcaaaggcagtttgtatgttcttttaatagaaaatgcttgtttccagagatttaccacatgcacaattattttgtcagccagtagttagtgcagtaattacctggtgctagttggactgtcacctaacctgacctgaaaccaggtgggcacaaagaaagctttactcccttcgtttcgttcataattgatcatcacattaccaaaacaaaaatattcatatttgattagcatataactttgggaggccacttcttccgtgtgtgggatttaatacaccgccaattttagtacccatgtccgcatatctgccttcacaaccttggaaatcaggggggattaagtcctgtccaataatcacaattacgttcctagccatgcggattcgatgcacatgtatgcatgcacagtcttgatgtctagggttatcaagtccccattaataaatcagcatgcatgcataatttacaggaatgattaaattctccttcgtcttggcacccagacgtaacatgtctcaaaattgtgaacggagggagtatctagtcatggtaattataagcaacaattgcaatccaactgaactgaagtgctcaccaaaaatgaatttcattcaagtttattaccctttacaccaaagtagacataaataacattaagcaaaaaccagaggatagtttggtcgcctctgttgatcaaccaacagtaagaacactagagacccacaagccatcttatatggtcttattcacaatatacaatcttcttattctttagttaagattcattttgacgaacaatctgcatctgcacaacgttttaaaaacccctcggatgcttaagacactgcaatataatagtattgtgaaagacccggtcgttgggaggtcaacatttattaataggcaagtggcccaggacgaaattgcccgtggtgcataattaagctgctaatcgtgacggtgcatgctgatgatgcatccccacatcgtcacgaggccacgcagaaaaggcaaatcgctcgcgctatactggtgacggcacacggatgacgcaatcgagccttacgccacagcgcatcatggagacatggactactatttatttggactgtgatagcggccaacttgaccatgtcttctctcatactccagcgagaataaattaaggtagaatatcataagctcaattaggtgagtaccaggcatggctcatgctttaagttgatacaatgcaagactaccaacggactatctaaatttgatcctccaaatatttatatagtcagctatccaattaatttggcaagccaaatttatttctcactaatctaacagcatctccatctaacctctctattatgagttcatgaaactagagtacatatgtcggcctctactacccctaattcttcctcctctttctcccccacttcctcttgtccctagggtgacacactcaaacatccccgagttcctccccgtccctctctctctctatgcgaggcagggatggtcgacgctggtgaaaagaaggccgtcgacatgcgtggtggtgctcgagctcgccaccctcccccattcacccccaaccccatcgccaccatgggcttcctccataccggcggaggccgcaacgacagaaatcagagccgggagaagacggcgattgccccgctgagtttgcaccgctggccaaatccatgcagggcagaggtgttcgaggccggcgcaaggacggaggatatggatgccacgtcaacgagaaggcgcatggaggccgcgacggcaaagtcaagggagaggcgcatgatgtggccctgatgacggcagcggtagacgacaacgatggcagcggcggcatcgttggggcgatgacgagcggaaggccacggcgatggagtagggtggaacatcgggatgcggcattgatgacaacgacagaggcggtggcttcgttggcgtgccagcgagcggaaggccaatgcgacaatggaggcgtgcggcggtgaagtccctctcgatctgcatcacaagtaggaagaaacataatagatgcaatgggccccaaccaaccccagcagtggatccaccatgaggcagtaggtggttcgccggttgaccaggcgatgattgtgcttgccccttccccatgcctcggtacctaatagttgggcaccgggtacataataccctaggtactagaccctaggtaacgggtctggtacctaatagttgggtaccgggtacataatgccaccatcgttgtcgctgtcgcctccctcctagttgattaactcttacgccatctccaacccagaaactatcaagtaatttctatacttgtcatgttatatagacactatgtatagaaactatatatccaatggatagtgtcttcacattaaattctcatccaatcatctatcttctctctccttttatccacctatcctcatgtttttattcttggttcttgtgtagagatggtttcttgcatgagaaatggtttccatcttgttacctctctcttcattaattcacttgccacatcagatttttgcttatgtggcaatcaatttaatgctatagacactagatgacatgtagggtttgggatggccttattccaatggtcccaaatgagctccctagcctccagatctagtgtaggaggggggaagagggtggggatgctgttggtgcaggggacaatgattgaggagtcggagaaagaaatgagcggattgggctatagagtatagagttttaggtttggaggaggcattgccgctttgagggaggcaacgaagtcgagccttgagaagacgaggaaatagatcgaagggaaaaaaaactattcgcttgttaagttatcgcgtcactagaatggaaactcttgctgttgtttttctgataactaatgggctttgttgagactatacccatgttgtctaaagtttaattaattgtgtgtctcctttaaaaaaaatcttatgctataccatctcaaacccactcggtaagggaaaagaagttgaaaatgttatgtagaggaccgatgttcatcatctccttgttgtcttatcaaccatagccaaaatttaaattatactccattttagagttgatattgaggtttttccattatagcgtatttttttagcaatagcatttaaatcgctaaaaaatatggatataaaacttttgcccataaattatttttcttcttccatggcttataatcagtgccataaatataccacccaatcaaaaaaggactaggatagtgtaggatcaaagacatccgggggggagggtgtgaatagaattcctgctctgataccacttgataaactctgagttcgacttgacacgctcaaagctctgattggcccgacctttcggtgagttgagataaccacgatctgggagagaaaacattgacgaccagactaaaaccgtacaaggcgttgttgtgttgtgccttaggaatcgacacacctctttgtgggctgttgatcgtgccgatgcagaccaaccttattcctgcaagcaaatcgaggaaacaagcaaaaacaagataaaagcattatgaattacaattatgaattaaagctcaagataaggtgggtttccaaaggcgaataattaagcggtcaagccgacacacgtaagtacaaggaaaagtagtgattgctaaactttttactaaacaaaacccaataaaccttgaaggggtacctagctattttatgaaggtgggaggatgatctaggggtccctaggccctgaaggggtacatagctatttatggatatgggaggacgacctagggttctgtcatgctccattaggttggggtgcaccccacttgggctggggtcccagatggagttacaaacccataggcccattataagtgatgcaacaccttgtttctattattgcggccgattgaggtggaatttagagatgaggctagaaccattagagagaggactctaggagctttttatcaaatactcatggacccaaaacagagctcgtatgcgcatttggtggccagttgaagtcagcaatgtagcaggtggccgaattggatttcagcacttaagacgacttgatcttcttgttgatcaatgatatgaacaactgttgtatccatagtaggcttggtcatatcacccagcgctggacgcctgaaccctcttagtactagtactcaatacacacttttctacacagcaaataagcagcgagtcaattgtggttgccatggaggaagatggttatggtaatatactagctagtaggctgccttttttggggcattagtcagtcagtaggctatcaaaaaatgagtactctagtgagaaagctaataataaatggtgagacatattagtcattagaatttattttacgtacaatgaatgtttgatggttcgtgaggcatctcttgtgtgttcttttccttaacagagaagaagaaagaaggatcgaaggaacaaaaacaaaacctaacatctggttcaatggcttcatctcaggtcagttagatcaatttccgcattaagcagaggtgatcatgtttaggctaagaacttaagtagttaagtggattaaactccaacattgtgtatcagagcctaatcttagccttgatgttccatcatccctaatgaagccattatgccaattaaatcctaatcaattcggcatgatgaaaataagtgagaattgtttttcaatctaagttaattagctcggtttagcccttcatatatactgtttctttgcatgttttaaattcaagatttaatcttttgttaattgcttagcagtagaattaagaaattaagggaagggaagaatgagatcaatcggtttcaattttcccaaaatccccaaattgagaagaaccctgattcggatgaagaaccctaagtaacaaaatccccaaaaaatcaagaaacccaaaaaataaaaattaagcttgagttcagattcttaccggacttggagccctaattctaccgggaaacctcactgcggtgttggtctcgtcgagaagcggtatcgccgccgtcggcgccatacgggcttgcccatgcgtctcctcggtgtgcccttgccttctcctcctcgcggttgctgtgcgcacgcaaccttggagatcccccaccgtcgccgactaaccgggatgggaagcatcagcttggcgccgcctttggccttcgctcccccgccgacaaggtccgggccacgtgacgctcggcgccgcttgcgcgtccacctcgctggaccgcagacgccacgccatggtttggcactgcccacgggcgcaccctccagctagcacagatgtgccactctactcggcgctcatcgtcacacgcgtgctacacctcaccgaaccgccatctctgtcatcgccgccatacagtctcacgctcgctgggagaaggggatcggggaatagaaggggagagaatgagggctagggttgcacatgggcggtaatttcatcggtgtgggacgaatccgagctgtccatcagatcgtccctgcatcgggtcgtcacagatttcatgggccgcgccgccacagctcttagcccgctcacgctcgcgcgtgtaatccgggacatctttcacgaagataggcaaaattaagtttttttttattttaagcccatcatttatgattagatatttccataattttctatgcctttccttagctaatttaaaatcgatagaaaattatgatcaattatttgatcactcacagaattatttctagttgaatggaaccaacgggaagtttatctagcaaaaaatttaactagaaagaattaagatatggagttattttgacccacgttattataattttactaagattaagattactatttccttggttattttctgcccaacgatgatataattgaggaaaatttaaatgtaattattatttcctatgtcattttggcattaacggtaatatgacttaggattttaattcatgccattagtgcattattatttcctttatcacctctatcttatggtgatgtgattaaggattttaatttgttagtaagcttattaattgctttaccatttttgccaaacggtgatgtgtctaaggattttaatttcatgtcattactaatggcattattttaaacacatttcctatatcatttctacattacggtgatttgatttaggattttaaactgatttcctacgtcaatttaccttatggtgattgatttaggattttaaaacactacctactatattatttcctatatcatgtctaccttatggcaaattagatttaggattttaaatttagtatttacaatattattttctttgtcacctctgcccaactgtgatgtgatttaagacaatactatttattccctaatcatttacgcccaacagtgacttgattttagattataagtaatttcatttaatgattcctgtgttttgtctctacccaactatgattcaaagagaaataaagattaagttgtcattattgtgtaagtaattgtactaatgtacgttattttcacaggcaaccacaataataatgccacttaatattccagcaataaataatgttatttatcagtcaaagtctattgaattatttttctcactgatctaactgagcataagtctttcttgagtttgacttagcattgacaaatgtcacaccccaaagtttaccctttcctagctttaaaattcaataaataaattgctcaaagaaattgtttaattaaacctagagctaaaccctaaataataaatacatttaataatgggaaattatatggtggaatttttcttgagttccctatgttttaatacattaactgaatttttagcggaattttcagagcaacggtagcaattttaataacaaaaccaattatcagaatttaattaatccctaatctctttttttcttctcctttcggaaatgcgccattttttttggcccattttcccctcccgcgtgggcgtttccattgggccggcccatggccaaggcccaacagccgccacgtctccctatggcttaggtcgccgacaggtggggcccacctgtcgggcccttcctcaacatccggccggcggagacactgccccgcaactgcagctcctgcgcatcccgtgccacctcacccacccctccacatccgtcgcccactaccgcgccccatgccccactctcccacacacccgcacccacgaggaggccgagacccaagattcggttttcgaaatcccgccgtctctctctctcccctctcccccatgtcgccactggagaaaccgcatctaccggccacgtccgaccaccccgcccctataaaaatgattcccgtgtctttttccctctttttctatccattcccatgccctcaatcgcactcgcgtcg

SEQ ID NO: 11637 - DNA, 2512 bp, Oryza sativa
cccccccccccccccccccgccgcttccacaactcgcgtgacgcgtgagtgaggccagcctgcagagtgacgtggccggagggaaagtaattcccctctacttcacatacccccgggcccatatctccgacaaccggattgcaagagcttgaagtatcgcgttaggaataatgttaatctttccctagacacggtttctcaccaataaatcctcactatcctagcctatcctttgcttggtgtccttggatgaaccggaggaagaattaatcacacgtgttcccttggattcgatacccttggaatactccgtaggggaagtgctacatcggtatatccgtgcgcttgcggtttctatctgtaattgtaagaaataccaacactaatgctaaaaaaatcaaatgaaattatgagattggaccgtgatggtaaacagtatatgaagcttgctcacctcataagctattaaaattaagcattcatctaaatgattttcaaaccatgtaagatcaattaagaatgtgagtcaaaacaaaataaagaatttaatagaagtttctagatgagtcaaaatagttggccatttgatgggtagataaaattgaagctagactctaatggaaatttcaaacaattcaagtgaggttgaggtggaaaactacatgaaaactaaaggtgggaaaattcattcaccagtactctatgttgatattcgcaagcagtgcatattgttgttagatactaaagaaaattttttcattaaattttgttctaagggagtactaggcttaataagtcatatattgatataaattaaagataatcaattatgatttagctaacgaaagcttaatattaggtcaaactagaaaagtgggcgcgccgttggcacgccatgttaaaaattaatactcctattttgaatatgtttatttagagtatttttatgtgtaggtagacaaactttagtaacttgaaaattgaaatttagactatgagcagtctctctcttttttttctgggtgtttgttcttagacacaaacaaatgctatggtcacaaccctgagttaaaaaataaggcctaggtaagttgctggatagtaagagctagcaatattgcactgtcataaatatatagtatattttaaaccttgaattatattatggtatcttgtactactacataacacaatataagtgtataggtataagcattactactaacactatattagatgtacgcaagagatcttgtactactacataacacaatataagtgtataggtataagcattactactaacactatattagatgtatgcaatagacatcatactgatactgatgtgctaccctgatttctagtcatattttggaatggagggtgtagattctttctagaagtaaaaatcattgaagagacttgctaataggggttgtttggaactctttttattgtcagcttgtcacagtagatggtattttcacaaactccgattcagacgaatgttatttcgcaagtactatttgaagactgaacttttagcgagcttatgcagacaagtgaacgaactaaaaacactgcaaccattataccattacatatggtactacattaggagtattttctagcagcaattgatatgctttcttgggacagtttgtacaaatgccaactacaaaacttcctgcattttcattatgataacaataaatactcaactttcttgggacagtttctgcaaatgccaactacaaaacttcatgcattttcattatgacaacaataaatactcagccacaccatttgcatatcattctctagcataggattaggggctagcaacaaaattgaccaacgcacacccaagtatatacaatggatttgggagtggcttcaactacaccactcccattcatatgggcacttttctcaagctcaaatgtcagccacagccactctccaagagtctgaatggcaacactaactcctttataaatgatagactggggactataatcaatttatacatcacgaaagcagtcctaggccctagctagagtcttgtaaagcatgagctcagctcatctcagaaaatggaagcccgcaagacttattcggcctgtgcttgtttgcaggataagcagacaagcagtacccactgttgaatctgcggcctcacagaaagtaatctggagctggcctctttgcaggaacccctcttgattcctgaatgcacatataggaaaattagatgctaatcaataatgtgtcacagacgtaatgatcaaagtggctaacacatatatgtggggcagcttcaaatacacagaaactcccggttgctcattcatttactcactataattcttaaggctctaaatatcaaacactcgtagcaagagatataagaacaaaaaatggagggtatatgaaatttcttcttgatgaaaacaccagaaccaattaattcttatgatctactccctccgttccataaataaaggga

SEQ ID NO: 11638 - DNA, 18141 bp, Oryza sativa
gcagccctcaaacgttgcaagcaaaaacttaaaatcccttatattatgggacggagggagtactatacaagttagagatttatcttaagtaaaaaaattgaagattcatgaccaattgccaagacaatctgaagacagctctagctaattgtatatatttctgcgagtccacattattaatgtccaataagctagatgatataatttcagtaaactccaagaaacatttaccagctatatagatcaccaggacaaagcctcatgtttggcaaggaaggttaaagaacaagccaaatacagttcgatacataattactaagttttttcaagaagaaactgtatgcactcaacaagtaacatcctatacccatccgatgcaactttaatcactttaagtaggcccatgttgtgataaccactggataatgcaatcaatagctcatacaagacaaaatacctagaacacatcaatttcacaggaattgcataaaaattattatacaccacagcctgaagcaaatcacgtcaatgattctatcataatataggtgttgcagtaaagaggttggggagttcagaaataatcattaaatcgtggtcccggtagtcacagtggcggtggccagtcgctgcgttcatgctctcgcttgagagccctcaccatcgttcctctctcagactgagggagactgcgatcttcagtctgcaactgtttctttgttcctctctccctgcaactgtatcacctgggcagtggcgaaggtgaggaggacggcgggcaggctgagggagaccatggtgaggaggcggtggactgcggcaggccagcagcagtatgaagaggcggaggtggcgagcttgctacggaggcggaggcgcggagcggcggggaactggagtagattggcggcggtgacacagttgaggagaagaaacggcggcggcgactgccgaggcgagagaggagggggttttagcgatttttcaaacaaaccccaaaagcttcacatactacaacgacatccaccacaacgatccctgaccattaatcctccatccaacggctgcaagagggggacgaatgctgcaatctcgccgtgccacgtggaggggctatttgcacgggaatccgcctagatttcaatatttagagatttggatgcatacagatttgacatacattatttacttggaatcttggtagtatttaattaaatccagactggtgaggtaacatgctcatttttttcaaagttttaatggtctctgaagtttagtcatttagacacttatttgtaaaatgtgtagatatttataaagattattaagtttaagttatgtccacatataggggagcaataaccatggaaaaactccaaaataatcttactgcatagttaacgatgcaatttgatttcgtagcatattatgattaatcatatatttaagaatatttcctaaagctaagagtggtaaatagcactcataaaccactcataattatactgcgctatgaactgagcaccaataaaacgcagttttctattcttgtaacaacgtgttgtatgttttctgccgaacacattgataaggttgtgaaagatatcccaggatcgaattattaagctgagcttttactcatggatccatgttttaaatgatcataaactaagtttattttagatatgttatgaccaatacatatgtaaattagagccttaactaatatcctggataaggagaacttaaatttatcaatcaacacccgctaagttaagcttgagtttatttgagtaatatagagaaatataggtttttgttgtctcagtgacgtttgttgcaacacattgccttggaagctatttttttagttgacttgtccgttaatcttaaaatcaagagaagaatgttggttgaatttatcgactagtgtcactgtatatgagaaagaggagaagtggcagcgaggcaataagtagcatatagtgagttggtagcagattgatgtttgggtagcggattgcggatagcgggcgcgattgcagatgctaagttccaatagcaaaattaagaaaaataactataaatttagattgtatatcaatattaacatcaagtccaagttaaaatttaaatttagactacatgtttaattactccaacatttgataacataaaaattatgaaataacatataaatatataagacaaataagacaccgacacttattctatccatatatgaagcacaccatttaaacattatagcgatctaacaaagttaataaacattatagcgatctaacaaagttaataaacattatagcgatctaacaaagttaatatatagcgggctactatagcggtcgcgaagcgatataatggccactaagttccaatacgcatatccgctacttgtagtggtagagatccggtaccgctatagcggccgctataaacactattattaccttaagtggcaggggtgacgtcgaacctctctctaatcctaaaaccttaatacaatcaccccatcgatctctaatcctaaaatcttaatacaaatatacaatcaccccatcgatctaggtactggacgaggtttgtgagccatatctcttgtgtgttttttccttaacaaataagaagaaagaaaaaaaatcgaaggaacaaaagcaaaaccaaacatcgacttcaatggcttcatctttcatctctgataagttagaaccaatttccgcattaagcattggtgaatggtgatcatgtttaggttataggttaagaacaattaagtggattaaactcacctagggttattgtcgcccgtgttgtcaatgtgtttttttcctaacaattattataagcaaatcttagtattaatagcatcgccgtgcccactaattcttttaagtatatatagactcatctgtatgaacttgatttctttctcctgatagaaaatcgatacagtactctagtcccaacaaaagaaaagaaaagaaaagaaaaaaatcacattgacaagctaagatcgagattaggcgcgctgtccaccttcttctccggttggactacttggcttcccttcaactcgaacgcgaagtcctccattacaaacgtcggccgccacagctgctggcgatcctgcttcttctggccaccatccacgctcgtccgcttggtcgcgacacaatcaccgttccgccgccacagctccctcatctccctgacctcgtcgagcagcgcgtagaacctgtccacgtcttcgtcccgcgcctcctcttcgtggccatggccacccccctccggtagcggcgccggcgccgccttgatgttacccgacggcggcgttggcggcggccggtccctcttcctagacctccggtgccgcggctgcaggtgctcctgctccgtcacgatcatctccgccgcggtgctgctgttgcgtggaaaaggggaagtacccgaaatagtatgtggagtgggcatcgtgggatccatgagaccttgagttgagagcgaggcgcgcgttaaataggacaaagcttcgctagctatccctcccttcctgcgtgcggaacgagtttgcgtcaccgctttgccgctttgggcgggcgagcaagcaagtgcggcaccgaccgatggtggtgggcgcgcgtgcaccgtgcgcgatgcggtgcggttggcctatttttatcattatctttttgcgtcggatgctcggaagggggggggggggacctccttacgtacgctgttacgttggctttcctgtaagcggcttacggaagcaacgtcgtccggtctgactcccccccccccctcgcccgtcggtgttaactgtacggtgtcgatcgacatcgatgtcggggatgcttacctgcccgctgactaccatgcgccgttggataggtctcggtgctcacatggttttttttatcccttgtactgctcacatgatcttttttcgctttttaactatacaagatggcgtgatccacagctagcttggtttgggacctttaatttgtatataatagaaaatgttagtcactccgttttatattataaattatttttatttttttcctagttaaacttttgttaagtttgtctaagtttaaaaaaaattggtaatattttaaaaaacaaattagtttcattaaatctagcattcaatatattttgataatgtattttaataatatgtttgttttgtgctaaaaatactactatatttttctataaatttaagttaaacataaagaaatttttcccgcaaaaaaataaagaaatttaacaagaaaaaaaagtgaaaaacgaatatgaaaaaaagaggaacagagaataaacgttgaatcgagattacgcagtgggccaggggcagaatttgtgagcccgtaaaatgtatagtcgtcaatcgcgtacgcggtggccgggttcgatcgcgcgccggcttaaactcgcaactgacgggcaagatcctactgcggtgagccggggggcggcagcgcgccacgcgcgcgggtctcgtgggcctcgtggcgtgggggcgtgacacatgcggcctgacgtacgtccggcaccagcgtgcaagacgtgtgcatcgtactgaaggttgtcgacttgtagttgcccacgtctatgctttcggcgtgctgcagaattgagaatgtcaaatactcgtcttttcaagctgtagtagtaattattcgctgttaacgtcacatctaaaaacagaactgtcaatgagagataaaaaaaaactattcccttcgtccgacgagggcccctttgatttggagaaaaaatgtagaaattttggaggattttaacccaatagaaaaaaaatcctatgaaggccttagaaaaatcatatctaatcctttaaaattcctatgaaacgggtaatcctatacacattttgaagaaaagttagcaagaggtctaacctcttggaacatttcctctgagtctatctgtctcatctgattcctgtgtttttcctatggtccaatcaaacggccattcctgtgtttttcctgtgttttgcaatcctctgtcttacaattgtattcctgtcagaatcctgtgtttttcctattccttcgttttttcattcctacgatttaaaggggccctaaaaagtaaatctaggactacgatatatactagtactatgaatctgtatgtccagattcatattaataggatgtgtcacatccagtactagattggtttttataggatggaggtagtacgaatttacctatgcacttatctatatattaggctgtgttcttcttgctagctttcccaacttaactccctcattttctacgcgcacgttttccaaactgctaactactctcttcatcctataaaaaataaatctaggactatgacatatatatatactagttctatgaatctgtatgtctatattcatattaataggatgtgtcacattcaatactaggttggtttttataggatcgaggtatcacgaattacctatgcacttatctgtgttctttttgctagctttcccaacttaactccctcattttctgcgcgtatgttttctaaactgctaaacatggtgatttttgtaaaaattttctatacgaaagttgctttaaaaaatcacattaatctatttttttacaaaaattgctaatacttaattaatcatgcgttaatgagtcattccgttttgcttgtgagaaggattagtttccaactcactccaaagaaaacagcttagtgtaatataaattaaaatttttattcgatgaaaataatatgattgaatttgcttttaacttattttcatatgattgcccttttattgctaattttggaagactatgctaatttgactatgcgtgtgagaaagtaaagttgaaagactattgagaaagtaaagttgaaagactaattctggagactatgctaatttaactgtaccttatatggttggttagagggaagacaaatttggtctcacattgtagaacaggtagtacaaacatctttaaaagctcgatccggatagagtttcttatatgtcaattttaatataacatatttattagccctaggagaaaaccaaaagttgtataggctttattagggcagtcccaaccctccacctaggatggtgtctatggcattaactacattgctatgtaggacttttaacttacgtggcactatattaattaagagagagagtgaatagaggaagaaactgggtctcatgcaagacaaagcttcaacacgagaacctagacactatcaagttttgcattgggagagaatagtgtcttcataatagatgaagaataaatatgattagtagagaagagagatgatgtatttattaatagcctactttaaaaaactatgggttgtggagtgtagtttctattgtgatgttttattgacatgacaccttagacactacttatgcacactatgggttgagactacccttattactccactccatcaatctttaattggtatctccccatgaaccattcaaactattttcatgacatcattcaagattgttaagaaccctacttgtatttattagctactcatttggcccaccttcttatttgtgcatttttgcaaacgaaaaggtggttatatcaaggttgaaagcccagctcagtttttgctgctgacaaggtccctgaaccagtaggccgacatcttggggtacctcctgagggtcctgaaatccacgtacaccaggccgaacctcgacgtgtacccgagtttccactcgaagttatccagcagggaccaggcgaagtagcctatgcagttggcgccgtcgtcgatcgcctccttcagcttggtgatgtagctcctgtagtaggcgaccctcgtggtgtcatgcaccccctgagcaatggtcacattgccaggatcatccatgcctgaaaaccgaattatgttttgttgtgctgttcttagtgatcacaaaacaatgtgaatgaaaaaggaagttacaaggaaaaaagatgtaccattttcagatagaaacattgtggggttaccatacttctccttgacataggtgacagctttgtacaaaccccacggtacaatgtaaagccagtcagaattcgcctacaagaccaaatggttttcagcgatgcacacaactgaagtactaatcgatatatgattcgtatcagcggtagaaataaccaacagatggcgtacccttggtccaattggcacgccatcgcgttcatctgcagcaccaagagaggcaaaggatatcaggaaattaattgtcatcacaatggaactttcattatttagagaccaaacccttaattttcagtcttggggaccactgaagcataacagtttattaggtagttaagtttttttttttgagagaattaggtagttaagttaagttgaagagatgactcacaaataggtgcagcatgccagtcagacgagtaactagggagagtcgtggcgttcggctgctgatcacggacataataagcagtatactgattaatgccaacatagtcgattgatcccttcaccatgtggacctcatcggccgtgaacttcggaagccgttctttgacaatcacttgcagcgatttagggtattcaccatagatgattgggtgaagaaacctacaaaggtcaatcaacttgtttcagatatgtgcgtagggattttgtatttttgttgtgtaacgtggtgtgatctgtatatatctcatcagttataaagtctaaacagccttaatatcttgccatctaggagcaacatactccggcagtttgcggattcttggcttgaataaagaaaataagaaaaaggttaagaagaagcagaaatgaatttgaagcaaaaataccatccaacgtggaagtctcttgatctttgagccgcagcttggtctgccgttgaattggtaagaccttcataccagacaaaatccagaagaattccaatcttccccttttgtatatgctgaaaagtttgttaagcatttttaggactatttctgaatttcatgctactatttgttttatgggctaactggatccatgtcactataaatgcgctatattagaaaaatgtcattattatttgtgatatcagctgggtgctaccgaagctttataaaattaaaaccatgccatcatcatcacgtattatgtcatcacatagaccaaaatacccttacacgtgaaacccacatgtcagttctatcttcttccaccacccaggcctgactcttgggcggggcaaagagggcgatggcctaggccccgtcctggctaggggcctatgcctaaatatacatgagtactatatgagccaaagtggtatttaagattagtgaataattccgtactatctactactccttgttatctacataatactaattagtgaattaataaagattctagattcaacaatcaaaattgtatgtatagatagattcttgttgataatatatattttcataattttaggtgctgaaaagttgtaattttacttaagaagcatttttatggtgctaagtaaatgggaaaaataaacaagatcagtttaagtgttgatatttttctatttctaagaatatatatatgaaatgttatgaatgattatttctctctaagattagatttgaaaacacactttgaaaatgaagaagttgttcagattgtagccaaaataaatcttaccaaattttggcaatttagcaatattgccaagttttgacgggatttcttatgtatttactatagtttggtaaaaactaaatgaatacatctttaataactttaccaaaaaattgatatggcttgaaatgacatcaatctgaacaaccctaaaaaatgtgaatatacatataacacatctctctataggggagagattgatggttaagggtcatgttgtcaagtttgccctagggccctcaaaattgtagagccagccctgcctccaccctctcctcttctgtcctcccaccacccacattccccagtcgtcctcatggagcacgcggctggggagcacacatggtccatcctcgccgagcgtgagagtgggcggcctccctatccctaaagctcgctgaggaggacaagaaaagaagagaaggaagaagatggaggaaagaaaagaacatgacaacaaacataacggtagtagtatgattttaattttataaaattttagttgcacctaactaaaattgcaaatagtaataatatttttctaatatggcatatttgtaatggtatggatccaatttaccctagttttatatctctagtggtacacttttacatatgtaaagagctaacaaaatggtcacttgttttctcataatttttttaaaatcacccataaaaagaccacaaaccggtgactgtttttacctgatacttgtgccggtatctctgaacagcagaagcatgggaaagaatgaggtgatgggcaacaatgtaaggctcggtggcagagtttccagccgtgcattttgtgcaccttcctggagcaaaatttccatcatcgtatcctagagcggcaacaactctcggttcgttaaatgtcatccagttcttcactctgtcgccaaatgtcttgaagcaaaactcagcgtagtctgcgaatgcttccctgcgtgattcaaaaacaaaccagtagatacatatattggatcatcttgatctacagtttcaggaatgcacaatctgctgctgcatggtgattgttaaaaaaacaatgtatgagaaaaaaattattgagagttgccattggaactcctgtactttgcaggattttgagcggcagttgtatctgatcttttgctagtatgaatatataccacaaggatctgcaattccgatgatagtaacttcatttttctataaaattcaaatattgataaaaaaaattatggtgaactatcccgttggttccaatgagtgtctaaaaattgttcagaaaaacgaacgtactgctgcatagcttgagaagagaacagtcacatgtcaatgtataagtatttggatcaaccttagtcttgaatctaacaaagcaatacttacactatttttctgttcaacagtcctccatattgcacctctagtgcctctggtaagtcatagtgatacaaattggcataaggtgtaatgcctgttaagcagcagagcaacgttcagctttagaattgaaacatgtgccacgtatcagatgattttcattttcatttttatttttttgcgggtgaatatcaaatgaaacattaacagtacgtggcatacctatcttcagcatatagtttatcaatctgttatagtatgccacacctttccaatttactttcccagttccagctaggacagtgaacacccatccaagagaaatataagttagtttgcatcactttcagaaatcaagtccaaaataataaaattgtactcgtagattaagacgagcaacttaagggagcttacttgggaatattcttgaccatgagattgagaagcggtacgcatcgaaacccatacttttcatgatgtttacgtcctcctgcaagagcaaagccaagtttaattctctgctctcaggtcatctgttttattctatagttcccggaatcaggagtacaagcgaatgaataaattccatgcttgtctgatagaccaattattaggtaccacttctaaaaaacgatttttccggacacattggtttcattttttcagttggatctaaagaatttcacttctaaaaataatgagaggcctgaagatttaaccccgctagtaaaagttgacttttaaaaggcggggtttaaaaacgactgccatgaaaaatacccttattttcgctgacaatactctttataacacgcatgtgaaaattaaaaaatccatctgcaaaagagcaggaatgctattaaataacagcaacgacagtagaggggacaacagtaatgtctctcccactcacctccctctactcgatctggtcggcgggtggtggcgacggaagcagttgaggggtggctccgacagcggctccaggtgcctattttctaaaatttttatgatttttcgcctaaaataatcacagcaggcggtcttcttaacatggtcacatgtgaaaatcgatttttcataggtgttctacttaagagaccagcatgtaaaattcaattcacgtgcggtttgtgcagccagtagtgaaaatttatcgttactagtggttgctctaatctcttgcgaaaaatgaaattgaccgccagcgattgcttgttttgtcgtagtgtactaagtgcaaggggtagtgtagtgataagcaaaccttatataaggaaaagcataagattatgttcctaaatgtacaatcagcatgacaacagaccaaaatttccaaatctacaattgatgtttgatttatacaagataagtttcggttcagtttgactttgcgttgttcttctagcaaatcatgcaaaagttgaatatgttcataattaaagcaagcctttcaaaccttaatataagagaaatttcaagcatgaaacaaaagtcgcataccaaatttatgaaatgtcaaataagccagataatactataatttctcaccatgatgaaaaaggtacggtgtatatatgatgtatgcttaatactatggaatataggtgagattgaactttcttttggaaaacaatgtggttgaatgtttattgtgaaaaataatcataaaacatttagatcggttagaatcataaagagaatcatagaaacagaaaataagttgcacgtcatctcaaaggaaaacgtgtatactgtggtgttttcagctatctgtttttacttttccctgaatggtacgaatctgttatcgttgaaatcatgacgtgtgtgtagcccttctaccttgccatccaggataccgtactcttcacaagagattcttttgatcactatgaagtagtccattacaaaaaaagatagaacacccacaaaaatatcaagagcgagaaatgcattttgtcggtgatatgggcccgggggtatcaggtttagagggaggaggctgccccctgatgccacgtggccctcccccgaggggagtcaggcctgaggtagggtggcggccactccttccccaaagactagtcggaggaggctgccccccgatgccacgtggccctcccccgaggggagtcaggcccgaggtaggacggcggccactccttcccagagactggatggaggaggctaccctccaatgccacgtggcccttccccgaggggggtcgggctcgaggtagggcggcggccactccctggctgagactagagggagaaggccgccccaggcgccaagtggctcccccctgaggggggatcgggcccgaggtcgggcggcggccgccccctcccgtgactaggggtcgggctcccccgaccccctctctaggtcaccacgtatggtgggttaggtgtccgcctccaggtgcccacctacccgcatttatggcgtcccgagtggtgcggcgtgcagtgcactcaaccggtctgtgaccagtcgaatgaccgatgggactggctagtgcgcctgtgcgctgctcgtgtgtcaggcggcgtgcagcctgacatgtcccatcaaatagtgatggtgagaggttctcatcctcttatcccagccggagtcggtcctcccgctctggtcaaagcaaggctcccgtttcccggtgtaataggagcccagaagtcttcacccattaaatggtgactgacaggggcaaccccccgtgtcaggtggcaagatttgacaggccccatcatcaagacgacgtgtgcttggcttcccaagtcaagagacaagacatacatttaatgcaaagattataatacttctccaccggagctaggttaggttgttgggcccatgtggtaaccccttgaggtataaaaggaggtccaggcctagtggtgggggggggggacttccgagcgaactggcgcttgggtctcgcaaccccaagcacttgtgttctacattcaatcaatcatgcacaggagtagagtattacgcttcttagcggcccgaacctgtataaacctcttttgtctcatcgtcttagaggggcctaactccctcaggatcacacagctccgctcatcaagccctcgaatctcacccgctgcccccggccgaactcacaatggggggccttacagttccctggtggaggagttcattctccgacacatttgtagtttgaaatcctccattgccagcccccctagcttcttcagcttgttccaaaagccagaagcttaaaaagaagcccaaattattgtacaatctcaagaagctagtcttggaaatgaaccctattgttcactccgtctcattttaagtgcagccatgagtttccgaatccaactttaaccgtttgttttatttgaaattttttttgaaaagaaataaaaaacataaatcacgcaaagcactattcatgtttcatcatctgataataataaaaatattaatcataattttttttaaataagacggacgataaaagttagacacgaaaactcatgctgcatttaaaatggggcgaaaggagtataaaataggaatgatgttttggacttttcaaagtcaacaagctaggtacaactttgactatttaactcttttgcataaataagaaaaaaaaagttataaaggtgtgataactaatttgaaagtttttgttacgacgcacttggctttaaacaatacttcgttgttaaaattaacttttcttgaccgcccggataccataacattattcttttgtgactggaggtaagcattttaccttgtagcgatggtactcatcaacagtaacatctgccgtagcattatttgctatttcacctggtcagaaaaataagcaaactctagtcagtctttacaccacgactcacaaggtcgcatgtacacgtatataggattagaggcgctctttgctctgttgttcttcgatcgttctccctttttctgaacaaaaagaaatgttatacgtgttctaacactaagcatgattcatgtacttaagggtaattcaatacggttcagtctgtcctatttatagggcagaaatgtcataataccagtgttatatgccttctacaccttttattttaaaagaaccacacgttccgttccctttgtttcatattacagctttataagtcccttgtaagtcaaatctcttttcaaatatgattaattttataaaaagatagcaacgtctataacaccaaattagttttattatattcattgtggaatatgtttatagtatatttaccatgtgttgaaaatatcgatatatttttttatataaatttggttaaactagaatagatttgacttcaacaaatttaaaataacttataatacaaaaataatataaaacagagggagtttttaacttgtttgttctaagctctgtaatcagttttgataacagaactgttgccactgtacatatatccttgtgagtgaagtgaagatgatcctaaatttaacgtagggggctcctgcatatatgcagcttagagcttgtttagagcttgtttagagcttgtttattttgaatgccaaaattttggcaagatattaacgttgtcaaaattttagcagaatttctcatatattaaccaaatttaccaacaaagtaaatatagatttttttttgataaaaatagcatcaaaatgaacggttccttaatttgctcaccgggagtcttgacgaaggcgtcccaaatgctagggccgcggccatccttgagcgccatgccctccacctggtacgccgacgccgccgtcccgaacacgaaccccgccgggaagctccgccggctcagcccgcccgtgatcccggccgcctcctgatgatcggcgccggcgccgccgcgaatgccgtcttcgcccgcagcttgctccgccgcgcgcgcggctccagctactaataaggccagcagaagcacaacgacgaggcggtggcccatggttaactgctctgccgcactgtgaccgccggagaccggagtgccggtgctgcacggtgtgcgcgcggcgcccgccggctaactagctagagaagaagaagaagaggaggagcgagcgcgagtgctcgctgtgtgggcctgtggcgtagacgtagtataatggatagctcagctgttttcggccattatagggggccatacgcgcgttagacggagatggttgtcagcacccggcgccctcagtttgtaccatatgtagcgtgggccggacggggacgaagctaccgtagccagcggtgcacgcgtcagggcaaaacgggtaacgacgcgcgcaagtactgcttagctgctgcctgccttcctctcgtcgtcacgcgcgcgccactcatacatgccgcttatagtctctttcttttctttttttacttcgctgtctttttgtttcttttcttaaaaaaattacacagtacaatggagacactcattacacacacgcagtcacccctataaacgcacgcacgcaaaccctacacctatgagcatcttctaagattggaccggcaaatccttcgggattaacgaagtcaccacaggcgcattgctgtcgacgggtacgtcgcctaccactgaaagcacaacaccgttaaatcctgaaaaatttgctcccatgaggagtcaaacccaggaactcaagtgctactgaggctcttgtaaccactaggctacatgtgtttagagaacggcaagagttatgcatgcatttttctttataaaaaatatagtatcttcgaaagacttagccggtatattttgagattgacgaaatcatcataaacgtctcgtcgtatataaagaatagtgagttgtaaattaacacgagtacccgtaagtttagaacttgaatatgaatggattggtttaaaaaaaaagccaattgaggctttgttaagaaaaaaaatgtatttttcattttaaaaataaagcttcgcaacaaaaatataattttatttgttttaatacttaatagaattttttttgtcaaccttttaatctaacttttataaatattaattttttaaaaactcttatcccatgcggtggaaattgaggtggcaaagaaaaggttgcacccacggttaaattccgtggtaattcagggattcgcgatgtcaataatcatggtggtgcgtggcatattaaatcgctattgtcgcacaataggaaatctgctattgtccttgtcaaagcaacattgaactgcggtctcgtaggattatttccatgtgcctttgccttctcaacctatatagtttatcttttaaagagtaaattgtattgatattacacaaacttgtcaagtgagttcactttagtacacgaacttataaaatattcgttttggtgtatgaagttatctgatacatgcaaaacaaggctaaaaggatgtcacaaccattttttaacaagttagatgttgattaggatgtgatgtgcacacacgagatgaacatgatttcagcgtccttcgcatcatttttcggtttttaatgttcttctccgtgtaatcttttgaccttattaaatatttatatatatatatatatatatatatatatatatatatatatatatatatataggacactcatatggggcaccatggtgcccgggcaccatggtatctaatgcacaaaatcactcaaattttttaaaattttcaaattgtgagtatatacctagttataataatttgattcatacctatacttatcaacaaaacaactcaaatttaactttatttcacaatccatgattacatacctaactaattatatgtatggatgctatatacctagaatcaaaatctaacaaaaacaagttcaaattcagttcaaacttgctttaaactagttagtaaagtagttaacgttaatacctaggtaattgaaaaagtttcatacttatttgaattgggtatatactcaatttcaacaatggtgcccgggcaccatggagcaccaaacaaatttactatatatatatatatatatatatatatatatatatatatatatatatatatatatatatatatatatatatatatatatatatatatgtgtgtgtgtgtgtgtgtgtgtgtgtgtgtgtgtgtgtacgtagcattcttcttatatacgtgtttatgtagaatcttaattaacacataattagtaagtgtagtcttgttttgttcttttgatcttagttggtacgcacctaataaatttgtatatcaaaatgagtattttacaaaatttgtatatcaaaatgagtattttataaatttatgtaccaagtaccttgatgtactacttgataaatattagatggtttgtatgtaattgaaaaggccaagtatcttgctcttttttttctacactgacggattagcaatcagtgccatgcagagttttccggagacgtcgggagcactgcgcaaaactaatgaagatccggtaaatattttaaaaaatattttttcttttaactttgtcaatgtattcggtggtttttgttacgacacccaacggtaagccaggtaccaaaaacggtaacaaacccggctgccatgcgacagcttcttggttcttgtctcgggttggtttgattttgctgagcttcacgtgtggtgtggtgtcgggtgttaggtttacgatcccaataccgttcaaaaactatacaatgataaactggtaaaaccgataaaatccaaataaatcttgttaaaaatctaaaatgcagtttttttttttttgaaaatgaccggaaaaaccgagcatttgtgtttatgacccggacaggtttccaccgtaccagaactgtaaacactggtcagcgtaccggatctgtaaacaccggtctgatgtctgcgggatagcgctgaagaaagttggacccactcgtctcctgcgctagtccgaccaaaggccaatgtcctttacattttttaatgtgtgtcctatcttgaccaaatcatgcttattaacgtat

SEQ ID NO: 11639 - DNA, 18849 bp, Oryza sativa
gaataagacgagtggtcaagcagtataagcaaaaagtcaaaatcccttatattatgggatggagggagtatctcacattatgttttggatgttatgtagaaaccatgtctcatgcaagacatgttttcttctctttcctcatttattcatttgccacatcatttttcatactaggtagcagcttatttaatgctatggacaccatcctaatcattgggttggaaatgacctaataccactggtgtttcctgacaaatgaatttttttcttcgttaaatatttgggattttgcacatcctgcatgatttccaagaccatcaagttcacatggatccaaatcatgaatatgttaataataagtagcattaaatttaagtatggaatagcggggcttgatttgaaagattagtgtttagtactagtttcttgatgatgtagagtttatggaaatttctagtgtcttgggttgggaatggccttacgtgaagtcatggatgcacacaaaggaataaatcctagtgcccaccaagaactacactcaggtttttaatattgatgcccacgaatattactcgttctaaaaagagacggagactaacgtcaatttcctgccaaacaatttattatacgaaaagaagcaatctgcagttgctacgtttgaaattgcttccaacacaaagtaaccacggtgaaagctgaaacaaccaccatatcgatttgtttatagagtgcatatacataacataagagaacaatctaggcagtgttgtaatataacttgctgggttttctctctttctttttaagtatggcaattggcaagaacaataataattcagccaacataatggcagaatgaaagcaatgtacactggaaatcgccatgagttattgcattggaagaacgtgttcttgcagtccataaaattaaggagcgctacagctacttgacattctttttctactactgccagactacattaagcttcacaatgtgtaataacctgatgaagggaacccaaagttgtgcattgtaagctaacatatcatgccaagctatgttcgaccgtagaacaatggtaactgtgtgacctggcagacgtacctcaagctgttgagatctccttgaacttcccatcgtctccacttgcactgccattaccattttgaataagcttctcctctgaaggtagatttttcatgatttttctagttggtcctgaagcattccataagtaccacacacgcgattttggaggtggcacagctcctgccaaaggagcaaccaaccccggcttcccttcatctataacgctgtcaactatgccataatccttggcttcccaaggactcatgaaatagtcaaactttgtatcctcatcaatctaaaataaacagcatgcagtagatcagagaacagcaaacttttgtgctaaagcaatacatcagtaacaagttgtcaaggagtacctgctcttcaggcttcccggtgattcttgacagtattttgttgatctttatcttctcatacatcatctctcgtatctgtaatcccatctctgtgacctgccagatggcacaaattaacatattctattgaaaaaaaaaggatgacccatttctgaaagtagcattgcatttcatggtagcacatatattgccatagggcacaatggtcagaaattaagccaaccgagaattattcttttcaaaaagcaatattgatagttatgattttagtcttaatatgatattatcatataaaatggaggttatgattttatttcaggagtgtttggttgaagccaaagcttccaattgtttcccacgattccttaggcaatttccgagcaagttcgtctagtaaaagagttaaacaacataaaaaagcttaccttcccaccagcaccccctgatggttgatggatcataattctcgcattaggcatgcaaaatctcttcccctttgtcccagcagctagcaaaaatgcacccatggaagccgccagtccaaagcagacagttgatatatcagccttgcaaaatttcatggcatcataaactcccattcctgtatattgatgtgggcatgtttattgcatcatacgataccagtatggcagcattaacacaaaactaaatatttctctggtgatcggcataaaagttatcaagaataattgtacattcaggaacatgagtccagttcagtttaggcagttggactttaaaaactcaagtacaaagagcctaaaacggtaaggggcttaaaagggtcaaatataaaagaaacagagctgattgaactgactaggttttggtgaacttgagtgaagcagattgggaagacagtaaaagatttaagccactatattggaattatgttacaagatggattcactttcatatttcagtaaatattctagatgttttgagatattctgcaatttattcccaagtttgcatggattggtgataacgaactgataagattgggttcatatcagaattaaacatgtacagcaatgtggcacaaacagtgaacagcccccagtgtctcctaaaggcataaggtttatcaaacacaggttatataatatataaaatcatgattttcatggagatattgcacaacatgcataagatccaatctaaggtgctgaacctgaaaccatttatcactgttactgttgagctcggcactgtacactgttcactcatgaacaatctcaggaaagttaaagttgttctattgctgacattaaagcgctttagaatgattatgaatgcagatcctaggtataaaaaagagactccacaaaaagcatgtgtaaatcttgaaacgaaaaaagagaacagattattaaacttcaggtttaattttcttgtatttgatgaacttgtacagcaccttttcagtatgtatgaatttggtaaatgcatcagcaaaaagtatgcagcataagacttcactagagagaaaataggagcttttttcaaattcctaatgttggagcacgcatttccttatatgcaaaacatcgtattgcatataattggcttggatagttatcaagttgatgccattatcatgtagcataaaacttatcattttgttattgccagattatcatcagcatatttgacacaccaaagattaaaaggacaggtaaagaataagaaatcaaaattatgcagaaaatataaattaactaaacaaaaatcaaaatacagtccatcagttctacatttcatgtgcatgtttagtgtttctattacacaagacctgtccaacgaaaaaagtgagtatagttatttttcgatttctgaaccatggctgtggtttaaaagttctatcagagaagttgaacttgaattgatttcgttaactaattcttgattcattcccataatctatgtgcactgagtggtatgtcacatgcaccatttagagctcacaagatttcactcatgtgttttcacaaggtttcgctggaatttcagaacaccccgtgatgcaaagtgaaatttatttcaacatatcctggtgcaaaacatggcataaaacgaaacaaagcgatcttcaacatgagtaaagtgcaattttctccaagtaatataaagaactcataggcagatatgtagaccagagacatttgtaactgaatgcatcaccaatgccgcataacccaatcagataagaggccagtttattatatacaaggacccttaaattgacacagcaaaatgccaaaaccaacactactttatatgccactgccttttgaaaaatcaaaatcttacccttctatctacttgctactattgtaaattccatttgattaccaatgtaaggggaatggtatctgcgtattcttcctcaaaattagcaagaaaatcttctttttaaagtcaactcggccaaacagccaaccttggtcctgttaatcagcgagcttggtatcataaatcagttcattcacatgtaaacttgttattctttctgttttgcagccaccttagaatccactagattaagggcacaaagacacattatacctgagccaatcaatgataaaactgaactcttcccaccccaaaaggaaaagaaaagaaaagaaaaagaaactcggaactcatcatctaccacaataacaggatgaactgatgccctccattggagaggaagaagaaagatgtaggacagaatgtcatgtgcggctggccaaataaaaaagagggtatatagtatagtcaggacaaaatgatctttgcacagctccatcactgcttgactaacagaaattgggaaataatagcgaataaggtaaaggctcttgataaaaaagaaggcaaaatttggatagtcagggcaaaatgatctttgcacagtttcattactgtttgactaacagaaatcaggaaatagtagcaaaaaaggtaaaggttcttaaaaatcattggcatttaaggttagataaatcttgtagtgttacagcaaaggatccaaaacttttcatcaaatataatctgcaaggcatttacgttacaagatacttaaaatgaagttagtcaatttctctctatcaacacaaagagcacaaggcacaagttattacaataagaggttgagaacacatacctgctgttatggagcctccaggtgagttaataaacaatttgatgtccttagttttatcctcagcatccagcagcaagagttggctgatgataagatcagcactcatatcatccacctagtcagcacaaggcattgaaaacaatagatacattattttgcacagtcagttatggcataataaaagtgctatttattacacagaacaaatattttcatttgtgtacacaatacagtgacatgaaatttgttcagagaacagtaccatgaaggtgaagcatagtgcttgatcagtgggcaaatcattaataaaccgtcagattgtaatgtcaagaaaacatgatataacaagaatgtgttagttcaaacagaaaaaagtgttccctgaagtcacttctgctaattattcctaccaaaataatatggcccatacaacaaggaaaagaaagtaaaacgacatacgactcaggaaagagtttgattctgaccctaaccatctcaagcatttaggctgtgttcggagctccaagttcccaaccactctccctcgttttccgcgcacacgcttttcaaaatgctaaacggtgcgttttttgcaaaaaaatttctatacgaaagttgcttaaaaaaattcaaattaatccatttaaaaaaaaatagctaatacttaattaatcacgcgctaatgaaccgctccgttttccgtgcggggagatgggtttccaaccccagtatccaaacacagccttagtttgttcaagaagatgcaacattaccaaggtgacatctaatcattcaacaaacagcactcatgtaaatgtaattctcagcatgaaagattcttgattcacaaggttggcaaaaaggaaacaaaatatatcccatttacatatcttatgcacattctgagctagaaaaagtattaagaaaaaaaaaatcaagatgggaacaactagaacaatttggacaacagcaacaacagaatatcacataatgtatactagagggtgatcatagcatgccatataaaatcttggatgcccattaagtgttactaaaatgcttctagttctttgcaaactacataagtttgagacaacataagtttatataagtcaatacacttttaccacacgcatataagaagccataatcctcaaggaaacaaatatgtgacaatgggcataccaaagaacatattgggctacattttggttgacataattgaattgcaaatctttcttattcctaaactagtgcatttcgttttttttaaaaaaaaatggcgaggaaattacacttaacttttttcacaccataaaattcgcaaacatttcgatattaataattgaacaagaactgcttaatgggtaataacaacacacacagtgcgatttgggggggggaagaagaaaaggctaaccggggagccgaggaagacgatgcgctggcgaaggagcatgttggtggtgtccagctcctcgaggcgcggcttccttgccgcaggccgagccgccgacggcccgggaagttcccacgcggaggagagcgtccgccgtgccgccgacgccgatgcgcggaccgtagctcttggcgccgccttccagcagcacgggttgggagcgaggaaaagggacgacggggacgaggaggatgagcagggagaagcggggagggccgccatggctgccgctgcctccatttcttggctcgcggctgcttctgctgctgctgcctgctagtgtgtgttatcctgcgcaggggtttggagaaggaacagattggggacgagaagatggggcccagatgccagcggctcgcaagacttgtactactccatactcataaaagtgacaatgtttaagtcaaacgttaataactatcaagttgttgttgagtttaaaaatataaaaattatatgtatagatttgtattgaaaaatactttcataaaagtatacatatatcacttttcaataaatatttttatagaaataagaagtcaaagttgtgttttggagatcgtgtcgctgtcctaaacgacttcctttatgagtatggagggagtacagtgcagtgagaaatgagacaactctatcccctaaggtccctcaacttgtcatcgggatacgaaccgtaaaactagatatgcgggatccctcaactatataaaaccggtcacccgaggtcccttggtggttttcaacccggttttgtccgacgtgatagctgagtcagcatgggacccacatgggccccacatgtcagctggccacgtcataccctctcccctcctctccttttctcctctctctctcactcttctcgtctgggtaggcactagtcaactagggaggacggcggcggctactgccttcggcggcggctactgccttcggcggggagaggtgggagaggacgagggcgtcggtggccggcgacaggcgacacgacggtggtgactagcgactggcgacgctctgccgccactgctctcgcctgccgttgctgaggccgcaagcgcgaaggcgcatgctcctagacttagcccatatccgtgaatgacacgatcacgacgtattatgcatatccacggttttgatttatcagctaaataagcttgcttatcgatcaaattaaagagataagctggggttttgatttatctgaacgacttctgctggtcatgcgtgcggaggaaaaggcagttccaaacccggcaacataggaacaagttaaattattgtcaccggactatggcacagcaacaaaacgaactaacaaatcaagtttatctctatctattgcttcttatctgcaggaaaatcggaggaggtcgctccagcgtatcgcaacggcggacacgcggtgtgcggcgcggcaccgacctcgtagacgttattttccaccttaaacaaggacgtagtcggtgagcgagaagacgcgcgtgcgcttcggcgccgctgcccaggttcgccatggcttgcagaccgatcgtgttttttcattcaaaacgaaagcaggagggaggaagagagggatggctgggggttaccttttggtgagacgagggagcgtcggcacctctggtgtcgtcatcgtcgccgccgcgccggagaagagggagacggggggttggatttggaggcaaaggaaaaggggctattggagggagtcggaacgaatcgaggctgccgccgtgctccccttctccctcgtcgccgtgtttcccagctgcagctaccgcctccgggcgccggccaccgtcgcgtcaccggccaccgagcgccaccctcctctctcccgcctcgcttgctggcctcccgccgctttgcctcgcccagaaagagagaagaggagaaagaggagggtgatgacgtggattacgctgacatgtggggaccacgtgggtcccacactgactcagccgtcacgtagactgaaaccggagtcaaaaccgttgacggatcttttgtgatcggtttttattagttaagagacgcgggatatctggttttgcggtttgaggatgattttgtatctcgataacaagttgagggaccttgggtgtactttttccattgctaaaacactgtcgcaggctcaaaatccggtccacaccaatggattgggccattggggttgaggcccatccaaacgataatcatacttgggatttttaaaatttttcttttttattaaaatattaaaaatataatttttgtttgacaaattaaatatctagaggaaaaaatcacccttccatatagcgttaaggggtctaaatgtaaattttttaatttatatacagactcgttttaattgctcaaacatttttagaatagtgtcaagtcaaacatttttaactttgactattaatagaaaaaaataaaaatgatctatcatgtaaaattgatgttattatatatttatcattaaacaaattattataattgtgggttgtcatttgaagcttgttactcatggagagtgatctcatagacggttggtgtcacccacaagtttccgtcaaggttgtgaattgacccgggcaagtttgtgaaagtattcctcacctccacaagggaacgaggtaagtgagtaaaaaaagttgtgctgaggtctcagaggtagccctagtagagcaatcctcacttttagttatctctagaaggttctgttggatcttggtggtcactcgacttatagagaaggacctaggagtgttagattgaaggttgtggtcctcttctttgatctttgcacaagtgaggcaaggtgttaatctcaacggcgagtaggatccgtgtgattcgaacttggggaaaaaaaattctgtctcttttgtgaatgctctgtgcttgcccttatgttctatatactcctctagtctactgtgaatcatattggttgaatagggcctaaagttctttttgatttggagttgtttctatgttttcatagttaccctttgaactttaaaagttccgggctaccttgagctaccagaaagtttcggtgttcatcaccagaaagttttgggccctgtttaaatttaaccgttgcgattatttttagtgtttttaaggaaaacctattcactccctcattagactacatcttcagctttcacttccttatctctctctctccttcctttctcttttctctcttctccggcgaggcgtgcgagccgtgagcggtggcgtgaccagcaggcagagtgcacggtgatgatagaggtggcgcactgtgatgacaaggtcttaggacggcatcgtgtgtctctccactagatggccctccccaagtcaccatcaccccgatccactcggctcgccatcgacatcaccgactcggatggtcccatgcgacgccgtaatcagatatgttcacaacatgcccgacccaacgtcgacgaatgtgcacccgatctaacgccagcgaatcgcaatggctgtgcccaacgcccaatccgaagaaatctgctcgcatgggccgtccccgactccagatcagttgctctcatccgttgccaccatcgtcacatttgctcgcgccattgtcgtggacggcacattgctcattgctacccttatgctgtttttttccttttaatgcattttttactccaaattcatcaattgtatgtaattttaccaattcatcaattatgtgtaatatttttactcaagattgaacaatggtgtttgtttgttgtcgggggaagagagaaaagagaggaggagaaaggaagaggatgaggaggaagagaacatgagccacatgcagctagcctaagcaaaacatacatgggtaattttgatcatgccatgtaaaaaagtggacccctcttgcctcgttagcatgaaaatattaatttaatgggcatggtgtctcatgacaaataactacatttctagtgtgctcctctaaaagtgacatttgtgtgttgtactatagctaaaaccacaaagtcgcgatgtcctatagcaaaatttgtcaaaataaaaaaatcaatcctttcttgctgatatgggcaaattggtcttatctgtctacagcttacgagttaaagatttgctccggtccaacaaaaaatgcaacaaaattgtttccgatcgttggatctcacagtgtccatcctgcccagttagatcaaacgatccgaaatgatttagtaccgtgaagtactggtacattgaaatattttttactagaccggagcaaatctgtacgggttaatatgtacatggagttagctggtcgtgttgatgcaacaataattttagaacaggggccattttcccgtgctcaaaaagataagatgagatgttcccgttccaaactagacaaaagatgtgattaggtagaaggccacacagtacatgacactgacagggattttttattcatatcatcatagagagcttacctagcggttcaaccaaacaattgattgattaaccccgccccttcacccggcctagctaccgctccaaaaaagaccaattcaatcgacaacagacgtgtcgtttctagttcgtacacgtaatcacaattcagaacacgtagccacagctctagctttcactctctttatgcaactattttagtaataatccaaaacaaagcacgtagtactacataacatatggccataatatacacagtagctagacacctcatctctatgcaggcttaacgcagtagtacacatcaaccaagcaagctagctaattaagcaagcatgttgccggccggccggagaagtcgccggagttgtagtatatatatggattattggttttacatgatggagcaggagtcgacgttctcgtcgctgaacatggtcatgtagcggacctcgggggcggaggggtcggccatggcggcggggttgccgcggacgaagccggcgggggccttcttgtcgtaggcgccgccgacgtacgggtaggtggtcatggtgtacgggacgtagggccacatctccgccgccttcccggtgctcttcacgcgctccagcaccttgctcgcctccacgtacccggtcaccgtgcaccggctctgcttcgggttcaccgccacgctcgtcacccctcgcatcgacttcaccgcgttcttcaccctcctctcgcacccctcgcagtccatcttcaccttgatgttcaccgtctacacacacatattgtataagcaaaaacacatcaccaaattaattaatgaagaagcacaagaacttcacaaattaatttatctctgtgcttaattagccaacgaaatttgagcaaacatgcatgcatgtagtatatataaatcgatcaagatcgagaaaattaaaacacctgcagtggccgcttcttccttagcttgagggcttccttggtctctgtcaggctgcacatatcagagaggctgtccaatacacccatggttgctctctgttactgcaccggcaacctgatcttgctcgcaacaagctagctagctatggaaagagtaagctaggctaattatttgctgcttgaatcaatcgagtgagaaagagagtacttggtatagctcgtgggtgcagaattgtgggggaagccgggaaggaccatttatatagagagagaaagtttcaccctttgtaagcaaaaaaaaatttaaaaaaaaggaaaaaggaataagaagaagaggagaggatggatcatttatacgtacagtgtggctggcactcactggctggctgattttgtatggttaggatggatgccaggtttttcttcttattttgttggtatggtcgcctcgtattgatgcttgaaggttacactaaacgattgggagaaccactgagccttcaaattaaatggctgagttgggaaaaacatgatatccttcctgctggtgcctggatggcgggttcacatcctctgccattaaggccaaaggcaaagtttgccgttgctgtcatccatctcttattctaagagaaaattagaaccatgccattataaatttgtaaaatttgagatatgtcatcttaacccacatgtcattaactcatgtgggtcctacatgtcattgagataccgatgacatatctcaaactttacaaaattataatggcatggttccaatttactccttattctacggctctgcatgtttttcccaacttcaaaattgattaacagccaattaattaatgaaatcagttgtgctggaccaatttaaaagacaattgattgattgttggtattgctacacgtacttaaaaaatcctcacaaaacttccggctaccttttaatttaactatttctagaaatctatatttgctcacaccatgtcaaatatgtgtttataaaagttttataagagcgctttttcctatagccttttctaaggaatagctgtgcctattacttttcttttgtcaaaacaacaaaaatatagtcttgtacaatgaaattttcattgttcccctgaatgaatcgataccaatggttcaaaaagtgaagagtgtgtcgctagtttttttttcctgctttgcctctggcgattgttttctttacatttctgtagagtaaattctaccaaattagctggtagtaagtcacggaaggacctgacggttgatcgagggatggagggtgtggatggcagcaacggcatacattgcctttggcttcaaaagcagaggatgtgaatccctggatggcccatgcgccatcattcataggccggtcggtccatgcactagctagctgaattattgttgctcattgtttaatttcataattttttttggtgtcgttttaggggagtttagatatttgttttggccgtggaaaagcacacagtcgattggcatttttttttctttctttcaaattcttgccgtccctatttgagtgtcggaattaaatgcttggtcttttcttcttcttcttcttacttttttgtttgcgaggagtattcaaacgtttcatataaattcacaatttggatgcttcagtttgttatgtgcgacgacacacccatataaaattatagaattcttcctcttttttttttggcgttgatcagaagcttgtctcttgttaattaggttgctgcgggggtcatcaagttgttacacattcaagtgttaatttgtcaggagatagaacaaattacgtagtatatattcgaagtgtgatatattacaaagcctcctcaacggccaaaaacaaaaacatataatctgttttttatttcagcttagcagcatgcgtcatcattcatatgattcgattttatttcaattacttcaaggaaaacatgaatatactaccattaaaaaacatatttaatatcttacaaataattagatgtgagacaataaccatgtactaacttttcttattgattataacagtgtaaacattatgatccatttaacaagtttgtgaggtccactagtttggggacaactgaacctctgcaataacgctaggtgtcccgactgtgacattccaacgcagcaataaaaaataaaataaaataaccttctgaatgaattgctttccatcggatcttgttccttggatcattctgaaagatgtccctggtttctctctcctagtttcagcaatctaatcctgaactagatcttgatgcatgtttctaattaagactaggaaagttaagtagctaatgtactacaaatatataaagtgatggtaccttaatccttgatattataactttagtgatagtttagttacaaagggagatggatctgccgtagccaacaattgttcgtcttgtgaatataaactttaccagtacagtgattgcttttcattttctttgggttcatttcacggcggagttgttttcaatcagcacgcacgcaaggttcttctttgcaatgtctttgtacacctgtcccactatatactcgtatctactttcgctgcttttgcaattttaaacctttattcacaattgaatactttctgaacctaaagaaaatgggcttaaagttctcgagaagctacttatttgctaagttttctctcatagcaattctacggtttttgaggaggtaccatgaggtaccaaaagtttagtgtaaaatttggtagcttatggtacctcatagtacctaggtattaagaggtaccaaatttataatagaaaaaatggtacctcatggtacctactcaaggatcgtaaaattgctctttctctgatgttgaaatccaactagggaacatttggaagtgaggggtgccaatcctatcgaaattttcgaagaaaaaggaaaacatacatgcaaaacggattaagattgttaattgttgatgtctcaaacggattaacatttgtggagagaaattctagagtgagcagcaagtaccatttcttcaaggcactcgcgttgggcatataaatttgaggataggattctggattcgcatatcgttctattttaatttttagctgggaattaggccttgattaatttagtgtacatgcgtagcagattgtaaatcattgtaagagagggttagcttctgctatttgttggtaatatggctgagtagaaacgatggtttttgatgaatcaccattattttcctatatgcaggtcattttcagagtaactcattggctccggtcttaagcacaactacaaaggtgtgatgaagatgaagagttttctaaaagttgcatgtcgaaagttggagactacgattatataactttttgtcaattatggttggagatttacaaatagactttaataattgtgatctcctatgttaggctggattctttgtttttctttacggtgtgtcctatttatttagatttacattatgttcttgaacgcttatatatattaattgactataactcttttgagtaaaggccgagatattatatttcattattaaaaaacagagagttagcacgacttagggggtgtttgggagagagggaaaaataagtctcctctctcctaaacaaccccttaaattaagtgactgagagagtacatactttccgttatgcatgcacgcatatttgttgtgtcggtataaattaaaaataataaatatccatgataccacatgattggtttaatttgcacctgattttgttcttttaggcgtccagaaagttgtgccaggtttttctttctccgaagcaaagcaaagctcattccgatatattccaatagcgattcaaagttattcttgaaaagtgaagcactgtgcttagacagatgacatctaaattcttgacgattgtccactccagcaagggacaagaatctgccatatagccacctctctttcttctggagtgggaaaaacttttgtagaccgatcattgcattgcgtctttgggtgtgagcacggggtggcctagttttttcttgctctgggccttgtccttcagcaatcactttacacagccatccctcttgatgatctatcatattctcctttattttgcaccgtatatgtgcatgactgttgggaattaatgtatattctccttccatcattaagtgtctatgtgaggatttttttttctttcaagataaataataggatattaggttccaacatgatagcacaaaatagtaataataagtaggtcggttggaaaacagcctcaactatttccgtaaccatatttctttttagaaacgaaataaaagacgatagaattggaaacaaaaagtgttgaaaatatttgaaaataaaaaacaaaagtacatgaacaaaaacatactagtatcgatagaaaatcaataattagtactgaatatattgaacttaaaatcatgtattaaacttacaatacaatatgatatgaccgattaaattcatatgtaccttcccagaatataagtcatccataattatggagagtcaattgtaacttttaactaataattcaactaagtaataatatgtatatttaatttaatgcatgtggtgccattatattcgtatataacattatgttaatattatagttgttcatccccatcgtttggcttattttttgaataagccaaacggcatattttcaaatgaaaaatattttatgaataaaacttttatatacgtgtttttagcgatctaaaagcaaaggctggaaaataaacttcgatgaaaaaaaacccaaaatcaactctaaatttaaggttaaaaatttaaattttggctgataatcataagcataatagcgaaaaaatgaggcccattgataatatactataaaaaacctaatggccagtataattttgaagaccgtgtaaaaacatgcactcattacatcttcttttggaatggatagagcaaattataaactctcatttaggcatgtactcgaattagggatttggttgagattgataggcatgtaaaatatgggccaaatagagacatggaccatacataatggggtatttgaaaaaacataattgtcgtattataaacatggtaatttccaaagcgttttttttaagaaagacatttggcgcgctttattggtatgaaaacataattagatcatttgctcgaacgtttagcaagaagctaggggattcaacccaattacaagaattctttgagatgaaagcatgtctagctaactcatgtgctacaccatttgcctctctattacaatgctctatagtaatattatctaaacccaatctaagtatatgatattcatgaaaaattacaaccaacgttgtaggagagaatccaccatcttgcatggcctccactacttgcaagtaatctgtttggataataaacttatcacacccaacttgctcagctagaaagagtccttctctaagagcgtatgcttctgcaacatgaggcaaatacatacacacgcttactatgaaacatcctcgtgcatctcgaacaattgcccctgttcctctagaacctgatgttggaattaatagatgggctaaggcctattggaagattaattctttgaaaaatcacaaaagcccacctcatgggatggcatgtatgtggagtttagtaccaccttgcttattccaggagatggggacctccttaaaagggaggatgccctactagccacttgaagcatgtgtggtggagagaagaggggaaacacacgcgggcgggcggcacacgtgcacgatgttacgcgtcgaatggtccgcaaaattggcttccttttgcacttacgcgcgacttatccggttcgggacctatctctatataaaccgagccgctgccttcacgcaacatacgtgaaatcaatctgtctactctgtactgtgccgtcgctcgtagactactccatcccgctcgccggcgtgcatcggcgatcgggagagcaggtttccggccggcgtgcatcggcgatcgggagagcaggtttccggccgcaaccgcgagtagttcctgccgagcaaccggtctttccgccacctcggtacgtattcgacatgttgcgcatatttgatttgttcatattttactgcttagtttacatatgtagatctaatgatgcgttcaatctagtttacatctacaatgtcatgatttatttatggaataaattaaatcattatgtgcttataattttaacaatccaaaaaccttattataggcgctgtgattttactatggctggttttgctgatacactgagaccggataaattcaccggtgtgcactttaagagatggcagctcagggtcactctgtggctgacagctatgaaatgcttctgggtgagtactggcaaacctgaagaaattcttactgctgatcagcagaagcaattcgaggaagccactactctctttgtgggatgcattcttagcgttcttggcgatcgtctggtcgaggtatatatgcatatgaccgacgctaaggagttgtgggatgcactgaataataaattcggtgctattgatgctagcaatgatctgtatatcatggagcagtttcatgactacaagatggctgacaaccattctgtagtcgaacaggcccatgagatacaaaccatgactaagaaactcgaactccttaagtgtgtattactcgacaaatttgtggccaggtgcattattgcgaaactacctccatcttggagaagtttcggtactgcactcaaacacaagagacaggaatactccgttgaggggttgatagcatatcttgatgttgaggagaaagctcgggaaaaagatggtgcgtctaagggcgatggtgggtagtccagtgccaatgttgtgcacaaggcccaaaataagagtaaggggaaatacaaagctcaacagaccaccaacttcaagaagcagaagaagaacaacaacaatcctaatcaggatgagaggacttgctttgtgtctggccaacctggtcatctggctaggaagtgtccacagcgcaaggggatgaaggcacctgcagggcagacttctaagtctgctaatgtgaccattggcaacactggagatggaagcgggttggtaatttacctactgttttttcagttatctactaactggtgggttgatactggggccaatgtacatgtttgtgctgacatctcattgttttcttcttatcaggtcgcacggggtttcaccgtcctaatggggaatgggtcacatgcttatgtcatggtgttggcacggtagatctgaa

SEQ ID NO: 11640 - DNA, 3394 bp, Oryza sativa
aattcctaagttttccattgtcaaaggttctaagtgacatagttgtgtgcaatcgaagcaacctcgcaagcctcacaaggctgccgaggagagaaacttggcaccactagaactcctacattcagatctttgtgaaatgaatggggtgttgacgaaggggtggaaaacgatatttcatgacgttgattgatgatgctaccagattttgctatgtgtacttgttgaaaacgaaagacgaggctctagactattttaaaatttataaggcagaaattgaaaatcaacttgacagaaagataaaaaggcttaggtctgatcgtgatggagagtttttctcaaacgagtttgacttattctatgaggaacatggcatcatacatgagaggacgcctccctattctcccgagtctaatgggattgctgaaaagaagaaccgcacactgactgacttggtgaatgccatgttggacaccgcgggactacctaaggcatggtggggggaggcattgttgacctcgaatcatgtgttaaacagagctcctaacagaaataaggacaaaacaccatataagatatggattgggagaaaaccatcactttcttatttgcgcacatgggggtgcttggcgaaagtcaatgtaccaataacgaagaagcgcaaactgggatctaagactgtggactgtgtctttctgggatatgctcatcacaacattgcctatagatttttaatagttaaatctaaggtacctaacatgcatgttggtacaattatggagtctcgtgatgctaccttctttgagagctttttcccaatgaaggatacacatagtagttcgagccaaccctctgaagtaattcccagttcaatcacaccaccagaacaaactgaacatacacatgaacatgtcactgaggaggatgaaagtgaagctcctcgaagtagtaagagacaaaggacggctaagtcctttggtgatgatttcactgtgtacctcgtggatgacactcctaagtcaatttcagaagcatatgcatcttctgatgtagactactggaaggaggctgtccgtagtgaaatggactccattatcgctaacgggacttgggaggtgacagagcgaccctatgggtgtaaacctgtggggtgcaagtgggtgttcaagaagaagcttaggcctaacggtactattgaaaagtacaaggcacgacttgttgctaagggctatactcagaaagaaggcgaaaatttctttcacacttactcacctgttgctagattgaccacaattcgtgtgctactttccctagcaacctcacatggtcttctcgttcatcaaatggacgttaagatagcttttcttaatggagagctagatgaggagatctatatggatcaacctgatgggtttgtagttaaaggtcaagaaggcaaagtgtgcaaattgttgaagtctttgtatggtctgaaacaagctcctaagcaatagcatgagaaatttgacaaaacattgacatctgcaggctttgcagtcaatgaggcagataaatgtgtgtactatcgccatggtgggggtgagggagttattctgggcttgtatgttgatgacatactgatatttgggacaagccttgaggtgataaatgaggttaaatcattcttgtctcaaaattttgatatgaaggatttgggagtagctgatgttatcttaaacattaagctaattagaggcgagaatgggatcacactcttgcagtcccattatctggagaagatcttgaatcgctttggctacattgatagtaagccttctccaacaccttatgatcctagcttgttgcttcgcaagaacaagagaattgctaggaatcaactagaatactcccaaatcattggctcgctgatgtacctggctagtgcaactaggcctgatatctcctttgctgtgagcaagttgagccggtttacctctaattcgggagatgatcactggcatgcgcttgagcgagtaatgcactatctgaaaggtactatggaattggagcttcactattctgggtatcctgcggtactggagggatatagtgattctaattggatctctgatgtggatgagatcaaagccactagtggatatgtcttcacactaggtggtggtgctgtttcgtggaggtcttgcaaacagacaattttgacgaggtcaaccatggaagcagagctgacggcactggatactgctactgttgaggcagaatggctgcgtgatctattaatggatctgcctattgttgaaaaaccagtgccggctatccttatgaactgtggcaatcaaacggtaattgtcaaagtgaatagttctaaggataatatgaaatcgtctagacatgtgaaaagacgattaaagtctgtcaggaaattgagaaactctggagttataacgttggattacatccaaacagctagaaacctggcagatcccttcacgaaaggactatcacaaaatgtgatagacaatgcatcgaaggagatgggtttgagacccatgtgagttatactatggtggtaacccagtctatgtaatcggagatcccgtgaattagaacctgggaagaacaaaccattagtaaactagaggagagtaccaatctataccctctctaagtgaagatgcatgtactctcgtgagctgcaaggcaggttggctatgccttaatgagttctgttggctttaattagcgaagatgctatcctgcagagcattcttgaaagaactcacatttgtaagcttgactgttggttgcattctatggagattttgggtgaatcttctaggaagcttactaaagacctatgagtatgacttatacacttcacctgaggggtagtttacagacggtctagtaccagataagactctgagtgaaacttgcttgcacaagacttgcaattcaaggcgtagtccattgttcaagttgtgagtaagtgtagcttggagttctaggtggatgttcaaccttaatcggtctccatcgaaccgctggtatataaacagtacattggaaaaggcaaatctcaatgggattttgagatttggtgggggattgttggaattaatagatgggctaaggctcattcgaagattaattctttggaaatcacaaaagcccacctcatgggatggcatgcatgtggagtttggtaacaccttgcttattctaggagagggggacctccttaaaagggaagatgccctcctagccacttgaagcatgtgtggtggagagaagaggagaaacacacacgcacgctcgctcgcctcgcctggcctggcaggcggcacgcgtgcacgacgtacgcatcgaatggtccacaaaattggctactcacccttgc

SEQ ID NO: 11641 - DNA, 19416 bp, Oryza sativa
tacatgttaagttttaagagttagtgggcatcaaatttatagtaagataggataggatttagtgtctgttttgaaagatgatgtggttcgatgcatgttgagaaattagttccaattatataagaatagtagatatggaaatcttggtaaattctcatggtttcttctatcactagcatccagctccaactaccatttgctatagaaaaacattattgcagacgattttttaaactccttaccatatgcatcctacaattttaaatatatgacatgtttttagacatacatcgaccatttattttattaaatatataagtagcattttttattcggacttattttattttaatactttataggcatgacttatatttttatatatgtacacaatttttttacaaaagaaggatggtcaaacatcagtcaaaaaaccaatatcatattatatttaaaaaatggacttggtattttccatgtaagagatgaatgtgttggtcttcactccctcagctctagcaacatgcttggcccagtctgggtcattgtcaacatgtgtgttactttttatcaccgtaaaattatcagagaatctactccatatcactaagtttgtcccagtttaacaatttgtcattgacattatctcttctgtaatataccgttgaatttataaattattctacaatatgccatgccattagactgatgcttttcttaaaaaatacccttaaatacatactcccctggtcaaaaaaaaatccaatctagacagggatgcgacacaacatagtacaatgaatttggatttgtgtcacatccctaagtaggttgagtttttcggactgagggagtacaatgttaagaattgaactacctcatttgaagtttaaaaaaaatatgaaaattcctatatggcctccttacacgacatggaagtttgtacataagtttttaagtttttctggtatatttattttttatataaaaatattcttatgtgttttatgagagagaatttacttacacaaaagataatatcacaaaaatatcttatgtagcgtatgaaaaatgatttacattaaaaaataacaacacaaaacgtattttatgcagcatataatatattaattatatttaaaaaatttagaaatgcaaaaaacttgaaacttatatacaaacttccatattgtgtaaggaggccacatgaaaattttaatatttattttgggtacttttgaaaagaatatttagcccaataacgtatcgtagaataattgataaagtcacaagtatattatagcaaaagacaatgtcaatgataaattattgaactcagacaaactcagtagtatataaaccatatgcagtttggaagagaaggaaaaggaaaaaaaaagagtcataaacagtctaattgaaatataatccatctgttctaaaatatagctaagcttaagctaaacattagacacacactcatcgagatgcatagctaaaagatatttagggatggaagagtagtatcatatcatctgtaacattgtatggattttttaaaacaaataattaattatataaattcagtaattaaataagcaggttactatccctccgtttctaaatatttgacgccgttgacttttttaaacatgtttaactattcatcttattaaaaaaagtaattattaattcttttcctatcatttgatttattattaaatatactttcatgtatacatatagttttacatatttcacagtttttttaataagacgaacgctcaaacatgtgctaaaaagttaacggtgtcaaatatttagaaacgaagggagtatgtaataacttgttcacactgataaaagctatctaaatcaatatttattctccaagtaactctcatcattaattcattaattgcgtgttgtattatgacttatccaacaggttattggcgtgtggttgtgagctattgaatggtcgatacactgcaatttgctctaccacatctagtctgcgcgtgggtcactcattttattgctgctattttacatgtaacacgttttcttcttgtctgctaattcaagggtgaaaagtttcactgtgtcacatcagatatatatcgatacacatttaaagtattaaacgtagactaataacaaaataaattatagattccgcctgtaaactgcgagacgaatttattaagcctaattaatccatcactaataaatatttactgtagcaccacattatcaaatcatagagcaattaggcttaaaagattcgtctcataatttacacgtaatctgtaattagttttttttcatacttaatattctatacatatcaaatatcaaacattcgatctaaacaggccctaagttagggggatcgagggccatgacttcaactaaacatgactgatatctcaaagcgccatatcagcattcgtttttcttttccttagacctgatctgatcgattttgttgatttgctgtcactctctgattctttgttctataatttgttgattgaatatgtcgtcttgttgtgcatgtgtacttttgaccactacatgtttctatctgggagagatcctttgcttacaaccgcaatcttgacaaatgttgaattagaatgactagctagaagtgcacaaataacaggctaatctatctataattttaaagctggcacgtctcactgcaacctaattggttgagttgttacgcacttgttcgtacaccatccatctaactgttagtgatataccctagaggcaatcatagagatgattgtatcacatactatgtttacatatttatccgactttgttacttgaaatagataactcattattggttaatgaatatgtgattctttcatgagactctttatgttgtgtgttgctatttctaaaggatccctgatcaaatatcatatgtggaacaaatatgtttagatgatcagcacatgtactaattgatgatcatgtctcatggatcatggaatagagataccaaattaataatgtggacacatgttggtgaacatgttgatgaatagacccaacatgagacactgcaagagccatatgtgttgtgtcatcagtaatctcatttagtgttggtgttgaatccttagacctgatattatcatggttcccaacatgtgtagtagcttacttagggactgctaaacgctactctgtaattgggtagttataaaagttgttttcgggtatgctatgaaatatgtagtgagatatgaataatcaagatgggatttgcccctcctatggagagatatctctggacccctcgatgttgtaaattatggaagtgcatggcatgccaaaggtgattgaggagtatatcacaagttatataatctatcaacaggttcgagtgaatgattgagctattagagtatggcacatatctagccttgagcttaatcgatattgtgaggcaaaggggttcatacaagtatacactagagattcagccgatatgatctttatgtatgcccggtgagtcaatatgttctgctagaggccgctgttgatgcgtggaccgaaaaggacttttcgggttacagcggagtgtacatgaacctacagtatcgcacgcttaataggctagaataaggggattggatggagatccaatatgagcttaattcggatagagatccgaataggagtcctacgggccttggaggcccgagtaatggatcctatatatttgtaaggggtgtgaccggcggaggtattgcatcacgtgagaaaccctagccgtcactcccctccccgagcaaaaccctagccgcgcgcgggtgctagcatatttgcgcgtggcgttccgtccctgtacgtgtggataccagtagaggcaccgctggtttgtagtgctgatcggtgtgggaatacagcgaggagaacgcatgaggagaaggtcgagccggtgcgatcgactacttcctctacatcgacgcgcgctacttcgcgagaattccttcgacttcttagcgccttcttccgttgcgtagcgcgtcgagtggtaacgatctatgatctaatacttgcatgattcctggtttacgcgatagaaaattttaatttatactatcgtagcctatgcgtatcccaacactaaccatgcatgcatcttttgcacctagggcagcgaaggaggaccggtaaatatcagggccacatgacggtactaaattggcaaaaaaactcattcggtttggggggacggtgggaagagatgcaagaaacaaagaaaccccgagagaacattcagaaatttcaacgatgaaaaaaggttgaaacccagaaaattcgaagaaagaaaggcaagaaaaatgaagtaaattatattaagtgatagtcattcacaatgaacggaacaagagaaattttcttagagttgtagcttttccaaaaaaacatataatgtattttttctagcatgactggagatcttcgaatacttaaaagatagtgtaaatttcccaaaacttcaaatattttgactaaactatcatagaactatagatttaaaatgtttatcataaactacatgtttaacatcaaatttatcacaaaactacaaatctaagacaatgtatcacaatactatatatttaatattaaactaatcgcagaactacatattttagagtttaaatcctaacaccattgttatgttagagctataaaatgtagttttataattaaattggttctaaacctatagttgttactaaaatgttttgttacatttcatcattaatgtatagttatatgataattttgactttaaatatattttttgatacaccgagtttaatctatagttctataattatgtaattttgtgaaatttactctaaaatatattgcatgctaaataggaaagtacccattaaaatatcatatgatacggaagataaaaacaggtgtcacagcagtactgaaagatgaggagagatcgtgatcactactctccctgtaagatgtgcagtgtacaattataatctaatcactgatgaaatgcgtccagcaaattagtaggagtaatagactgttggagagtgttgaccctaaatcctaattatatcgtgcgtacgtgtagtgaggctcggcaagttaatctggccatactaagcacgcagtcctgtaatggtcggcagcgaccagcagcgacacacgtacttaacctgtacagagtcccgaaaccaccgggcgggtccattaccagcgcgacgcgacacgtccgtcggtcggtcggtcgcccaaaccgcgcgtccgcgaccgccgaccacgactactaaattcgggcccagaaacttcggaagcaccgatttgcgacgcgtcgcgcgtactagagtccaattggttaccctataataattagccaaaatcaaagtaaaactaaaatttaaattcccaaacttaattttgatgtttattttcagatatttttgacatatttttgttagcgttgatttttaatatcgaagcgaacacatatataaaattttaccaataaaaattttaatttttattttctaataaatcgttttggtttattagagaatatggataaatgataaatacatagttttctgacaatgaaaacggtcaaaaatatcttcacccattgcataactcgaaaacaccactaaaacagtagacgtagaaccaaaagtactatactatatatatattagaaaactgaaaatgaaactacaaggtaactaacgtcagaatatgaacataaacactagtacagattctatcatctgtgacgggttcaattatgcgtgtactatatggaccgtcagaacaaagtcatctcaatcggacttaaatttgcaccgttatagatatacttactctaggcccaaatacatatagcccgtcaccgataacactcatatgtgacgggcaaatatttaggcccgattgagatgacctcgcatacctcaatcgggcctagataccgagcccgtcagagatgagggactttaaagcccgtcaccgatgactcatatcggtgttgggtttttgttgatgcccgttagagataacttttacttaggttatttttttatataactttttttaatagtttgagtttgaatttgaaaatatgacaacttcaaacaattttttaaatactaaattatttcaaatgaaaaaaattatcaacaacaaagttgtataacataccaatatttacaacttttatttttattttggttatttttctatataacattttttttgagcagtttgaatttgaatttgaaaatataacacttcaaaacaatattttcaaatactaaatgatttaaactaaaaaagtcatcaacaataaagttgtataactcatcaagatctataacttataacttttattttggccatttttctatataacgttttttttgaacagtttgaatttgaatttgaaaatatgacaacttcaaacaatattttcatatactaaatgatttcaactaaaaaagtcatcaacaataaagttgcataactcatcaagatctataagtttaatttttgtcatttttctatataacgttttcttgaacagtttgaatttgaatttgaaaatatgacaactttaaacaatattttcatatactaaatgatttcaactaaaaaaagtcatcaacaacaaagttgtataactcaccaagatctataacttttatatttatcatttcttcatccgataaagtgctagtaacattgttcacaaaatttacatatatgttttattgtttacaaaactagatgagagatatgtgaattttatagccaatgttactatcactttgtcggatgaagcaatgaccaaaataaaagttatagatcttgatgagttatacaactttgttgttgatgactttttcagttgaaatcatttagtatttgaaaatgttgtttgaagttgtcatattttcaaattcaaattcaaactgttcaaaaaaaaatgttgtatagataaatgaacaaaataatagttatagatattgatgagttatacaactttgttgttgatgactttttcagttgaaatcatttagtatttgaaaatattgcttgaagttgtcatatttttaaattcaaatttaaactgttcaaaaaatgttatatagaaaaaagaccaaagtaaaagttatagatcttgatgagttatacaactttgttgttgatgatttctctatttaaaatcatttactacctgaaaaaatatttgaatttcttatattttaaaatacaaattttatatagttcaatcaaacccggatggagaaatgaccaaaataaaaatggtagatctcaatgagttatacaactttgttttttatagcttttttatatgagttcatttagtatcataaaattcaattcgaaatttattttttcctagaagtctaatttgcctcctacttatgataatacttgctaaatatatatttgatccaattaactcggatttactggtgaaatatgtgatcaaaatagatgttatgtgaatgtggttgtgttatgtgaatgaatgtatatgaatagaggatgctagggtgtgacatcctagcccagggcttaataggattaatagaatactcataccaacaaattacaatttctctctcgaaagccaatttccaaagaactatgaggttaacctagagcaattctcggataggtgacctaccaagaaggcacacaagtgaggttcggatgggtgaccgactgggaaggcacacaagtgagggcaaaggcccgaggctaacaaaaaaacaaaatttatttttttttggattatattcatctgtgatgggctataatctaggcccgttagagatgagagtcatccgtgacaggcttttgtgttggcccgattgagatgtctcatccgtgacggccggatgcccgattgagatattttgtcacatcactgacctttgcttagtgacaggggcctgcccgaaagagatgatgctttaagcccgttagagatgactaatcccgttatagtgaaaaatccattcaagttacgatataaaaattataaactatctctcctttaaaatattgtcaaattagggttttgtatgagataccataactaccgtattataaaaagtagttctttgtatgaaatatgagataaagtaattacacttacacatattagtagatatggggtatatagaaatacggtaattgcaatctataaagcaaacggtataggatatataattttatggtatatttgttgtcttatttcctccatctttatcttgagggacaattagtatttagtagcatccttttattatttctaatgacattcttcaccaactaaagatagcatattgtatcatatatattcatgatagtttatattatatcatatgttcctcacagtttggactctaggaaattcgtcgtcacgttagaatagattcgaggatgtaatatcatcagttagtggtattgtttcaatgtagattgggtaacaaagttaacttttcttcaatcaacgggtgaattataagaatttttaactaacacgtcaaaattgcctagttaattttaattctatcaaaattagatatttttaaattttaatttaatcttaatttcattttcccaaatttatttcttaatgtatataattttttatatgtatacacttttaatgtaaaaaatacatacatctttgtaaacgtccgtataaaaaaaagagaagaaaacctagaaaaataaggggggaaaggaaaaaaaagtaaaaacgaaaaaaaaaacttccacatgcctctctcctgcgccctcccgccgtgccccctctccatgtgcgccatatgcatggttgcaccgcgcgccggggggggggcggaggggggtgtacgcgactagtcagcaaatagggttttcgacgcactcacctctacgaatgcacacattcataccctacccctataaacacatccggaatactaagctggcgtatagtgtgattgatgaagtcgtcgcggatgccttaatattgatgggtatgttgcctacgattgaaagaataattagtcgtaaatgcgagcgctagcgtcaaatctaggatttgaatcctggtgggctggttaaaaaaaaaacctaaccagctgagttacgctcacttcgcttaatcgtgaatttttatttttcttattttctttggattaattgagaatgcttagattgtaagactatgcttcttttcctattacttttaattatatactgacatgcttggatgctaaggtcatgcatgaaaatctaattatgattggtctgttacatatttacattgcttaggtgcctcacacggtttcgttgctgagaactgttgtccgtttcctacactaaccatgcatgcatgaatatttattgctacatcacatttccgaaaagaatccttggctgtttgagattgttatcggtttcatacacgatgacaattcataagcatattttttattggtacgtcccgtttcaaaaagaatagttgttcatttgttgtttccttcttattttcatccaattaacgtattcttttttgtttgtttgttttgtttattttacttttctctaataacgtggtaatttctaaatcgtgggaatgaacatggtggtttctttttctattctctctccaaaagtctaaacctactttattttttggtttttttccaaaatcctaagacatatttataatctttgtgggataaattccgaaacctagaagtcatagttgcatgcacgtatatagttcattggtttggtcacgtggtgggtaagttaattactcttggtattggtgacagaagaaatactctctccatcccaaaatataaagcacaactgttttttttttcatatatcataaggcgtgcatggatgcataagttaactatcacctcttagtcctttaaatttggttcattttaaatcttctaccatcaagttccccaatcacatttcttgcgtggatagatgtgattcaagcgaggagataatcaaatttttttcttcgtctttatgttagaagtggttaagccttctattttggatttgagggagtaggtctcaagacttttggatgaagggagtattactttattattaataagttaatagattcaggtatggtataatatggtaagttttggtaacggttcgtagaatagtaaaattcttcctgtatctatttttattttattattattatttttatcagttagaattttcaaattaatagttcggtcaaaaccaagtcggagataagtaacaagcaagaattttaattactttctcatccctactagactactagttctaatccggttgggggcaggactctcccgaaaatgcttctcttcgaacgtccgatcagatgaaaaacattggacgcctacggtcagctcagtccttacttgctaatttcttatttctctctgttgacgtcaagaaaatgctgttgatcagcagcctggtactgtcgtactgtaacatgcatgcatatatctagttgtttcttttcattcttttctcctctctttaaatattttctcttctaaattacttatctgatctacgaaccgatcgcaccgttgtattcgttgcaattaaatctttacaacaagatatcacatgattatattatgtcaaaagaaaaacgtatgtttcaaaccgttaaaacaaaatatttcatatgtgatagtgatatgtttcaatatgtgtcttaagtgtgtttcacaaaattcctgaaactacctactactactctctctccacctcatgcatgcatacatgcatgtattttagcaagcttcaaaatgatttttctcttaaattacctattcaatctaagatccgatcacaccattgtattcgttttaattaaatctttacaacaagatatcgcttgattatattttgataaaagaaaaacatgtgtttcaatcagttaatacttgttgtttcatgtgtgacagcaacatgtttcaacgtgtatcttcaccatgtttcataaaatatttaaatgttccagttgctgatttttttcaccatatatataacatgatgttttacttgttggtcaactgcaacatttgaccatccatttttttttaatttaaaaatgtttcacctaatgtactcatgatgtttcactatgtatgaatcaaatgttgcagtgagttaaaacatcctttcgctattcgctgaaacattattttcatataaggcgaaacggcgtccaataaaacattttcgatctacttagtgaaacaattccaatacttggtgcaacagcgtgcaacatttaaaaataatttaataataagctaaaaaaaatttcatcggattatattcatgtgtggtcttgttttaaagatttaattgcaacgaatttaatggtgcaatcggatcatgatttggataaatattttgagagaaaaaatagtttaaaattcatttgatacatgcataatggatggctggtgtacctgtgcatggatcggacggttgcggaggcatccgatttttcgtctcgcgtcgtacgtccgacgcgtagcgctctccggactctccgcgtgcgcaccgcgcctgacgacgacgatcatggactcatggtcatggagccgcagccaggccccgtttggaccatttctcgtcgcgagcaagtaggcaaatcacgttgctttcagtagttatggctagatagggagagagggcgagaaagctagttggcggggatatgatgttactcgttttactgacttgtaatttcgctctcaattgagtacaagatcgcgcaggagcagcaacataagccaataacaaacggagcctacggatatggagaccgcgaagtcatccatcccctgttgacagttcttcttgcttgagtacaagatcgggcaggagcagcaacataagccaataacaaacggagcctacggatatggagaccgcgaagtcatccatcccctgttgacagttcttcttgcttgagtacaagatcgggcaggagcagcaacataagccaataacaaacggagcctacggatatggagactgcgaagtcatccatcccctgttgatagttcttcagttttaccgaaacaacctaattttattttacaaaagatgcaaaaaaaaataccgatgtcaaccggtggaaaggtaacaccgttttgtcgctacatggaaaggcgaggagccccatgtcgacaacccacctggtgaggattagagcagatacaatagaaggctataagccagttgcaaacatattttaagaagataaatgatgagagagaagagcagcgggctatagatctgtagccagctgtagcacggactccaagacgcagtgtgtgtatgacaggtaggaccagatattaatagtgtagtatataactattgtataaataagctatttattagattagctatagatgaattgaagctagtagttggctatactattaaacttgctcttacgcactctatgactctaacgccggcattactgagctcacgctagtcttctcgtgcctatacgtggccaccctagctgttggtcatgctcgcctcgagctcacgcacacgcaaccgtacgtccacgctcgccctaagcccatctatgcgcgctctgttaacgatagttaagtatcaatgtcgacggcaactatcataataaataaatggagaactaatattttttacgtatggcaataataaaaaatataatttcacttgtcttagagaaataacatgtatgcaaagattatacaccaaaataaaggagaaatgagccaacatgcaaagaaacacatttctagcgaatcacgtaagagcacatggattgatgggcccaagtcaggccaaaccgacttaaaatgtgtccaatcaaccgtgcaccaatcgaagggcccacatgtcagcctcaggacaaggtcggtagtgaatggtggagtccctggttcggccaaaccaggggtgtacccctcgccaccgtcttccacgtggtgcctcctcccgcactcttgatagcggttatgcctaattcccaaaccaaaaccgatctaagcaactgtcattagaagctataaatagaggagagttccttacttcacagcacatactcaaggagaaattttctctatctgcattgtattctctacaatattagtggaaataggcttagagtaatcttcggttctatggttttctcggagattccagtatgactttagtactttactgttcttgtaaaactatagttgaattaatagaattaccttctttatattcttgtgttcatagttcatatactgctttggtagttttgtgttttatgattaggatatacttcatttatatgattcacttgattaggctagtcgatcaatactacggttacagtccaataaccttagcggattacactaattcttacttgttcatctgaaaggtgggagtcacattttagattggtgtgtgtcacactatccaattatccttattattctaacccctgtttacactatggtgaattaattatagcttgattaatgatgtataaactttatctttacaccatcatcttccctgcaaaaatataaatacgataccctttgaataaccctaggtgaaatactacagcggtatccgtacacctgcagatttatctgtgatcgtaaaaaataccagcatgccacagcaatcagactcacacgctcgtgtcaatcatgctcaccccgtgcatgctcgctttagatgcacctctcgctttaatagtacgtgtgctcgtcttaagctcaccaacgccaatcgtaggtccgtcccgctcccactcccgctcccgtctctgtctcatcgctccgatcagcatcattggcgcttctcacgttgatggctcaagcaccattgccgctcaaatatggtgtcacgtgctcacttgcatgcccgcacatggacacctagagtagtcaaccaggtcaattactcaaggcttgtcacccttccatgcaacgacatatacagcgtggcataagtgcccacatgtcaactactttttcccttcccttactgacatctcccctggcaaccttccctcccaactccacagtgccaccgacttctcttcctcttcttctcacattctcggttggggttttagactatttgccattgtcctgaagggcgtattctcaaatgccattctctagaataactttgactttttgctatcggagaaagaagatttcttgttcgtgagccatttttcagcccatgagaagccatgtcaccaaattcgaggacaaaatggccgccttgccctcctcctttctttcttctttgccttcactcaccttcatcatctccctctcctccggcgtgctccctgtcaatgaaggtgtacaagcagacgaagccacgtgagctccacgtcgagggtgcggccgagggtcatggccttgcagtaagcatccgcgagtgccatacctccaccatcggctcgctgtcgaggggtacgatcgtcgtggccacgatatcctcttccactagagccaccaacgacccatcgtcgagggctccacttacccgctggtgttgatcactcctgcctcacccatcaccgacctcgtcctcacggggcaaagccaccgctagctatcctctcctcttgcgcatacagaggagcggggtgaaggagacggctggagctcgcgggccagggggtttatcagcgtggcaatcctcactggagcccaagcacaaggcaaggagcgagaatgaaagacattgagaggggcaaaacggaccctttcgtcctcggatttggtgatgtggcttctgatgggctggaaaatggcaaatgagcaagaaatcttctctcttcgatggtaaaattaaaagttatttggaagaatggtatttgagaatacggcattcggaagagtggcaaatagaccaaaacccctcgctgccaggtccggacggacgtgatgatccttttagaacaaaggataaatcctaccaaagaaaacatttcacgtaatttggcaacattgaaaatctttaacccttttagaaaacttaaatatctttttcatcactacctccatatttagatattttaggtattaatcatgcttctaaatcgaagatttaagtatgcttcgatctgcaagctactttttccatcgtggaaatatacaaattgtagtaatggtgtaatggtagtatggtacagagggggaaatcactacaggttcatgccacaggttcacaagttttcaatttactactataataacttgcgggtttaaaacatgcgcacaaacatgactgagaataatatttcctccgtttcacaatgtaagactttctagcattgcccacattcattatgtgtttagatttattaacatctatatgtatgtggttaatgctagaaagtcttacattgtgaaatggagggagtaggtgttaccaaatcatgataaattacttgtcaaaaaataacagctccatgagttaatttgcaaagcaaagcaagtacgatacaaaaagtgggcagatacttccatcaaacaactaacccacaacatggtgcacactatgtatgtctacatatcagaatatatgccgttctgtacttcaaaacaagagaaaatatatcccatatttgggaagaaaatccatcatgcaaaggtttcatacaaatgctatgctccaggctagatctaagaaacatagcagactaaccaagaggagaacaaacaaattacagcagaataagatcacaacagaagaaacttaattttgttacctgtgaactatgagttaaacattcaaggcttacacctcctgatactggtgtaaaattgtgaaccatggcatacacagcaagaaaactctgtacaccaaacttatatatcaacgtcacccccagagctggctgaatcaccatcactgccgtcactatcactgctgctgcttccactaccactcccacttccactgctactactgctgctgctgctcccgctagagctagaggtttcctgctcatcctgctgcccttctgcattgacttgagctcgcagggcctcggctgcattgagtccctcatcagcctcatcactgacatctacatcagcaatttcatcatctatgtcaagctggtttggtatgttgatgtcaaaaccacgaacagaagctccttgtccagaggacatgttattcggtgagccattgtcatcatcaccaagtatgtctaggttctcctcttgatcatttggatcaggcgaaaatgaaaatggatttgtggtaacaggttggtatgtagtgctcctgttattgtttcttagacctgcaactggcaaactagaaaatgagaacaaacgataaatcctatccaagaaaacatttcacgtaatttggcaacattgacaatctttaacaacccttttagaaaacgcaaacatctttttcatcactacctctatttttagatattttaggtattaatcatgcttctataatcgaggagaacaatgttcaagtatgcttcgatctgtatgctactttttcatcgtggaaatatactacaaattgtagtaatggtggcagtatggtacagagggggaaatcactacatgcgcctctgagttgtagaatggcatgtatttggtgaactaatatattttttttgcagaacaggtcaaaacggcaattagaaaggttaaactgtttttgcattgtgccatatctttcctccagcaccatgaaatttgacaagatgatatcatggtacaaggaccattccaagaactgcaaactacaacatcaacatcaagacccgaacatagaatttggtgtataacctacatggcaaatgccttgcctttgttttaacaacaattacgcgaatgtattcatcatctctagtatcagagcaagttaagaaactaaaagatcctcatgattaagaacaacattgcaataaaaaaagggtcacattacctggattttcaggttcaccaatgtcaatgcgttcaacctcaacctataaaatgatgatcaaaggtcagaagtcagacgatgattaaatagaagagtttcttaaacttcaagaattccactaaaattgtacaacgtgatatcacagaggttggccaatatcccccagggcccagggtcagcatatcaataacattgtcagcttataaatctatttatgaacttataacactttaggatgctttcttcaggaatctagtctcaatatatataatctggagtaaactgggaatgatatgagaaatataacaaacttatgagcctatatccaagtcttagaaagtatgtaaagtacattttagattgggacaaggatgcatctctcatgcaaatcaaatgttcagagattgtatctctactttgagctcactaaaagctgaaatcactttgatacccaaaatatagcagtatattcagtagcaatggcacagttgcatgataatgatactatgttacaaaagctcccatccgaacacttgcattgaacaggcaagggccctgacaaaatccccatcagggataatgatactatgtcacaaaagcttggggttaatggatccaggaactgaaacgaggaacttagcaaggactgtataaagttttctttgataaaaagaaaagcattaacatgataggaaaacaatccctggcccagtccaattgtcatgtgatacgaagttaattaggataattgaatatggtccattgtatcaagccatcaaatttccatattcaaagaaaaggaacagaacttgctaccatattttggcaaaaaaaaaaaactttcatcggtagtcagagctaaccatactgtattctggcataaaagttgtgtaaaggaaatttctactcactatccaatgtttggccttctgaaatataaattatgaagaataaaaattaacaatattcacttttcaatcagatgctcaaagactaatgttttcataaaccattaaatactaataacctaaaacatactatgaaattcaaatattaatcactttaccatatcacaaatataacataatcctgtggatgcttacgggtctgagagatgttagattcaaaagagcttatgaactggctaggcttgaatttagacaaacatgaaattttattgtggcacatatataatgttttatactttctacatgaagacaatcaggtaatatggtctacaacattccaaaaagcccgaattgtttaatatgctaccgataaatattactgaagggcctatatatgagtggttccagtctcccagataacaaaaatctcttggcaaatgttttgtgtttgtcagtctaaatagtgtgcatcatatattgtctcataccggttattcaacgttatcactttttttcctccaatacctaaggtcgtaacaaattatataacaatgtatcaaaatttatctagggcatctaaaatgctgaaagaacttacaggaactgagtgtacagcaggtttactcatggccggtgactttccaactttcggtaatggaggggaatgtgattcgcccattccagtagtagccgaagtggctgccgaagactctcctggaactcggacatgccttaatctcttgacagcccgatgcaaccgctccagacgaaaggtttcaccatcaaaaaacaagacaccatcattatccttgtactcttcttggcttccttcaaatgtcacctttggcttgccaggctgattgttgtggaattccacagtaaccctgttatctttggtcttctgcagagacccagcttgagtcttatcaattgatgctggcttaaattcatctgtcaacacaaatataagaaaagggttcaacacgacatagcctgatatgtatttataatataaaagaataaggatcaacacattagagatatttgtagaaatagttttcaggcaaaagaaaaatggttatttcaaacttcataatccaataatggacttaaaatggaagggaaagctagacagcaaccaacgaagtggtgactcattggatttcagcaaattgttatgctaattcattcatgaagagtacccaggacaggcatgccctacatgatcgtggtaacctttttcaaaccacgagagggagagaaaattaactatttaatcagttttgggagcatcaattttgattcctttattaccaatgacttgttttggcccaatgaaaaaaaaattgaaacatgtcacataaccatcaagagggaa

SEQ ID NO: 11642 - DNA, 14775 bp, Oryza sativa
gcccccaccgcgctcgcctctcctccgcccccgccgcctcgccgctgcctcctccgccgcgcttgctgcctcggccgttgccgtccgaaggagaagagggagagagagaatgagacagtgagagatagaagagataggagagagatagaaactgacaggtggggcccccctatttttttattaaataaattgctgactgaactgccacatagcccaaaccccccgcggattagatccaagggggataattcgtccggtttgtatagggggtgaagaatatctggttttcgcacgcccgcgatagttcgggggggggggggggtaattcgtactttttcctttttttaatccgatcgcgcctcccgggcgctttgtcgccggtttttttccgtgcgcttttgtttttctcatctggttttttattcctatctgttcgccacacgcctcctgtgttgaccgccatatcgattgtgtgttttctggtccaatttggttgcaaaaatcgatttctcattcctccctcatcattttctccattattttcactttagattcggcttataatttgtcagatttaatgtccgttcggcgatcatcttggccatttttatcccgagttttacattctgattttggaaaaaaggaaagaggagattgagtggataaaaaaaaccccaaccaattttgggtgatcgagaaagattcggccggatttgatgggggaacaaatagttttacactctaatttgagatgtttttatgggtactttgtacgtgatccgtgttttatgctatctgtgctacttaaatctccattgtctgttaaaaagaaaataaaagtctgactcaaagaggtaaaagaaaaagtccgactcaaaagcgataaaaaagcttgtgtcgtcagtaaaaataaaaaacaaacatctcgtcgtaaaaaaatcatccgacttccttaaagggaaaaatggtctcgccaataaaaaacaaaaaaaaagtccgtttggtttttttggcacggtttttttttctattcttttgcacgtgaaagagttttttttacgcacgcgcttaggctcttggttttttcatccgttttttaatccaatcacgtctctcggacgctttgttgccggttttttctcccatacgcttttggtttttctaatctcgtattttaatctgatctgttcgcgcacgcctcctgagttgaaccctgccaccgcgccgccgccatatcgattgtgtgttatctccttcaacttaattaaaaaaatcgattccccactcctttctcatcattttctccattatttccactttcgattcggctttaatttgtcagatttaatgtctgtacggcgatcttcctggcaccatttgtggctgggtcgaagggaagcgggccaaacggtgggagatagcggactcgcctagggctaaaacggaaggaaggctatcgcccctaaacacgggaaatattttcattaacttttttaattataatctatagagatcccaatattaggattctcgttaactttttcaattataatgtatatagcgaacacaatattttaatttattgctcagctcttaatatatcagtgaaaaaacgtctgtacctgtttcaaggcacaggtattatttctagtatatataaaatatatataaagtttatttgtattaatttaaagtatatagatatgtattgatgggactaggggtgagttgatcgcgccggtgtagcctcgtgtggctggccgccgatcagcagcccccccttggagtcggtttgagacggcaccgacggatcgggattcgagtggtgccgaccaggccactgctaggacccgtgttagcccaccgagtatttagagccagcttgacatggaattcttatatataagtacgaattacccttccctaaactatcacggtcgatcgaattatccccctcgacccaatcgagagcggttttatcctacggcatacacatgtcaatccaatgagcatttctttttttaatggtgtggcccacctatcagatatactctttcacatcctcttcccctctctcgctctctctctcaggcgtcgttgggcgcgggtcacgcggcggcaggcgttcggcgtgcacggcgggtagtgggcggcgccgcgggatgcggaggcagcggcggctgttgatatttattaacgacattactataaatataattcctagcaatgacaccgaaattttcttggtatatttatggttacagatatgatttgcaagcgcacggatataccattgtagcatttcacctagaagtaatctaagatatcgtatttatttaatcacaggaaaagatatgataagaaagtactatactaataattcacattacttgtataaaccaaagtctaagcaggggttaatcaattcatgggtaggataaggttgacacacagaagaaaaaccaaggtactcttcactaaaatataatctaggctaagtggagaaagaataagaaaagaatcattcctctacttcttttatatagttaatttagtttacacttgctagtatacaatcatgcaaccaataccccctaactatgccctcctagtgtttcgagagaccatatctgattgctaagttccttatggcaacccgtcatggccatttgaccggtaaggaatacggaggagtacccataccaggaaagtgtcttaggattatgtactattgtggaggaatatccgtaccaagctgtcaccatcagcggcccacctctactgacccgtagcatataaccctaattaatggtatcaaataatctaagcaccacgctcacactactaaatactactccatatcgttacagcaaacattgagcaatcatagaaatgaacattaaacccacaccaaagcatatctctggtaagctacctacacaattatattgaaacaagtacgaactaaagtcaatactcgagtaatatgaattaagtaaaagactgaaactatataaagaaggaagagctagtagagccataccaaccaaacccgaaatctcctgaagactcgaggactaagagaactactctattcctattccactagcaataggacactaaactaaacttgagagagcttcttgatcttcttcttgagtgtgtgttgaagtggggtgaggtccttatataggctcccaatgacggttacagcggttggaaatgtcgcaaaaaacaccgcagccatcattgggaagcaatcctggatgtccacgtggaaggagacacggtggagctgggggttcggccgaacccccaatcggcccaaatctttgcaggtttgtctcctaatgactccccagtccagcggtggggtggttgggcccatttgatattatttcattggatttgtaagcctatccacccataagtctacctctcgatggatttcgattgatggttcggttaatttccgttgattctcctccaattatgtaaagatctttgcaaacaaataaacttccaagtacaagtgttgatagattagtcttaaacaaaaatatgcatgcaagcatagctagttctcctttattttggatatattgacggtcgaaatgggtctataacgatcgacaacagcagcgtgggacgcggaagcggcggcggcacgggacacaaaggcgatagcggcgaacttagggagggagccaaagttgtgggtggcacccccatgtgcacgacttgcgctggtggccaccgatgcccaagagagagagagagagagagcgggaggagaaagaggaggcgggacccaacgatgcaagtctccaccgcctgtcgtccctcttccggctttgtcgacacggctccgatgaggcgggccgctcgctgctgaccaaaccctcctccacgttgctcctatcaccgccttgagttccctctcctagccgcgccctatccctgtcgttcccgcagtcgaccggttccccctcccatccgtgcgcgcagccgagtggagccacccagccatggttgcttcggctcggtgacgactggttcctatcttgtcacacctgccgctgctcgcctagccgtgcccacagccgctcgggggaggaggatgggaggagatggaggcggggggccaccactccggctccctcccggagttctccgctcctgcctccgcgtcctgcgtagccgcccattcctacgcactgactgcctattgacggtcattacagacaaatttcgaccatcaatataactaaaataatagaaaattagctatgcttacaatgcatatttgttttcaaataatatagttccacttgtacttggagaataacatgttgcaggaatttatcaaataaaataaagagaaagtaaagaaaacctcactcctaagcaagttagacgataaggtgggcccacatgtcaggtgtaaccgtcaaaaaccgaccttagctgccacaaccgcctaaaggacccacctgtcagtgaccctgctgaggctggaggcctgctaggctggcccaggttcggctgaaccctggttgctacggctcagctcggccctccacgtggatgtccaggatacactctcaatgacggttgtgagggtaaaatggaaaattcgcatggctacaactgtcataacggccctataaaaggaggagctcattcactctctcaacacactcaagcaagcttaattcctcttcatacattagtattagttgtatagtgctaagtggagtagtaaagaatagtgttcagagtcctcggagtcttcggaagagtttttggtatggctctagcaactcttgtaatcccttctgtaataccttctgaattaatgcaatactcttctttatatatcttcggtgctttgcttagtctgagtactggtcttactttatatctatattatattagttgtgtgggtagcctaccagagactggaggtgtaatggtgcgggtttaatgtctgatttatcagttgctctatgtcgggtgcacgggtatagagtagaatttagtaatgtaagcatggtgcttagactatgaaatatcattaattgtgtatatatgctgctggacagtagaggtgggtcgctgatggtgatagctcagtacggttattcctctatgttagtatatgttcctaagacaaattcctggggagagtactcttccgtattttgccccggttggacggccataacaggttgtcataagaaacttggcaacccggggtgatctctcgaagtaccaggaggacactcttagggggtattagccacatgattgcatattagcatatgtaaactaggatttgagtgtatactagaagtataggaattgaatgccttttctttattcttccacttagttagaattattttcattatgaggatttatcagctttgcttcgtgtcactttacccttatattatacttaacccctacttaggctttgacaattacaagtaatatatgtataaagtgcattagcaaaattcactcttattatcttcccttgagattaaaaatatgaaaccttggaatacttccgggtgaaatgctacaacggtagatccgtgcgcttgcggattacttctgtaaccataaatatatcaagactatttctagcgccattgctgggaatgaatatttgtagtaatgtcgttaagaaataccaacaagcttttctagcaccgttgccgaggaagattaataatgagatgactaagctaataactttatatatatatatatatatatatatatatatatatatatatatatatatatatatatagtacctctgtatgagtcgttgtcctttgcaggcaaaccttgattgttttcacttgtgtcgtgaaaacaaggtagtgtatgactggtttcaacttaccggagtgtcaagcctcgtgtcgtccctccacagaagagactctccgaaaagaaaccagccatccaagcatcaccaagttttagggacatggccgagaagacccttcgcgaattcgttgccccgtctgctgacaacgtgcctgttggcccggctatcaacatcggagacactgatttcgatcttaagagcagcctgataactacagtgcagcaaagcccgttctgtggcaagccgaacgaagatgcaagcactcatctgcagcaattcttggagatctgcaccacttacacggtaaaaggtgtcagtccggacgccgtaaggctacgtctattttctttctcacttttgggaaaggcaaagcagtggttctacgtgaaccgggcgactgttaacacttgggacagatgctccaccgcgttcctcttaaaattcttcccgatgggcaagaccaatgaccttcgcgggagaatatcaagcttctagcagactagggatgagacgattcccgaagcatgggaacatctgcaggagtatgtggctgcttgtcctcatcatgggatggacgactggctcattctgcagtgtttctacaatggactcactccctcgtccagagatcatctggatgttattgctgggggtgccttctcaaagacggttcatgtggccattgatcttatttagaagatggtatccaacatgggatggagtgaagaacgactccagacctgacagcgcggcatgcacaccgtcaaggagacggagaaacttgccgctaaactagatctactgatgaagagacaggacgaccaggagaaggccaaaccgcaggccactatcagggcaatagactcgcacttcacatacgaggtctgcgggaacactggtcactaacttgcacgtgcgaactagtggtggtgcgcatcatgattaatcattgacatggtggtggtgcgcatcatgatttcaccgcacaaactcgcacgtgcaaactcgtgacatcacttgtgcgagtttgtgagttcactatgggaactctatgacatgatgccgcaaaattgtgcgagttcgcgcgtggatggtgcgaactcacccgctgaggccagctgaggcctacatctccggggcactgattacgggcgctcctccccgatctcgcatattaaagcatatcagagttacaacgactcatggccggacgccctcggcagccgcttcctctcgcaatgctatgtcgccatacggttacaacaggcacacgccctctatttatgagagatccttggacagagtccaacatttactctagtcctatacctagtacaactccaagtcctaaactgtaaccgactatgtacacatattcgacacaaactctaacaaagtccatcttggcgaatatgccatgccaacctgaatttgctccttgcgtgaacctccgtgtaccaggactttagttgatcctttttcgctgctcacactgagccgcccctacaagccttcaccaggctcaccgtaaacaagagacaccgctattcttacaacttcttcctcttgactccacctgcaatagtgctccaccttttctcttatcaccatagttgtcttgccaagcgaaattggattccttcctagttatcacgtcatagacttcccgaagaccatattcacctccatctactatcttaagtttgacttgatctaatccatggccagataaccgatgtcatcaccaaacagataaatcaaactcaccagacacgaagagaaccctttcttccttgtcgtcttatgaaccgagctaataaatccaacatgcacgcttctccagcattcgtagactgaatacctgataattgagaaaaccatcgttgcttgaatcactgaaagaaattaccaccatagcgctcgccctttctcttcagtgacgcaggtctcatatatctccatcttgcaaacctcgcagattctggatataccctgtactgctaaacataccgttgacgtcctcaatgattttcacccactgttgcccgggacctctcacttgtcctcccacgactgcctttaccgaatcataccaaaacataacacatcattgccttgctagttgctacatgcatcaatctcacatatgtcaaggttctacaagaatcaagcatgttcatagacaaacaagctagcgcgtccttccctgtatacatgaggccacctcagaacagaagcttgtacgtgcatgcatagacatgcatacccgtccaccctcacatgatcacatatttggtactgaccaaactccaatgcaccacgaattaatgttccatgcagcccatagctttttgacgtgcaaacactttgactcaacaagccagccagaagaaaaaaaaccagtctgactagtactccgtcttgcatctgatcaatcaaaaaacaatccttctcgatccaccggcctgacttttcctagtcggactgcagcggctccactagaccgttccacgcacaaccatacatccccatgtgtgtgcgacatcatctcggacagccacgatctgctccaactacttcggcctcgggcccacaccgaaccatctctacattgcttgtgctccgcttggttcacgaattgctgcactacacaaaacaaacactgcctcatcctccgaaatcaatgccgcttccacctggaactgccgtcttcttcaccaaagtcggcctgcctcagaccccgccgacacctgcacgcgaccgcacaaaggccgtgctcctgccgcccggagtttgatgccaccgttgctgctccaccttgagcccgcaaacccactccgactttcgatcaaccaccaatcaatctagccgtgagccgaagccgacaaatcaccatgccatcttcccagccgccgaacgacccgagcgctacgtctagctgtctccttgtcgaacgcagctcatcgaaaggcccggtccaccccacctagagtgttcgatttcaccgatcgagaacggcgaccgcctccagcttcaaccaacccgagcatgcggccgcacgtctccctgttgagactagctcaccggaaagtccgggccacccgcccaaagtgtccgacccaccgattggatcaccaatcgcttccaccaccatcaacccgagcaccacgtctggtcgtctccctattgattgcagcgatcaaacggtttagaccgacgcctgaagtgttcaatccaccgatcaaattccgttgatcgccgccatgctacaccatccatgtccatccctggacatcctgtgcggtcgtcgcagtgtggagcacctccctcgcacctctaccttggatctcccgcaggctctgataccacttgtaataaaaccagtcccgatagcacaccgagaaccaaacgcggaaaaaacgctataggatatccaaacacgatgacgacacgaggtgttagaataggtgtcgaatatactagtcctatttggttacagttggacttggtgttgtaataggtgttaagggtggagttagagtcgaactctgtaactcgcaactctcttaaatagagaggggggcaccactatataaccatggcgactacaatgtagcgtacacacgcagggagatgatggcggcgtggccatggactcgtagcggctaggtgctatattggttggggaggagcacccataatcagagccctggggatgtaggcttcggctgaacctcgttagcaaatatcgtgtgttcctgtgtcgtcatctggtatgtcttgggtgatcaatgactgaagcgatcgggaagattagtcgtcgttctgctatatcaactaacttttctaacaagtggtatcagagcccaaggtttagaacccagtatgatttccatgggtcacagggtgggaaggccaagtaacaagtctttggggtcacatgagttgatgtgatgggggagattgttgggcccgaggccaggtaacaagtcttcggggtcacatgggttatgacagggaagattgttgggcccgatgtgtgacgggggtgattgttgggtttagtctcacatcggaaattgatgatgggggagcacgacttaaaaggtgtgggtggtcctcacccattagactagtcttttgggttgtgtaggcccaggacctaaagttgtggctctggttgggcctgtggtggagcaggcccaatgtgacctgggttggcctacagttggtgggccgggctatacactctaacaagtatcccttacatgcatcgtgcacacctgcgcccaccctggaacatgttacacgcacaagctatgcttgcacacgtatatggaacatgcatacaaggcaacatgcatgtatgtacacgtgtatgctaaattggaaagtggccaacatggatgtacatcaaggttcggttattctatcaatgttgaggcagccatgattggacagcttgcagtacacgattaaacctatgcaaaggacagctactaggcaaagcagatgagggcgctgaaagatcgaggagtccaggatattcccgtgagcgtgttcgacacagtcttggtgtcgtgctaggagaggccgaaggcaactcaatctctggttgttgtgggagtcatcgcactcggctgtcctatccgcgattaatgagaccgactctaattcagttgcatgtgctctttaaaagcatcgccagggtggagttcaggattaatagacgacggacgaaggatcaactcagcaagtcaatggctcatcggtgcggaggcttgaggtggtgtctgagtaggctcggcaagaaaaggaggctcgaggtggtgtctgagtaggctcggccagaaaggcctgtgaacatatccgaaggttcctagtggatagttcattggtctatgtcttagatcggatcacaagacgagactgtgaggacgaatacagacggtacagaatagaagggtgagtattctggtggcaacaggccagtcaggccgcgggtgagtattctggtggcaacaggccagtcaggtcgcgggttggcaagatgacgccgacaggtatgaaatttgatttggtgaaatttgatggctctggaaattttcgcttgtggcagactagggtcaaagattcgttagctcaataaggagtttcaaaggctttgaagggtgtcaaaccggccaagatggaggatgacgattgggaggagatgtagttgcaggcggtctctcatattaggtcatgtaccatgtgatggaggagacctgatgtaggaaggggcggatctgacagcacatgtgaacgttttcaatcaactagtcacagatcttgtgaagatggatgtggaagttgacgatgaagacaaggccatagttcttttgtgttcgttacctgaatcgaatgagcatgtggtgactactttaacgtatggcaaggataccatcaaaactaaatatatcacttctgtgttgctggctcgtgatcagttgagaaagaacaaagagggtgaaacatctcaagcggagggtttgctagtcaaagaagatcatgttgggcgtaaggtaaagaagaacaaaaagaagaagatggtgcagtgcttcagatgtgatgagtgggggcatataagcagggagtgtccaacactaaaggaaaaagcaaaggctaatgcagtgacttcttcaaatgactcagatagtgatggttgtgatcttctcacaatgtcaagtgcacagtctaaggatgtagaagcgttgatattggattcagctagctagtttcatgtgacaccaaggaaggagtggttctcttaatacaagtctggtgattttggttttgtctacttaggggatgacataagttatccggccgtgagagtaggtgaagtcaaaatcaagctagaagatggaggcgaacatattcttcagggagtcaggcatgtagcagggctaaaaaggaatctgatttcgcttggaaccttgcataaagatgggttaatattccacggaaatcggaataggaagaccatggagatcatgatgggcaagacaactgtgatgactggagagaaggtggagtcccaactttacaagctgcgagggtgtattgttgcaggtggagtctatgaggaagcggttgctgggatagcaattgcttttggtggtggcgggtctggcgcagattcatcgggcggcttgcggtgaagctgcaaagaagacaacccaattctagaggacatgtggatcggcatggtgattttactacttctaggtggcgtatattcgccaaggtggagtttgttagaataggtgtcgaatatactagtcctatttgaatacagttggacttggagttgtaatagttgttagggggtggagttagagtcgaattctgtaacccgcaactctcttaaatagagaggggacaccacaatgtaaccatggcgactacaatgtagcgtagacacgcagggaaatgatggtggcgtggccatggactcatagcggctaggtactatattggttggggagggggccccataatcagagccccggggatgaagtcttcggctgaacctcgttaacaaatatcgtgtgttcctgtgttgttatctggcgtgtcttgggtgatcaatgactgaagcgatcaggaaggttagtcgtcattccgctatatcaactaacttttataacacgaggcacaatatttgataacggaattcagccgaggcctatatctctatggcactgattacgggcgctcctccccgatccagcttattacagcatatcagtgttacaacgactcacggccagacgccgctggcaggcgctccctctcgctacgctatgtcgccatgcggttataacaggcacgtccctctagttatgaaagatcctatgacagagtccaactcttactctagtcctatacctagtacaactccaagtcctaaactgtaaccgactatatacacatattcgacacaaactctaacagagtcgaataacagtggtgtcggtcctctccttctctcatgtcgccttccccaactcttcccttccaatggcctctctccctctccctcgtggatctgtcgccggttgtcctcatccctcccctccaccaggcactccccctctctgtcgtggatctatcatcgacagtcattgggaggcggggcacggaggaggaggcgacagccatggaagggctagatccattgatggcggccatggaccctgagctagcgtggcgagagaaggcttcgatctaaatcatgttgtggtaaagcttcaatttgaatcacagctctattttttttatctcgatcccttctctcaagcaaccacaaggaggaatccgttgccattgccagtggccatgggagggtcaaatccatccccggctgtcctcgggaggggcggggagcagtggagagggcgtctgcttcatctccacgacctcgacagtgataatgttgatgaccaagacgtgcttgctgcaacaacggcaggtggggacgtgggcagcggtggcagcggcagtgcgtggacaccaccgtcgaagctaggttttgattttttttttgtatttttcattttttgcacgcgggcaacataactgactgcatgagaaacttgcaattttataaattgaatagaaaaaatgcccatacgttacaacgggtaaaaatatttttggatcactatacattatactccttggttttggccaaaatctcattccttccttccatttcagttccagctcagtccgctatatccgttcgtttggcctgcctctctttggtctagttcacaagtggagctataggcccagctggagtccacaagtggagctataggtccagctggcatagtcgactgtcatcttcaacctccagaagacagtcctctgtctgtatgatgccagaactaatcctctccatcaaatctagttgatctttttccatgtcccaaaattggttgagggcttttgattcactcgatcttctcttttcgtttttatcaaaatcaaagcgaatgcacaaaactcaggacaaaaactgtgaatcttaaatggagattaaatctagtgaattaaagcagaatcgaaagggaaaatcatggggaaaataatgagggagtagtagggaatcgatttgtgaaagggcttgtagtctagtggttacagccttggtagtaccttaggtcctgagttcgactccccataggagcgattttttcaggatttaacggcattgtgctttcagaggtgtctgtggtgacttcgtcaatctcaaggatttgccggcctaatagaggtagggtttgcgtgcgtgcgttgtgagtgtctgtattgtagtgtgtaattaaaaaaaagtaggaaattgatttttgcaattaattggaagagaaaacacttgggaggtagatgacgtggcggcagcgctaggttcggcccgtcaacgaaaaaacagtcagattaaaaaaactgcttgcacacacccttccgcgtgataaaaatcgctacttaataaaatagtgataaaaataaccggaaaaaaggcgagaaaaaaagcgaagtagaaaaaaaaccagaaaatagggatggaaaagaatacccggaagttttatgtattttttattagttatattgatcgataaattacaattttatgggtgtgtttagttatttgggtgtaaagtttttgaagtatacggacgtagatttgaagtattaaacgtatactaataacaaaacaaattacagattccacctgtaaactgcgagacgaatttattaagcctaattaatccgtcattagtaaatgtttaatgtagcatcatattgtcaaatcgtgg

SEQ ID NO: 11643 - DNA, 3931 bp, Oryza sativa
acctgagttagcccatatataattttttatgcttaacacaacaagctaacttgtcaaataggaaatgccaatttatgtgtttcaccctactttggttgattctctgataatgctaagctaactttgttgcagtggtttgaatacataagctgcggagctttcttgctttcttgtttttcttgcttgcaatattagtacacatggtaaacaggaacccaagttcacagttcatgtagttgggattgatcatagaattcactgtagcgaattttatatgattgataatggagtggccgcctggccggtggacactcatgttgcgccgtataaatatcaaatagaaacttacacattctgaagagcgaacaattgttttgaatctttctgacatgtgctaccacttgttttgcagagcaaacatttcctgtccctttactggttggcaaggttggaagacgtccgtttcctgtgcagtgttctatagttcgatgctgcttgtcatcaactgatgccatccattctacaagtgatgacatccatgaagataatggacacggccattttcttatgaagtctacatctgaccttcaggtatgatggtgagtcccatgatatatatatatttttatcctgttatgtttcacctgattcttaattatataatgctgtaaaatacccctttattcatttgcattatttttcttaaaatagtattgtatcatctcgatttttagtacaagtcaatctttactccttgggctaatgtttactgataacatcaaaacatcttttttcttttcagaaagtgatatcttcctgttttgggaaagcatgtcttctcagttctgtcatgcttgttctaccacccagttgtttcgcagaaccgtgtgagccagagtactctctacctaacatgcctttgctttttgcaattgccatgattggagctaccgttggaggtaagatcattacaatatgaagtacagaaatgatggaggcatgtagaaacatgttgtggatagcaaactggatataacattcagccttccagtacacaattttcttatatatctacggcatgatacttattgtgcagaatggtttgaagaagattaaggtaatagaagagagtgagagacaaattggaatgagagaattagaagtattgagatatagcaaattgaagaagagaaatagttattatttcttaaccatcatccttgtattgaggatgttgctatgaacacatagaccatatctccaaatatccattactcaagtctccctgaaggttgttttggcctcttgttagtccctcccatccagccatggtgtcctaaccctcctttttattgtgtttatccccataagtccactgtggtgcgtacaatcctttcactttttgaaaaacacatacctggtacaccaaatgtacattaatgaaaatttcaataaaataattccaaaggagttcatatgtacagtacacaactaaaagctaatactttcaaattaactgttcatatttgattggttgattggttaatatttaaagtacaggcatacccactttacctaatgtttgacatgtaatcccgtatagtacacagaatagaccgattcatatggttatcatttacacacatcctaagttccaaacatccaatcttgttttgtttcttcaatatattgttatttacaattgtaaaaaaaaagcagtaaataacacaactctaggcttgaggcatttcacgacccttagagaaatattaataagtgcatgtgctgagaatgtgaattgtcgctcaccaatgtgggcatatgctaaaaaaaagagtttaatcctattttttaataaaattgcaaaatatgcattatagatgcctcaaagcctcaaaacccagagttttgtgaatttgactgtaaaaaatatcatctatctgtgtgtattctagatgtcttgcctcatatatctttttagcttattgttgcttttattcatttctgatccagtaccagttataaagtcttaaactggaagtgtgatatcatcagattattcaattcgcatgtttccatttatctatgcaactatgtgggccagtatagttggtacatcatactacttcatcctctttaagttggttttactatttcttaatatgttgaaaaatttagatatcctgtagggctccttgcaagacaacggagaggggagcttaaacgattgaatgatcagctacgtcagataaatgcagcactgagaagacaagccaagattgaatcttatgctccttctttgagctatgcaccggttggtagtaagatacctgaatcagaagtcattgttgatccccagaagatcgcttaatttcatatctgagggctgggaagaactatctgagaaaccaagcccctgataaggcatttcctgagtttaaggctgcttttgatcttgcacaatccttgggtgatcacgtcgaagagaagaaggcggcacgtggattaggtttgcttcccatcaataatttactttcatgcctttttccatgcacgtttgaaactggatgttataatagccaccttgattgttgtagaatcccctatagattgctttttttatgaatgaacgtttttgaaatgctcgataatgagacacatgttcatatttatgctgattcctgaaggatcttttttccatgttcaataaaaattcaagaaatgcgacctgcaaaaatgaaaacagcaaacaatctactgatgttcgttttttatttgcattctttaggagcatctttgcagagacaaggcaagtacaaggaagctataaagtaccactccatggtgttgaacatctctaagctgaccggagaggacgcaggtgttacagaagcctacggtgcgatcgccgactgctacactgagcttggtgagctcgagaaagcaggcaagttctacgacaagtacatcgcaagactggagaatgactgaacagatttaaagaaccgtgtgtgcaacctttgagagctcaagtagggctgtgtcccatcttttgccttctttggcctgtcttgtagcaacgtttttgtagtggacgctcagttcatggctgtaactgaggcacatgccatctttcaagttatttctactaaatagtgtcatcagattttttttttctttgtctggtcaagatcggcaccatgttgtgtaaaatttctccatctgttccaagttataagcatggctatgtatctggctatgcttgtcctgaatcaggaatgcttatgttttgaaacagaggggagtagttgtagcagcaggaaggcttgttcttaaccttgttttagataaaaggtttgcaaaaaataatagctttaattgttttagataaaatattcgcttgagattttggggagtgacggatgacaccgttacctatgttatgcagttttttccccctaaaaaatggttataggttttctgtgagtttgaaataattggcctagccaatcatcctttcagcgatacaaattcatcgttctggaaaataataggttatatagctgctagtttatgtcccactaaggatgcttggatttgatatgattttgcccggaaattcttgagcaattcaatcacaatactacatggagattttccaacattgcaacgtcaaacactacatatgaagtcacctaaccgaatttggtttagtataagttataaccaaggacgcatatactgtgcacgccagagaaacttggaggtcaaagatatcttcttatctgttgaatgaacatgtacgcatgtgcatactctaaataaatacggactaaataacacaccttcgtagaaattttgccatcaagggtaaatatttcttgagttcacaaacccacatgacgctttaagtgggccaagggaccatttt

SEQ ID NO: 11644 - DNA, 5115 bp, Oryza sativa
gtgatccactttagtattcatcaaatggaacgcagaaataacatggcagcagatctctcagaaggaaaaaaaaaaagcaagcgctgcatcagccgtcaatgacattcaaaacggtgatcaggtaaactgaagtgtggtcagctacgaggccaacccccaccagaagagcctagctgtcggtacgggtattgtggaacccctcgtgcactgtagtttgtatcctctaaaggtggagcatacttgtccataaccgagcttccagatgcacttggaaccagggcgtacatgtccataactgagcttctttgtgcacttggagccaagaatccaggagcatacttgtccataatgctatatggtgtactcgtaccggggagtccatatgaagatgtttgctgaccatatgtagcacctgaagatccaagggagtattgacttgtctgtaagtaaccatcagcatgtccaacatgcgttcttggatgtgcctgctcatgcaatgttgatgggaccctactggtttgtagataattatcatcaccaacttgtcgactgtaccttgtggggtgtccatgcaaaggtgcatcaccagttgtgctctcaagagaattagtgttcctgtcttctgagcgctgcgtcctataaaacctgtcactatctcttagagattgcaaactgtacacgttgccagttggggcagtgaaatgctgcctgttcacttcgaagtcagtaccagggctgaacttcctggagatatcatcgatattggtatgaaatggaggatcaatcttcccttcaaatgcattgttgcattcattattgcttgctaaatatctgccctgataagtagcctgcttagagacaagatgttcttttggaggataactaataaaactatctcgacctgtactcttatcagcagggtgtccaattggaataaaaggggaaccgcttctggatttgttttgagcattactggagtcagaggatgacatgctcatgtcagagttcgcttgttctgtgaatttggcacccataatctctgatcctctatgagcatttaatctgtctcctgcatctagttgtttttcttggtgagtactcttcttgataggaatagccattctttcctcataagcaacttccacttgtttttctggagggaggctcccatcaacctgatcaggggttcttttcctgctcctgttatgagtgctattgctttcatccatgctatgctctttctcctttcctgattgagagatttgctggtaattagtctcagcttgtttcttcacaggaaggctatcggatctatggtactctttagctttcacttgtccatatccagcttgtgtcttcacaggacgatcatctgatagaataacctctctgacatcgcatgatgtcttctctgtagtctctttctctttgcctggtccaacatttcgtttgttgccagcttcagcctgtctcctcacagggagatctgatagattggtccctttgagattgcatgaagtttgtcctgcattctcctctttccctgatctagagttatgtataccataagattcagtttctttcatcatagggaggttatctgatagattatcttcttcaacatgggaagcgatcctccctatgctagtgtggttatgctcctcagctactttcctgtgcttccttgtccaatcaggatggctccataaatggagaggtggtgcagaggcattccacccttcaactactttatcattaacatcaacagaaccaggcaaataaaatgcctaaattacaagaaaaatgttaggaagaacgggtatatgataaaaaggggaagtttaaacttcaataaattttcctgacggtctttacctttcccgaaagacaatcactatcctcccaaatcaaatcataaggtgtcttcttttgatccaacctgatggccaaagagtggagacagatatggaagtaaggaacatacgttacaccaaaataagtgatattatgtcattatgtgaaagcaatatcaggtgaaatctattttttttaaaaaaaacatagttaaaatccaatcagccccaatttggcccaggcgatcagatgcttcacattaaatactttagatcttcacctgatattttgccatgtgttagtaagacaagttcaactcaattttctaaggaatgggtacgtgttggttacctttttgtttcctttgggacaatcaatataacgagcttaggcttaaaggtcaatgccttgtcaataaatttgttcgcaagagatgctttgactccaaaaggaggattaagccccattatctaatcaagaagcaatcagatgttataattattttaaattagcaaatttgagttaaataatgtccaaattaaacatactagtttggatccatgaggcaattcttttggccgtacagtcatccaatctttcctttcgaaggcgaagcaattctgcaaaacacatacacaatgcatgcttatcagaatgtgcatgatgacctgttaaatgctaatagacttcactttctggctatgataatagagtttggaactggctgagttctaacgcatttgcattgaggagttctatttaatataaaagaaagcaatggcattccaaaggatcataaaactcagattttttttccccagaaggaaaattgaatgaaaaatgattgatggcctccattttacctgcggctggataagatcataattcttgaaatgacacttcttctggactttgtcaagtttttctttcatcaatcggctgaaatcatttgcaccacagcagaagtccactatctacagttaattaaatttaaaatgatcaaggactggtgtaaaacacagcattggactagtaatgttatatatctgtttcagtcaagggataatttttttttaattagaacaatattttcagaccaaagaccatatggtccagcttctattaaaagctgcaaggaacaagtttcttttgcacgggacaccagcttacagtgccgggctgaaagcacagggacctatttggggacaaccatccatacaccattcgaaagacccaacagaagaactcagagataacccagctcgatttttatgagaacagtaaaggtgagccatactcaaatatttatatcaatataaaggtgtacaattatcatatgataccagatacaaacgtatcaaaattgaatattgatatggataaaagctctaatcattccttaaagagcaccaactaagataacctgccaaattagacagatcactactactatagaagtgcaggcactactggtagcttattaggccacagccattttattgtattacactcatcatatggaggatgtaatctaccaatgaataaacatgtgattcttgtactaaaaaatacataccgtgtcaccaggttccacgtagcaatgaagcttatcaacaatctataccaagaaacaagaaaagtaaagttacaactatattacccaatcaagagaaataacacataaacaagaaaattacataaaccacatgctaaaggttatgttagcagaacaccgcagatttattggctaatggcactcatccccaaggtattgcattcggttggttttactatggatcaatgaacgttgtcaacaaatttgtccctgcctccaacaaaatcctactaagcttagctttggttgagacacaaccacatgagacaatggtacagtactacagttgttcaccttgctagcagacatcaatttgaacacaagcatatgctacattttggctctggttaggtctatgaaaatttatgaccacaagccttgtttgggtgcatttagacatgaaatttggggttctctagagctatgaccataaatgtgcagttttttttctcgaaaatgcaagagaactgcgtttcatttcattaaggggaagaaaacaaagcgaagataaatgtgtggttttaagcgatgtattataagaaatcatggaagtatgcatgaggtgatgactgcaagaaatcagagtcaggttttatcatttgtgtttagaagtaatatccttgacaagtttatggtgtccagccaaaattttcctagggaagatccagtttgttcgcacttgtttccttctccttaagtcattgtatgtatagtgaataataagataagtctttataagacatcaacatagcatactgacattcttatttgatgatctacagtgaggataagaggattaggaaaacatgtcaaaaaatctgctccctagccagatggcaaaaaaacatattctacaatgttttttttttaagagcaagggttttcaagattctatatttgaatcaggtatataacacataaaaaaaagcatctattctacaaggaagaaagatgtcatttatgccttgaattggacctttttaaaaaggcaaaaaatcagacaggatttctggtttttctctactttcttaaacctagtctgcaatatttcatttttttttgaggcagaaaacacttctcaacaaattgcacgcaagtgtgtgtgtgtgtgtgtatgtatatgtgtatgtatatgtatatgtatatgtatatgtatatgtatatgtatatgtatatgtatatgtatatgtatatgtatatgtatatgtatatgtatatgtatatgtatatgtatatgtatatgtatatgtatatgtatatgtatatgtatatgtatatgtatatgtatatgtatatgtatgtataaccgcagttaaatgccaatgtggttatcataactcataaagccatcagccatgctagaaaacagatgagaggatatttgtttacaagagccatcacaagatgacacttagattgagactggagactttcttttcaatgaatctctgcatctaacatccggtttgtggtgcctttccaaatagatccggagggttaataggtatatagttacgcatttatatacaactcactatcaacatatatctggattcaagtatacctcaacaagcttttccacctttgtaaaatgccgaccaaacgaactgtagcgagtaccataaatgaaaggtgatatatatact

SEQ ID NO: 11645 - DNA, 566 bp, Oryza sativa
tgatccacacccacacatgggtcaggtagcggccatacaagcggcctttagggacgctggcgtcatacaccggtgcgccacaaatcatggcctgcggatgctggcgggccaaggccaaaaaaacggggatatccgtaacagcatgctggccatcggcgtcgatctgcagcacatggctgtaaccctgcgcgtagacctggcgcatgccggccatcaccgccccccctttgccctggttctgcgccaagcgcagcagttgcacccggggtgcatgctgcgctgccagcgcctgcagcacggccgcacagcgcggctcactgccatcatccaccagcaagcagggcaagcctgcttgcaacacgccctgcaccatcaggccaatggtgtccgggtggttatagacgggaatcaccgcaatgggacgaaagtccatcacagcgtccactccagcaacttgccgctggcgtgcgcaccacgcgctgacgtcagtgcgaattgcaagcaacctttttcggcatgccactgcagttgcaactggaccgtatcgcctggcaagatgggttgct

SEQ ID NO: 11646 - DNA, 1467 bp, Oryza sativa
  unsure (1)..(1467): unsure at all n locations
ttggatttcagcacttttagctccggttcgtgaaggaccagagaagctttctagttatgaatcgggtatagaacccatggggggggcttggttacaattccgaatacgctattacatgtttgcgctagtttttgttgtttttgatgtggaaacggtctttctctacccttgggcaatgagtttcgacgtattgggtatatccgtttttatcgaagctttcattttcgtgcttatcctagttgttggtttagtttatgcatggcgaaaaggagccttggaatggtcttaactgaatattcagacaaaaaaaaaaaagaaggaaaagattccattaagacagttatgagtttgattgagtttcccctacttgaccaaacaagttccaattccgttatttcaactacactaaaagatctttcgaattggtcaagactctctagtttatggccccttctatatggtaccagttgttgtttcattgaatttgcttcattaataggctcacgattcgactttgatcgttatggattggtaccaagatcaagtcctaggcaagcggacctaattttaacagccggtacagtaacaatgaaaatggctccctctttagtgagattatatgagcaaatgcctgaaccaaaatacgtcattgctatgggagcttgtactattactggtggaatgttcagtacggattcctatagtactgttcggggagttgataagttaattcctgtggacgtctacttgccgggttgcccacctaaaccagaggctgttatagatgccctaacaaaacttcgtaagaagatatcgcgagaaatagttgaggatcgaactctatctcaaaagaaaaatcgatgttttactaccagccacaagctttatgttcggcgcagtactaatactggaactatgagcaagaattgctctatcaatcaccatctactttagacatatcttctgaaacttttttcaaatccaaaagtccagtatcttcctacaaattagtgaattaggaggagctnntgtgccgaaaaagaaagagcagggcaatatttcaaacttgcattcgaactgcgaaatatttatacaaaggaggagagatcaagataatgcagcagggttggttatctaattggctagtcaaacatgaggtggttcatagatctttgggcttcgatcatcgaggaatagagactttgcaaataaaagcagaggattgggattccattgctgtcattttatatgtatatggttacaattatttacgttcccaatgtgcttatgacgttgcacccggtggatctttagctagcgtgtatcatcttacgagaatacagtatggtatagataacccagaagaagtatgcataaaagtctttgcccaaaaggataatcctagaatcccatctgtcttctggatttggagaacttccgattttcaagaacgcgaatcttttgata

SEQ ID NO: 11647 - DNA, 4745 bp, Oryza sativa
ttttcttgtgcatcatcctagtagagtatttgtatctaagtcaatatccaaaatttggaaatggggaggggccagtcctatgcattgtacaaagaaagccctatttaataatatttaaatatcgagttaataatcgacattccttgccgatactataataaaaaagaaatgtattccattgaatcttaaacctattaataaaaaaacaggataaatactagagttagggaataaagagggtttggggatagagggacttgaaccctcacgacttagaaagtcgacggattttccttttactagaaatttcattgttgtcagtattgacatgtagaatgggactctctctttatcctcgtccgattaatccgcttttaaaaagatttcgaaaactatgaattgaaggatttgattactcaatattcgattggaatggattcacaacaattctaaaaaaattatgaattttctatttcataatcattcctattttcattttaaaaaagaattaaagaacctatattatgatatgagttctgtgattaatcgtttgctatgccagtatctatacgtgtgtattagatttcgaaagcccttctttccctaatttagaagggagttccgctagcaacacaacgtaattaactcgattcgttagaacagcttccattgagtctctgcacctatccttttcctttgggttctagttcgagaaccgcttgttttctcaaaacatggatttggctcaggattgccccttttttaattccagggtttctctgaatttggaagttgccacttagcaggtttccataccaaggctcaatacaatcaagtccgtagcgtctaccgatttcgccatatccccattttctttttctttgagaccaggattccttgtgcaatttcctccatctgttagttttttttgaatcgttgaattcattactctatgtagtctagcggttcgtctctagttgagagactccgcttattgcaattcagcattgaattgattctatcgttgatgtatttgcaattcaatgcgaatcaatatatcccaaggtttttctctcccccacctaccgcgttccttttttagagtattcaaaatcatactataacgcttgatattcattctttttttttgctaatcagaattagcaatttcatttgctatgattctatgttctccttagtgaaatattaatcattaaattattagcaaataacaaaaaaaaacaaaatatctcaaaaaatgtctataatgatggactgaaaatacaagaaattcgcatgttctctttattatgttttcgtatataatatatattatttattcttttccatgtattagattattcgtccgagccatatcaaattaaaaatatctaaaatcaaattcaatatagaaattggaatagattctattagaaaaatagatttgcgaattagagaaaaaagaaagttcaaaaaaatctatctaactttattttatgaagttctagtatttttttctaagtagaacttccaatttcgaactagttaatagctaagattaataattaagatctgacattttacggatttcctatactatacatatttctatttgttacactatttctgttatgtaagcccacttagctcagaggttagagcatcgcatttgtaatgcgagggtcatcggttcaaatccgatagtcggcttttttctctatcaatgttccatgaacaaaaatacctctttttctccgaattaaatggagaagccaggatctattatgtcgttctaccctacaattttgctagatacaaaacaataaaataaataatatatatacaaaaattcagatgttgatgaaattccatttttttgtggtacttttagtagattttactctgtttatcctttactttaattcagttttaatttcgatgtattctgtaatgtaaatacaatgaaattaattgtgtaaaatgaaatttcaataaaaaaaggagtcttcatgtcccgttatcgaggacctcgttttaaaaaaatacgccgtctgggagctttaccaggactcactagaaaaacacctaaatccggaagtaatctgaaaaagaaattccattctgggaaaaaagaacaatatcgtattcgtcttcaagaaaaacagaaattgcgttttcattatggtctgacagaacgacaattacttagatatgtacatatcgctggaaaagcaaaaagttcaacaggtcaggttttactacaattacttgaaatgcgtttggataatatcctttttcgattaggtatggcttcaaccattcccaaggcccggcaattagttaaccatagacatattttagttaatggtcgtatagtcgatataccaagttttcgttgcaaaccccgagatattattactacgaaggataaccaaagatcaaaacgtctggttcaaaattctattgcttcatccgacccggggaaattgccaaagcatttgacgattgacacattgcaatataaaggactagtaaaaaaaatcctggataggaagtgggtcggtctcaaaataaatgagttgttagttgtagaatattactctcgtcaaacttgaacttaaggaaaaacggaaaggttcatagaattttcttccccttcccctttccccgaactaaatcgacctaaggctcttaattcgtattttcccattcacctaacagaaatggattaaccctaggattcctttttgttttttgttctttcctctatgtgtattttacataccatagtaatttggtatagagaatttctattaaataaaggtattgtattattgctggaataaattgtcatttgatttgatacattgtaatcattaacgttgctgaattaagaaaaacggaaagagagggattcgaaccctcggtaaacaaaagtctacatagcagttccaatgctacgccttgaaccgctcggccatctctcctccataatcttattatggaaaaaaaactgagtgaatagcgagttttcctattcctgcagtacaggtacaaccacaaccgcgcgagagttccattgttctattagatagaaaaattccttttcatctaagtggacgggtccaggatttttttactaggaattccgctccctcgaaaagttttagtttgggttttccccaaaccaaagaaaaagagaatggaagaattcttcttattcgataaaaaaggaaccctagaattctgtttgcataaggtatcctaccccatacaatcaaatagaaaatagggtatgggacgattaatgactttgaaaatgcgaaatagttgatgagagaagttgttgttgagaaaagaaataggaaagtggaatgaaatccaatcttagtcaaatattttctatctcttcttgttcaaacagaaggaaaaagagagaatttgggctgagcagaaatactttcttatccatttgaaccatagggatcgattaataagaattgaatgcattggttttttttttatgttattttgtgaaggaatgaaaagaattctatatagaatgatagaatgggttgggaattatgcctagatcccgtataaatggaaatttcattgataagaccttctcaattgtagccaatattttattgcgaataattccgacaacctccggggaaaaaagggcatttacttattatagagatggtgcgatttgactcttttttttgtttttttagccctacctacaccccggttttacgagaaagagtgggggttcgcggagagaaaaccaaattagtaagggaaacccacgcttagggaaggtgaggtgaactaacaactccttctgtcgtgtatcctcgactgacgcggcctcggatgcttcaattgtagattttagtattgagcgaaaggttacacctacaggataggttctgtattacaggctaatcctactctactagtactaataggtagcataggggataaaagcactacacctagaaataggaatcaacaagagaaaaactttgttagaaattaaccctttcctgattggtatcagggctgggaagaatggttgggataacaaacaaccatcaagtttgtactttggatacccctataaccatcaaagatcgttgaagtggctaattcctctaaataggaggcgttgagaacaaagaaattcttggagctatcgttttcctctagcattaatagaattcattggtgttaagaaaaacctcttgtgggaaggttggctagagatttcttggaaaaataccagcccctttcggtccataatgagatggaactaattctatttttattctctagattttttcgcttagtactatgtacagaagggaggagccgtatgaggtgaaaacctcatgtacggttttggaacggagattttttgaatagaacgaacgaccgtaacggatgttggctcaatccgaaggaaattatgcggaagctttgcaaaattattatgaagctacgcgactagaaattgatccctatgatcgaagttatatactctataacataggccttatacacacaagcaatggagagcatacaaaggctttggaatattatttccgggcactagaacgaaaccccttcttaccacaagcttttaataatatggccgtgatctgtcattacgtgcgactatctccactatagaaagaaaaataagaaaggatcaaattttctagtatttactagaa

SEQ ID NO: 11648 - DNA, 1103 bp, Oryza sativa
tgaagattacgaagcgctttgaatttgaataagaccactctcctttttcagaaaatgggggtttggttgttgatccattaatcaaataaattaggtcggaagatcgaatcaagaatttcattatatctctttcctctgccttctattttatattatatttcataaggataaacgatagggtctagaatagaagtaataaagcgaataaaaaggggcaatataaatattgctaatatatcaggaccatcttattaataattctaatgagttatcttggaatttggaatcgaataaaaaaatctatattatgctcaaggaaagtagatatagatagggacttatactcttaaaaaaaatagactagctttttaattaaaaaaaggtttttttgttacgtggagaaatccaagataaaaaaagtccgttaggcacccaatccttatgtcataatagatccgaacacttgcctcagattgacttcaatatataattgctccagtgaataactaaaaaaaaatagaaggacggtagatagtaaagaaaaggactaatcataatatctatctttcaaaggttcactaaaaagttggcgggtctctttgtatgtcttgtccggaaagaggaggacttaatgatgattcgttcgccggaaccagaagtaaaaattgttgtggatagggatcctgtaaaaacatcttttgaggaatgggccagacccggccatttctcaagaacaatagctaagggccctgatactaccacttggatctggaacctacatgctgatgctcacgatttcgatagtcatacaggtgatttggaggagatctctcgaaaagtctttagtgctcatttcggtcaactctccattatctttctttggttgagtggcatgtacttccatggtgcccgtttttccaattatgaagcatggctaagtgatcctactcacattggacccagtgctcaggtagtttggccaatcgtagggcaagaaatatcgaatggtgatgtaggcgggggtttccgaggaatacaaataacctccggggttttttcagatttggcgagcatccggaataactagtgaattacaactctat

SEQ ID NO: 11649 - DNA, 700 bp, Oryza sativa
ttatatcttctaaatatatagaatagaggaatcccgatttgtcaagtctcatgatcgtatcgaaatggatttaaactcggctcaatcttttttcagattgagccgagtttaattgcaatcaattagaagaaaaaagaagaattactgcattttcttactgatttttgatcttttctatttctcttcttttttatttagaccttttttctatctaattttatccacttagtctagctatctagtttatctaccggctcgaactcgaatttgatcgctttccatatttcacaagctgcggctagttcaggactccatttgcaagctgatcggataatttcattaccttcacgagcaagatcgcgcccttcgttacgagcttgtacacaggcttctaaagccacccgattagctgctgcaccaggtgcattaccccaaggatgtcctaaagttcctccaccaaattgcaatacagaatcatctccaaagatttcggtcagagctggcatatgccaaacatgaataccccctgaagccaccggtataacacctggcatggatacccagtcctgagtgaaaaagataccgcgagcacgatctttttcaataaaatcatcgcgcaataaatcaacaaaacctaaagtcatttcgcgttccccttctaacttacctactactggaccagcgtggatatgatctcccc

SEQ ID NO: 11650 - DNA, 611 bp, Oryza sativa
tcggacggggactgcggcgctctggcggtcggcgagctcgacaagggggtggacggtgacggcggcggtgcggcgaagccggagaatgcgacgctggggcgggaaacggtcccggcgagcggagagagccggccgaaggtcgtcggcgacggaggagagagagggcgacggcgcgagctcgattccggcgtggagaaggtgcggcaaaagggtggaaacgggcgaaggaggtgcggggagggtttaaatggggttggaagggggagagggcggccggggaaggaaggaaaccggccgggaggtccgaccgccatcaatggcgccggcgagatttgcgggagcaaatccagccgtttgaatgcgagagagagagagaggggaaaatggggggaaacggggaggggatcacggggagtaattcccccctattgatttcacgcgggacgacgggaggcggcgggattcacggcggcggcggcgctaggcgcgggcgaggcggcgggagcggcgggaggaaggagatgacgggtgggccccacccgtcagcgagggtggcgggcgggcccacccgtcagcggcgcgcgcgtggggagaggccggatgggccgtga

SEQ ID NO: 11651 - DNA, 689 bp, Oryza sativa
ctttgcgcagtttcataatgttcgttgccaacgatccgaggttgtaacatagttgaggttgaatctaaaggatctactgcaggataaatccctttggaagctaatcctctggaaagtacggtagtagcatccaaatgtgcaaatgttgtagcaggagcagggtcggtcaaatcgtccgcaggtacataaaccgcttggatcgaagttatagatccctttttagtagaagtaattctttcttgcaaagaacccatttctgtactaagagtaggttgataacccactgcagagggcattctccctaataaggcagatacctccgatcctgcttgaacaaaacgaaagatattatcgatgaatagaagcacgtcttgcttattaacatctcggaaatattctgccatagttagggcagtcaaaccaactctcatacgagctcctggcggttcattcatttggccatagactagagctacctttgattcctcaagatttttttcattaattactccagattccttcatttccatataaagatcatttccttcacgagtccgttcccctactccgccaaatacggatacgcccccgtgagctttagcaatattgttgattaattccatgatgagtactgttttacctactccagctcccccaaatagtccgatttttcctccacgccgataagg

SEQ ID NO: 11652 - DNA, 699 bp, Oryza sativa
ggtttaaacaaaaaaagacccaaaatttcaaacatgtatctagaatcacaggaaaactacaaacaaaaatagtgaaaattagctcgttaggaacccatccaagatcgttatagacccaacgaattagtagttcccaaccgcgggtggagtgaaatccaacaaaaaaatcagtaactaaaagaataaaaaaagcttttactgagtcatttaagttatagaagaattcctgaacccaagaattcaaaataacaagttcctctttacccagaaaaaaagaaccacttagaatagccaaacagattatatttgtcgagaaatgcaaaatgatatggagatgaccctcattatctattttggccaattgtattatttccttgcgtattcctataggggggttttgtacatgtgtattcggtttctcttttatcatttcgtccaagataaaaaggtcttctaattccatgaatctttctagaactcttttctcttgaatagcagttaagagagtttgggattgcctggtattccaccaattcttaatccaaagttccagacatttgttaaaagagaaagagactccccaaggcaaaagtacgataaatacaagatataggaaagaaggcaatgctttcttttttttcatttttgatctgtaaattgagttgttaatgaatccgctttattcgctgactctatatg

SEQ ID NO: 11653 - DNA, 744 bp, Oryza sativa
tgcatccacttaatttcaatcaagtcaaaatgaaaaaatccatggagggagagaaaaataatatgagaatagactatagtaaaagaaaaaaagtaaaaggaaaaaaccagcgaatctttcatgcttaaacatgtcgcgaaatgtttcaaaagagcataaaatttattttaagaactaagaataagaaaagaatataaaacaaatggaaaatgtgcgatatgttgggaatagctccgcggaagaaaatctaaagttcttatgtatagaacttttttaaccatgggtcgcttctagtagcgattatgaattgctctcaccgctctttctatttctattttctattctttctatttctattctactatatagaaatagaaatagaaagaatagaaagactctttcttacaagagtttcttacaggagtgaaacaaaattaaagaaagagagaaagaataaagttcggcaaaatgattaatgcaaaacggtcaattaaagaaaagagttgatacaacaattcgactactcaatcaattagtagtatccctagagtccactcctcccccatactactagtgaaagagaaaatgtaaagactaccattaaagcagcccaagcgagacttactatatccatgtaaattatgtctcctatttctatgaaggaattattctactattgatgaataatcatagtagaatcaagggtacagagtcaaaaaggggttctgacctaaggctatggat

SEQ ID NO: 11654 - DNA, 631 bp, Oryza sativa
aagattcaaagggttaggtttttctttttttttctagggtaaaaaattcaaagttctaaaattcaaacaaagagacttattttttccaaaagagtaaattcatagtttaagaaaggaatacggaaatatgaaaataagagcttctgttcgtaaaatttgtacaaaatgtcgactgattcgtaggcgtggacgaattagagtcatttgttccaatccgaagcataaacaaagacaggggtaatctttcgaaaaaagaacttgactttctaaaaagtaaaaaaaaaagtacccgcgaaaatgtccaaattccaaataaaaaaattcaagtaaaggatatattttaccctgaaacggatatctttgtatctttttttctttttgttatttctaactcatatttatgagataataaaatatgacaaaagctataccaaaaattggttcacgtaggaaagtacgtattggtttgcgtaggaatgcgcgttttagtttacggaagagtgcacgtagaataacaaaaggagttattcatgttcaagctagtttcaacaatactattataactgttacagatccgcaaggtcgggtggttttctggtcctccgcgggtacttgtggattcaaaagctca

SEQ ID NO: 11655 - DNA, 522 bp, Oryza sativa
aaatccactatttcgtatacacgaaaaaggtatgatagcagaagtgcaggactgattctccataataggttagatcgcaccaataccaattccttttattccaaggcgaagattcaatcacttagccaacatcaagaagctattggtaccttgttgaatcgaaataaagaataccaatctttgatggttttgtcggcatccaactgttctcgaattggtttttttaagaattcaaaaaatcccaatggggtaaaagaatcgaatcctagaattcctattccaaaattttgggggctctttcgaaatttttcgggactcttaggtactattgcacctagtatatcgaatttttcttcatcttactatttactaacgtataatcagatcctgttaaaaaagcatttgctccttgacaatttgaaacaaaacttcaaagtacttcaaggacttaaacactctttaataaatgaaaatcaaaggacttcaaatttcgatagtaacatcatgtaggatccattccag

SEQ ID NO: 11656 - DNA, 656 bp, Oryza sativa
ttgattgatattgccgtaaagttgaaacttttttaggcttttttattaaactgtaatttcctctctgcaaacgtgctcttctagaagcatatacaataatgcgcggtaaaggagggaaaatagcatactcaatcaagggacaaattcttttacctactacagatctcatactaccccttagactttgtaaggccatataccacccccaaagggtatgaaaataccggatgaccttagcttttcgacgaatcctcgtctcgtgcagcgaagtcctgttagtaagaccccgcgcaaaaatggattatataagaatataattccgaatattcctccgggtgcgtatagtagcattgcgattccgaatcttttttctttgtgaatagaaaaaattcattgtatcgttgggtcggaggtttgctccagaaaaattcggaacaaaacgtctaccgcgttgaagcccatagccccatggagttccgcgaaagtatgattcttatcatcaggagccttttgaacgtctctacgatgggtccagattctatagcagtccaatctgaaatgaaagacttctcgctcttgatcggagtcgtaaactaaaactacctcttcatcaaggttatagaaaacttcgtcatctagttctaccattttgaaaa

SEQ ID NO: 11657 - DNA, 13348 bp, Oryza sativa
gaaaaacatagtgcacttggatgaaaaatggttcaataccacagtcaaggtcaggaggttctacctacgccctgatgaaccaaagccattgaggacagtacataataaaaatgcaatcgacaaggttatgttcttggctgcagttgctaggccaagatatgataatgaaggaaattgcacatttgattggacatgtggccttttgttaagaaggttggcctacactttttgattgtcataactttattgctttaatgttgcatttttattttgcttctactagtagtaacatttttatatttgtcttaaaatactacgaactggcaatgaggaatagtcgcaacaggcctaggggcacaatggtgaaaaaaccaatcattgttgatagagaaacaatcagagaatacttggttacaagagttattccaactattgcagcagcatggcctgaaggaggggggactatttggattcaacaagataatgccaggacacatataacacaagatgatgcagcatttgtcaatgctgtggaacaaacaggacttgatattcgcatcatgcaacaacctcctaactctccagacatgaatgttcttgacctaggtttttttttgcttctatgcaataattgacaatacgaaggaatgctgcaaacatcgatgaactaatatctaatgttgaacaggagtattttgattatgctgtagctaaagctaatcgtgtgttccttacactacagtcatgcatgataggttatgaacactagaggaggcaatgggtatatgattccccacaggaacaaagaaggaatggagcttcatggtgttcttccaactagacttagttttgatcccataatatatgaaagcgcgatgcaaaccttagctcggtgatggatcgtacaatatatgatggtgggatgcaaccatggaatcatattttgggcatgttttatttggaagcattatcaaatgttgtcatgttttggaagaaatctaatgtgtgtgtgcatatgtatttaatggtcatgatctaaatatgaagtttgaatgatgatatgcagttgtgtgctcacatgtataagcaattagtagcggtttagttaacttatgtgttaagtaggtttatgttcatccaagacttaggtggagaagccaactgaatgtgaaattatttaacataaaatttttgtatgccaaaatcaattttagaggctatcttgacgacattgcaaatttgattattactagaaaaatgcccgtgcgttgcaacgggtaaagctattttattattattattattattattattattattattattattattattattattattattattattattattattattattattattattattattattattattattattattattattattattattattatatggtttagttaaggtgaaattcactgtgttaaattcgcttcgatatatattttgttagaaaatcgtgatctgtaattgggagttcgatcgtctcaaattaacatgcgagtttttgaaagagatttctatttgcaaaagcgaacgaatttaaaaaccaactccaatatcgacttgtatttctaaaagcgaacaaatttaaaaaccgactcatacacggatgatataccaaagtgccggcaaaaacatctctaatttttataatagtagagactagatccgtggttcaacttcaagaactgataagactatgctcaattgatgaatggttctttttcagtagtactcctctaaggttaaggtgagacaaagcagagtaatgaaatgagatagctctgttgaattcaaagcatgcaacaaatccatcaaacaggaaacattaagcatgaaaggtcttaattaattaaacaaattgatcaatcatcccatgcttacagagagagaagggcacatatgctactccattttcatttgttacatgttcagaccatccatccacatcatagtagttcagccaaaagagcattccatatttttagccatgatctcctaattagtcacctaacattgctacaaatactactcctactcaatactaatactactgctactaatacttgtactggtagtactactactccgacaatgcatatccttagtgacgtatggtgaagtaggctgggagtaaaagcctcaacataccttcacgaatttcagcaaattcgtcgatgccctcgtcgccagccactgtgtcatcatcatctcctaggatggccatctcctctacatcaatcggctcttcaacgtcatccatctgttgatcgtccaagtcggtgaagaggccgttgttcagctgctgctctccgttaggcaccccagcacccacttgctcttcgaagtcagggacatcgctaccaccttgcagctctgacttggggacgaagtagatgtccttagtgccgagcaccgctccacacggtgccctccaccacccacttgtaactcggagtcgggaggggcgccgccgtcgggatgttgctccacatcggagacgtcactaccatcttgttgctccaactcggtggtgaagtagatgccgtcggcgccaaccacaccaccaccatgccacccgcctcctcgtcaccttccaccacatggatgtggtgagtccacactactttcatcctccgacacaaagaggaacctgttagcaccacccttctctaaatcttggacaaaatcgatctcttttacaaagatggataccttgttcttgcctttgagagacacccaaaacccacgcctccagtattctacttgtcgctgaacgtggtcctctgtagactccacttacgctgcggctttcgccgccgcttccgccaccctccgcttgagtgtgcgccttctggccatgcacgctgtagccatctccaaccgccgccgcgccatctccgaccgccacctcgccatcttcgaccgtcgtgccatctccgactgccgaatcgaagaaccgcagctagaggagggattggggataggggcgacagaggagggattgggatctagtgagaggatggtcggggattggggatgggggcgatgggtgccgagaggagggattggatcaggagttggcgatgggcgatggggggagagatgcgtgcgtgggcgatgggtgggaggccgagcgatgtgatgtgcgtctcctcgggacagtggcgtgtgggtacggactggttgggtggattggtggcgtctgggtccagcctggttgggtggaattattgattcaggggtattatgggtactctagggctaaaaggtacattttgcaagtacaaggttgctatatttgggacaaatctaaaaggctaaaagttgttatattctgggacggagggagtaacatcaaaataataattgcacctgtaaagtgaaccatatacattgtgaaaagtaacactagcttaggatgcaccttataattaaggtctatcacaagcaaaatgaaagtactttttctctcattcacctcgcgagcaagagccgaaactttttctttttattttatgtgggcctatgttgcggctaaattttaaccatagtattgtggaaattgctttaacaatggttcactattcataggtcccactttaaggttacactacaccataaacattgaggttgcccttaatttatcatctaaattattatcttttctcataaggcggaaaaattgacccatctgagagcttattacaagatagaatatgtgccacaagcttattgcaaaaacggactacgaccttagcggttcaacatcccagcacttccgttggcgctaaccgccatggcactatgttcgagtcagcatggcagaaggtcattaccaacttgtacaatgttgaaccccttctcctatcttagcactagttttgtcagaactaaaatcaggaaccttaaatctttctcatactcgtgcctacctatctctcatttggttttcgcaaaccaaattaggacttaggtcgagcaggagcaactccgaaggtgtgttctctatatccgtttatttttcctctagtgtagttattattttctcaatttcgggttgggatgccttgagacacctcgatgcaatggttggattaaagttctttatatatttttcattatgggaatattaaggtttgattgaacaaacatgaacccgatgtcaccttcgccgtgcatttcatgtcatccgtgttgctaaagcgtgtgggaaaaggctactactaggctgtgatgaatcacaccatttgtggcttctttcgcttgtgaagcaaacgggaactggataacagtaaaccatgccccccccacacacacatcccttctttctataaagttatggccaaaagctcaaacctcgtgcttccacgtcatcatcaaattgtgaaccgttggatgaatgtattagattgcttctcagacattggatggaatgcagcatagaggccaacccatcagtcaccctgaacgagtgagtctcttggcctcctcagtgccaaatgtagcccacatgaacacatgagcccatctctacacacatctacttgtatccagtccatcaatctggctataaaagagctttatggctgaacgctccttcagttgacatgtgctacctaaattatctacaaatttttgatagggctgctaaaaagaatttctccaagaaagctatttgttttattctatttcttcttgagattgtacctcttatctaaaaaattgatgttaactaagtcctgcagcaacgcgcagggcatcctatagttatttatatttctgagtgtacttggcagacaaccagcttttaatccaccactgatcaatttagttcctgaaaaatcatgattttaatcctgccgccaaaataaactgtaaccgttccagggaaaggggcatggtacaattttatacctaccttcatttgttaaacataggaaaagatcagaattttccatactcaagttttggggcaatcttgtgtttttaaaatttctcctcttttctccctaaaattataaaataatgtccggggtgtcctatagccaattatacgattttttagtgtccctcagtagtggcacgattttatagtgtcttctagccaattatttgtatgtcctgtggcaattttgcctttaatttggatcccctaaggctactaacgttttcatgaaactactcatgtgaaactatccgtgcacacaccataattactttaggttttgacccctaaacttagttcgaagatggaaaaattattttgtcaaacgtacatcatgtgtttgcaatgtagcggtaattgtcaaaatcatatgtgttcgactatatatgcatcacatatgacatatcttctctttaaattttaaatatacatggtagaaacttatatcaggaagaattacatcttttggctagtgcgcatgattggatgttgcaatctgttgtctcagaactaacataactgcggtggtagggtggggggcttagcaccaaacatcatggcgctgaggttgggaaactcagctctagtcactttgtcattcttaagtaggtcacaagacaaacatctcaagcagggtttcctttaccgattcgaggagggttatgtagccccgcggtaaccgcacgttaaccgccgaaaaccgtgtgaattttgtcagcaaacatttgaattcaaaattttgcgattttgcggtttggtcgcggttaccgcatggtttgacgcgataactgcgatatttgtgcagcaaccatgagttgtgtagctgaatagaacattactaaaaaaattgaaaaaacacttaaatgtgtgtagaaattagggatgattagaagattatataggataattgcaaacctaacatttgcatgtaaaatataaaaatttggacccaagagatattttctcctctattggaccttaatgggccggttgcacagtgcaacttaaggcccgatactttttccttttttcctttttctaaactattatcggttttgcccacaaatttgattttatcatactctttttcaaacaatttcttcaccataagtcactaaaaatcaaggagtccattggctacttatcttcctagtaaatatcatggttgtgatggttgaggtgcatccattatccaagaaggaccgagatcttcttggtcatcttcctcccctcttcttggattccatcaatatcctcgtcactgtcctcctcctctacgggtggcaactgggcagggcgggggcaggttgagttggaatgccccaggccctggccatggagggatgaacagggcaaaaccagtccctgaccccgatcccttcggggccccgcaacccaaccaagaaggctgacgatgaggtttaggcgacgaggtgacatggcaacgacgagggggctcagcgaagaggtggatgtcaagggggtgcaacaacgatgtggcgaatagcaagggggctcggcgacaaggtggatggcgaggggtgcggcgatgatgcgtcggacgacgagggggctcagcgacgaggtggccggcgtcaaggtgcacagggatgaggcagatggtgagggtgcgcagtgaggcagcggatgatgaggggctcgatggatgacaagggccacgggaatgaggcagacggcgaggtggcggtcggcaagggtacatgtggatgagaggttggggatgggggtagggggcggtggtagtagggtagttgcggggtggggtgagggagaaggtggatgaggattagggttagcttttatatatgggtttaatttggcctatattttttaaacgggctattttcacaggagtaactcattccccaaggcccatctgggccacccgcgggtagattatgatccccaaccccgtccccgaaaatttgcggggccccgcctctgctcacccgcgggtaagaattccaccccacctcagccccatagggacgggtccacgtcgggtacccgcccccaacggggaaattgccacccctatcctcctccctctttcgggcatcatatatttcatgtgtacatccatgctaagaatatcgtgactttgccaaaggggcggctgaacatgtacctcggcaatgtctacaatcccatagccaaggcaagctgctaactttcgagcatgcacatactgaagctgaaatgacgatagctatatgtttgggttaaaacatgcgatgagataatttgtgactataagtaacaccatcctggtggcatatggaataatggtttagtacggtaggctctgaatttccatgattaaaccttttgaaccgcataccccaaaaaaggttctgtgcatctgattcttgaaccttttccttgtaatatttgcttctgattttttgtttgtttgtattaagtctgcaatgagtacgaggataagttaaatagtttgtttcttttcaaacatttcaaactgcttcttttggctgcaactgctataaatttttaaaactagctgtacatgtctctatcgagtacggttaatgctatttatgtattgtctcataaaactacatgaccttaattgtttctagtctttgaatcattaatccaagttatctttcttcttccataaagccgaatcattaacaatttgaccccatttgaaaaacatattacaggaatagactacgacaaaaacttattgaaaaaaacggatcgtgacctcaatgctagccctaatggcattgccgtgttggtgcttacctctatgccatcatgttgctatgtctgaattgacatggcaggaggtcagcgccaacctatatgatgctgaccccgacaaaccccttccctttacacacatatcactagcatgcccattgacgctaaagtttgaatgttggaaaagatagtgatagatttatactttgtgatttggtgaattgtgatactaggtatgttagtggggagttcgaatgttgatattcttctgttatttatgattataatgcattggatttgtttggtaaggttgagaggaaaattatactaggaagaaaaataactattgaccaattttgttgaagtgtaggttgcttttcataactttagatgatatttaacctttggaattagtcaaaaatgtaaattattatatgtatttgaattttttttgaagtttgttggttgtactggactcattggattttaccacttgtcaacacctatcgacaaacattccatggtccatgtgttggtgcagtaacacgtgcaaatttatgatgagcgaaaatgatcaaacttactgtgccaaaagttttgggtgtgcgcaaatgacgcatactccctagagaagctaagccacaacggaagaaagggacgtccaagaagccaatggaggttatttcaaacgtaatgaggttatttcatcactatgttttttcatggtggctaatacattgccatatttgaaggtatccaaaccacctccgtttctaggtgactttgcagagtggataggtatagaggtctactcgaatatgttgggcgtctatgcaagcattagctttggttcaaggagcattttgaatggcactatgacgcaacactccgattggaggaagagcaaaaaaaaaaggaagaaggactaagattataaggagagggaagattgtgaggccaaaagagagaggaagcaggtgagggtacacagtgcgaaggaagccagattgaaggctgcaaggaaggatatgtacatgtcgcatgttttaatttgaatcccctaaggcatgtactaatgtttttttatgaagcatctcatgtgaaactatctctgcacacaccatacaccatagttacattcggttttgagcccgaaaccgtagttcgaggttagaacaattatttcgtcaagcatacatcatgtgtttgtaatgtagcggcaattttcaaaatcttgtcctccattacatatgcatcacatatggataccttgtttgtcaatttaaatatatgtggtacaaacttatattaggaagaactatgccttttggatagtgcgcatgatagaaagttagaattcttttttctcaacacctaacttaatagcaatggtagggtgggtacctcaacattgaacaacatggtgctgaggttacgaaactcagctcaagtgacattgcattctttagtaggtcacaagacaaacatctcaagtcaaaaattccatgacgattccacaagcacaaacatatcaagtccacaaattttcgatatttctgcaagcacaaacatgtcaagcccacaccaagtagctgcactaattcaaacacaagtatgagttccggttttgcactaatttaacttaacccccctaacttatcgtttacattgtcgtggtacatcaggagcccattgattagttctcttcctaggacatatcatggttgcgatagctgaggtgcatctattatccatgaagcaccaagctcttattggtcatcttcctccctctcctcccctcttcctaggttccctccacatcttcgtcgttctcctcctcctccatcccttggctgtcttagctttcgggtgtgcatccactcaactaagaagctggtgacattgctggaaggacagcttgaacgtgtacctcggcaatgtctatgatcatgtagccaaggcaagatattaactttttatctatattagacatagttcctttaatacctattgtatttaagaatttacatgcttaagctaaaaggacgatagctatatgttagggttaaaacatgcagtgagataatttgagaccataagtattacttttctggataatttaagatcataagtaatacttttctggtggcatatggaacaatggtttggtttgaaccttttcttataagacttgcttgtgacttttttctttgtactccctccgtcccattataagtgcaaccataagtatccgtgctcaacgtttgaccatctgtcttatttaaaaaatttatgaaaaaattttaaaggttaagtcacgcataaagtactattcatactttatcatctaataacaataaaaatactaatcacaaaaatatttcaaataagacggatggtcaaaattgggcactgaaattcacaactgcgcttattatgggatggagggagtactaagtttgcgacaagtatgaggataagttaaataatttgtttctttttaaccgtgtctaattgctttttttggctgcaacagctataaattaaaaataaccgcatgtacctatctccatcgagtacagtcaatggtgttttcacggtcaaatcagcctataattatgaaaggaggaattgcaggactgctctggcttcaacgacaagtagcaatgagggtggtcagaaagaatggaagaaactatggaatctcaaatgtccaaataagatgaagcacttcttatggctgctcgcacacaatagcttagcattgcgaatgaggttgagtagaaaggggatggaaattgacatgtgtgatatgccaacgttttgatgaggatgggggcatcttttttttttcaaatgcaattaagtaaagaagccgtggagggaagtgaatatggaaggaactcgtctcaaattgtcagagcaaaaatctgcatgggaggtactgaagagtataatggaattggaatacgattcccagttaactgcagtcctactgatgtatacgtggtggcatgagtgaaatcgaatcaaagaaggtgagagcagaagggacgtttctagcctaagcttgatcgtgatgaaacaagcgacgaagtttgctgaattaaaccaagaaacactgaatcaaaatacaagatcaacacagaaatggaggaatcccgatgtggagatgttaaagatcaatgtggatggagcatatacaccacaaacggggaatggtggatggggatatgttattagggatgatgctggctcattgattgaatctggagccggaagaatcacacatctcatggacgctttccactatgaagtcttagctctcagagcaggtatagaagcagcagcacggaaaaggcatgatgagagcaactggaaactgaccattgatgctctggacgagccacaggttggatgcagcaggaggtcttctatataatgcagttttgtgtaaattcgtttaatacttttagctttcatcactgtccccgtagttgtaacaaagtggcacatcctttggctgcttatggttgtaactgttctcagctaactgagatcagttgggacggtattcctcctaaactagaggattttgttgccagcgattctgtcgtaccagtggtataatgcaattcgatgttccactaaaataatgtttctagtctttgaatcattaatcaaattatttctctcctttcataaagttgaatttttaataatttaacccatttagaaaatttattacaccgtggcaaaaacttatctaaaaaatggagtgccacctcaacgccagccctacgttgctaggtccaaactaacgttgtaggagcaagtcatcctcgcatatatggtatataagggcagaatgatcatttcattcataccgctgcatgcgaagatgacttagcatgctcacgtgacactttttgtgggtccaaggactatattaacccaaatgattaatttggaggacctgtttggacgatttgaaacctcaagtactaaattgagcccgaagcgaaacttcagggacaatgttagctattcaccctttattttatgatttttgtcattgaattgagaagcatgagataacatgccagaatacggcttcattcgatctagttcataggttatttgtgcatgattagttgagtgctaattatcataaacttaaaatgatttatttaacttttaaagaaaattttatacaaattttttttcacgaaatgtatcgtttagcaattgagaaagtgtattcacggtaaatgaggaagtggcccatctatataagataagaacacatcttactaactaaaagagtttctgataaatatgtcttgctgaggaggccatacgaacacaataaaatctaatcctgttataccatgttttttcccctcccttttcaatgtgaaaagagaacagaatagcaagcagtgatacaaaattagattttaatcacttcgttgggtttgtactcttgtgtgcttctaaaagttcgacggaagaaaaatatcaacatgtaaggacacgagaatttgaaaaaaatgatcgtaaaaatatttttacgaaaaggatatttaagggtaatgtacatgctaattttgattctccgctgtggcagcttgacactgcataacataaatcactaccaacaagatgagaaaccatgccagacagacagacacatcgattttacaacaactggtgtggttaatcgaactattaatcttaaccctccgaaacattcagggaaaaaaaatatgtacacctgtgtgatgttgtacacccattgatctgtcatgtttaacagcaggttcctgattctaaacatcttacactgtacgcctgtatcccttcttgtaaattgtataattctatagtaaattcagagtttcagttgttccacgtcttctctgtcattccgtgagtgatcatatgcctgcctgttctccatttgctccctggaagtatctgttcttaggccagagcttgcttcttcagtttcagagcagccaggtcgctctgttaggaactgctcccagaacttgtcattcaccactgcagccggggctgcaggagcctcactggctactcgtgcatccgctcgtggtgttgtggcatctgctgtacgagaatcagctgatttcttttggttgtcatcgaagcttctgtcaatggtgtcatccttttccatggtagctgttgctgcctcagttgggttgtctatagtggtcccatttgcattgaggccttggcttttgtcaacatccatcgagcatgatgcaagagttagactcagatggcatgttaagaggccttcatcacttataggtggtgcaaagcaagagctcttggaggggcagatagatgtgccggtatcggagagttccatcatctgcggcaccaacgggagacattccctccccatcatgtcacactctggatgtttaccatgagggcttctgttatcttcgtttgagctttgcgtgcttagcgtgatgatattgctctctgtcatggcaggacaaagtcccaacctaagcttatcagagaagtgctgatttaaaagattgcctgtttcttgcttagaagtgctgctatggtcatcat

SEQ ID NO: 11658 - DNA, 1249 bp, Oryza sativa
ataaaagtgttgactgcatccgtcttttgtcattaaagcataaaggtttcccggtaagttatatttttctaaaaagaaaaatcaaatattgtcaacagagtacgtttcattgatcaatctcttgacaggactgcatgctcctttcaggttgatgtcaatgtagctcgcatagtcacaggctaggatgggtcaaacttcaacccttacccttttctgcagagttccatttagttggcttgtaagattggcctcacccaaatttataaataatgattacaattctctgcttatacatacatatatatttatatatttcccttttggtgaaggtatccaatcatgcgtgatgtgcagaaatatttatggcctcggttgtgtaccatttctaaggaaaaattgtaagtcatttggtcctctaagaaaagtttgtcatacctttggttttcggcatcccatctgatgaacctgatacgataggtatgaactacactgcctcatgataacttttggaaaggtatgcatatatatcgcagtgatcagcatgattctgcatcattttaggcacataaatgtttacattgtcaatattgattgtgtattgtttccattacataggcaatctgcacaaaagtaagtccaaattgcagggcttgccctttcagtgcgaaatgcaaatactacaacagttcacttgccaggtatttttcatagattgtgaagttattgcttaaattgattatcagaatgatctaaaatattgctatggtctgtaacatcctttgttagagcttaagtagtatcctttgcatgatcaaattaatcggtactgtagcatatgttgtaaactctgttaagagcatgttaatgagttgtccctgtgtactctagtctatgtgtatcttcaattgttatttcttttatacggaactatgagcattccataaaatctgcaacacaactaaattgcagaccacccttaggctaaaccaatcacataatgcaactagtgaggttagaagtccccctgaatgttgttatatttgctgcagtgtaataacaagagtagtcttagttatcatagtatatttattatgtctattttagggcataatatgttgcgatttgtagatctttttttatttggtctcatttaaattagagtactgtatcatgacactgggttgttaccagattatcactccctcctgcagaggggcatgggcatgaatatggtgaagagcaagcaagc

SEQ ID NO: 11659 - DNA, 748 bp, Oryza sativa
atctcttcctacctcccttcttccctacttgttctagaagcgccggtgggcacccttgtcgatctcttcctacctcccttctttcctgcttgttctagaagcttctggtgccttctaccacttgcatctatttagttttccctcttccaactctcccaaaatatactaacttgcactggtagattaccaattgagttggtgttaagattgctgattgggttgctaacagcatgcaggatgaatataatatttacgacaataacttaagtttctgaagcgacaaatcaagctcatccttgtgctgctgctttccacagtagaattcggtggggtgcagaacacgtccgggcgggcagaaggcacagccgccattagcggcggcggtggtgagatcggcatcggccggccgctgctggagcacggtgcatgtgtcgacgaagaagctgtgtacgtagggggtgaagcggatcgagctcagcgaaaaccaggcccgatggtcacgcccgcaccgacagcttcgctgctgcctgccatgtccggcctcctctccttcgcctcgtgcccttcctagccttcccttcccgcgccgagaaccgccgccgctcccaggccgcgcctccgcatcgcaggctccgccgccgtgtcccaccgggcatcttcctcctccagagatcgcctccgctagctcgtccgccatggggagctcgacaaggcgctccggctcgtcgggtgcgcgcggaggcctgat

SEQ ID NO: 11660 - DNA, 1045 bp, Oryza sativa
acttcccgttcaaaaaactttaccttttacctgccctcaatttatgcacaattaatgaatgccacctgggtggaagcgagaggtggaaatggaaggtcttatttcggaggtggaatctctacctgatagttgcattgccattcatgatgatcccttggcattcgtccattcagccattcaccattcacccattcaactggaattttggttgaatgccggaattgtgtccacaaattgtggatggatagttggttggctggctggatggctggctggatggctggctggatggatggtgaatggctggcggcggttcggttgctttgaaccatttgttgctatctaaattccatttaaggcggtcccttatcgcccagcatcatcttattctctatttgtattccctccatctttcagatacggatgtagccttggatgtgcccgtgcccaatgaagaggaagagcgcaacatgaaacgtaagtacaaaagtaccggacacccacccagatcccaatagaatccgccaaatcctgcgggaaattgtaatcccattcaccagctcctacatttaattaacaagagaactattgtatttatctaacacctggattatctccacctttcatttgatccctatttatagattacgctgcgttgctaacgggccgcacctcctatttcctcaagggtgaggaaatgaagtccatgtacaccacctacaatccgcagaatgtggtggccaccgcccgtttcctgttccacaagaagaatctatactactccttctacacctcatcgcgaatcggtcgtccgcgtgccattcaattcgttgatgatgcgggtgtaatcctggaggagcatcaactggagacaccttggcgggcactctcagtgtctatcagaatgccacgggcaagatctgcggtgtctggcgacgagttccacgtgattacaagcgcatcctgcgcgacgatcgtctccatgttgtcctcctctggggcaacaaacagcaggccgagttggctctggccggaaaggggccaa

SEQ ID NO: 11661 - DNA, 8796 bp, Oryza sativa
  unsure (1)..(8796): unsure at all n locations
ccccccccccccccccctccctccaaataaccggtcagcccatcactccgtcacagttcacagcctcagaggcccagatcacaaccacaccacgcacacgtacttgcagtgcagttgcagcgcgagcgaagcgagcggccatggcgttccggctcagcaacaacgtgatcggggcgctcaacctggtgacgctgctgctctccgctcccatcctcagcggcgggatctggatggccacccgcggcgacggcggcgagtgcgaccgccacctctcctcgccggccatcgcgctgggggcggtcctcatggccgtctccctcgcgggcctcgtcggcgcgtgctgccgcgtcacctggctactctgggtctacctcctcgccatgttcgccctcatcgtcgccctcctcggcttcaccgccttcgcctttgccgtcaccaaccgtggcgccggcgaggccgtctccggccgcgggtacagggagtaccgcctcggggactactccacgtggctgcggcgccacgtggggagcaccaagaactggnacaagatcaggagctgcctcgccggcgccgacgtttgcaggagcctgcaggacaggaacgagacgtgggcgcagttcgtcgccgacgacctctccccggtccagtccggctgctgcaaaccgcccacgagctgcaacttcacgtacggcggcggcacgcggtggggcaagacggcgaggctgagctccgccgacccggactgcgacgagtggagcaacgacgccgacgaggtctgctacggctgccggtcgtgcaaggccggcgtggtggccgcgctcaagagggactggaagcgcgtggccatcgtcaacgtcgtcttcctcgccttcatcgtcgtcgtctactccgtcgggtgctgcgcgttcaagaacagccggcgcgacagtgtccaccgccgcagcggcgggtggaagcaggccggatacgcctagcggtttcaaaagtttgagtacgagcagtaacataactacttgttaattaggaatagtaatatagtagtagtattagtttctgatgcttctgctgacgctatatatgttcgtactagtcttctgacaccgtgtttagctcaggatggcgtgttactagagttgctggtattagtgttttatctatccaacactgtagtttgtacatgggatgagcatattatgagttaacgatcacatgatattagtatatttattgtctatctttatgaccagagttaggctatactatcatcgaagtcacttccttatgagaaaatccattatattgctctgagtttgttataggtatatgatttgccactgattttctcatgttctacaatatgatatcgacttttacgtaacttctacaatttactatcgccttccggttagccttcattagtaatgtacatttttgtccaaacgacaaaaatctccttgggacaagaacttccaaaatttgaaaaataattcagaaatattatattataaacataagattgtaaacatcaaattttttttgccaaaatttggttaaaaatttcaaaatatcaaattttaagttttttgccaaaatttatatgtttacaatcttatgtttataatatgatatttcaggatttttgtccaaattttgaagttcttgttctagggatattttgatcatttagataaaaatgtacagtactagcgaaggttaaccggatgacgatggtaaatcgtagaaattaagtaaaagtcaatgacatattgtagaacatgacaaaatcagtgggaaatcataaacttgttgtaaactcagtggcatataatggattctctctatctttaaagaaagaaatgtgtctgtatactactccttgcctccttggtatacgtgttttaatacagtgctctaatgggtgtgtttggttccctgcatcgcacctggctcgcatccacgggtgcaggcctgtggtgtttggttgcctgcacggccactctagcctggctccacgcgtgcaaatcgggcttccgagccaggcccgagagaaacggtcgatctgagattcgctcctcatccgggctgagcacgtgcaggcgggggacgcgtgggtgcaagctcggggacgcgcaggtgcaggaggcgagaggggttccagcttctgctcaccttcccatctcatttgtcgctcggtgcctcccgtctccatcgccgcaccgtcgtcgtcatctccatcatcgtgccatattcgacaaagccatcgaagcttcctcaaccagaaccgctagagctcctcccctcaaagccgccgccgccgccaaatccagctccgcttgaagccatcgaagtcgaatccggctcctaccaaagctaccacttgctctccttcatccgaatccagatgtgacgacgagagagggttgtcactgctgacgcccggatcttcctcctagtcgccgctgtcaccgccaccatcgccactgccttcgtctacagctgctgcatcgggccctcttcctctcccttctttcgtcagatccagagcccaggagctcgatctagtggcctcaggcttctggttgccggatccggacgcttcctctcccttcttccatcagatccagagcccaggagctcgatctggtggcctcaggcttccggatccgaatgcttcctctcccttcttccgtcagatccagagcccaggagctcgatctggtggcctcaggcttctgattgccggatccggacgcactgatggcggcgaatcgtcaggatcccgctactgccggatctacgccctgccaccgcggcgtagttggctgtctcggcgacgaggccacagtcacctgccctctttttccttttatttatttgctgttttttctcaccgcttggatgaattaattgaacataacaaagttgatgcaatactgtagcacccgatatggttcatatactattttattcgtcagtgcaagaaatccaatgacttgattttatatacagtgatacactgactaatacaatcctatgcatatttcgcatatgttaaaaatcgatatcatatactgtaaaaagatcagcgttgagatgatagaaaatttcatccattagttatagatggtaatcttaccctcaaagaaaggaggtatccaaacctccgatctatacaacgaaccaaacaaaatctcgttgaagtcgtatttctcatgcaagcaatcaaacagaatctcacaccaaccaagctaaactcatacaaacaaccaaacagctacatatgtatcccctcaaccagatcaaactcagccaggatgggagagatgggccaggctagatggatacgagcaaccaaacacacccaatgtgtctgtatcatctgttccttcagaggcttcccagttcccacctagtatgcatacagtgctctattgtcgccttggtacgtgttttaacgcggcggctgattgtcgttgatcccagtacgagaatgaggtatccgtagttattgtattgtttgtcaccaacgcggatagactaatagtgggccagcagcattcattgtgctgtgtttagattcttaactttttttttcttcaaactttcaactttttcgtcacatcaaatgtttagacacatgtataaagcatcaaatatggacaaaaagaaaaactaattgcacagtccaactgtaaattacgagacgaatcttttgagcctaattacgtcatgattagccataagtgctacagtaacacatgtgctaatgacgaattaattaggcttaaaagattcgtctcgcagcttacatgcggaatctgtaatttattttgttattagtctacatttaatacttcaaatgtgtatccatatacgtcaaaaaaaaaattgacaatgaactaaacacggcctatctcaatctaaagattcaagtttgcttaacttttcttgattaggaataggctaggctttattttagagctttataccaccttccacgaaaggattggcactttcgttttggcacagccatatacgaattactaagaagagttaattggatccatgccactgcaaatataacattagatccatgccactgccatccagttttctgtcaatctccgtcagctctctccctcttcctctccttgcttctcctccaccttggcgaccggcacgacgcacacgatggcgcgcgaggtgcgacatccaggggcggacgccgaggcggagctcaccgtcgaggaagcggcggcccatgcctactccaaggagcccacggcgagcctcccacctacctccccaccacgtggcctacctacctccccacctcgtacgttggtgatggcaaccggcctcgcggctcacttccagtccgtccccattggcgatgccggcgccgacgcccacgctactgctgccgcacttcaccctcccaccgctcgccggcgaggacctcacctcctcttcgtaaccgccctccatggccacctctccaccatgctgtcgcccgcctcccgcctccctctcccgcttcctcccccagctcaccccactccgcctctcccgcctcatcctccacctcacgccctcgccccgccacgacgatggccacctccttgactccctcctgcaccacgccttccagacctcctccagcacgtcctcctcaccgcccgccttgccgttgttcgctccaatggcgccagtggtggcgtgcagcagcggtagaagttcttcgtctgcgtgcaggggaagaagctctccttggccatgctcgccttctgcgtcatgcacacccacggcctgctcccttgcgtcgagtcctgcaacgtcttcatcttcaccgcgctcggcctcaggctccccaagatcgccgagcctcgcaccaacgcacagcacccatccaaccatcgcctcccaggcagacaccccaccgtagcttcatcgccactgctgccaacgcccatctcgtctccccgccgagagagagaggaagagagatggaaggagaaggggggcaaagtgacatttcacaggtgagattagacagagattgacaaaaaaaaaactagacgggagtggcatggttccaatttccccaaatttcagtggcacgtagccgatatagcaaatagtagtgatatttttctaatatgccatatttgcagcggcaaggagcttatgcaaacatatgaatgatcgctccagaaacattttgtccctcaacattcaccttaactaaaagatccgttacacacatgcgccgaacattactgatgaacatgttcgaaaagggtacacagagtgcttcagatgttcaagatggacagagtcttacatagtagtagtaggtggctaggcaaagattagtttgatcttgctttggatatcaaactgatactgaaccctaggttccagtagttgcagtaacactgaacgccagacccgaaggccacctcaatcttcgtctctctcaggaggcagaccacacggaagtagcattttctgcaacaccagaaaaatgaatcatatataaatttgcaccgtactatcacattgaaatgactgcatatttaaaaatggccacccgtgcaatgatgaccatgatcacccatgtacagctatttaaaaagtgaccatctctaatgatggtatctatgatagttagaacacttcaagcttgctgaatcagaagagaaccaaacaatatgtacttggaaaagccattggagctcatatggtagcaaatggcaatgcaatagcttatccttttacattaattgagcacaaaaaagaaagattacaaagcttggctaaaagtccacagccctaaaattttagctgcaattttcttgttagatattcagttgtgccctagcatattttcttagccaatgctgtcgcagtacaaaactgaactatagatagtcatataaccataaaaacaacggactgctaacaaacatgccaaatatgtaaaatcatcattaagacaaagatctccgcatttccttgcccataccatatagcatataagctggatcctattcaatagtaggtgaataaataaaataaagccataaatcctgatttgcatcaaacattcagccttaagggctaagaccaaagggaacacttaaagctatattatcaggaagttaacgaaatatgttctgaatatatttcatcattaaataagataagaaattaactttttcaccacaacttttgcttaggtaaaaattaacttggacaatcaaagccactacaagtttgaggacagaagatagaagttgaaatgtacaggttatctcatttaagatgtcagcgctttttaaccgactagctatttgcccatgttgcttaggtaaaaattaacttggacaaccaaaaccactaaaagtttgaggacagaagatagaagttgaaatgtacagattatctcatttaagatgtcagcgctttttaacagactagctatttgcccatgtgttgcaacggatggaaaataaatatagtataagatctaagttaaaacacaaaaataatctaaaaaatgtatattatcatcgcataaattttttttagcactacattcgtacatgcatagatcctacacacaaatccaaggagacccatgtctatcgctggtccttgcgcagttgcgccagaaaaccattgattcagtttgacatgtggcaacacggttcagtgattataccaactttggttgtctacctgtatgattgtctctgcaagtggaatagttgaactcaagtgtaatgatgctatattttgatgagctaccacagaccagatgcaatacatgtccaagaaaacgattttctttcatttttttcctattttaggagcagttctacatcaatattaataaaccagataagtccaacataattttcaactaccgtacagaagacatgttataataagcttttaacatacctgcataaaattgtaacgctctcttccaattgattcattctcagcaatggaaaaatatgccagcattggatagtgcccaatataggatgcatagctatccctttggatgtttactgcccattcactgcaataaaagaaatcctcaatactaagttactacattcccaacaacacatttttgtttattttggaaaaagatatacttacaatcgattcaagtcagcatgccctgtgcccacatatttcgcttgaagatgctcaagttgagaatttatgttgaacctgtcgctagcctttaaagaagatgatttatcatatcaacatcatggtcaaaatacaaaaggatattaccaaagttcattgaaaaggtacaacatatttaaactgaataaagcttaatgcaaaaacaaaacaaaccctagcaatattcagtagagatctccaaaatcagtaaatgaatggaaaatgaacatcaaggtatctgatctgaagtatacaatagcaggtgagctctaagactatcacatgacagataaggacctaaccaatggtaataatacgaaaatgaaaagataatgtaaatatcaaatatctagaaattttgattgcttgacagaggtattatcgtcttcaagtgaactactatgtcaaatacttatattgaaaatatcaatcaatcaaagaagtagaccatacagaacacagtctgttctcacaagcagactgatagatccaattggtcctatcacaagtattgacttcatgttaacatcaatttcccaaaagtaaaaaaccttagtatgcccattccaaattgtcctaagagggaatcactaacctgaacacataactcagttttgaatcactaaaagtatatgatgccacgtagcagggtgtgcacacccctgtaaattgataacaaaccagaggctataattactaccgaaaaactcaatacaaaagcagtcccagataattgatgattcaagatcaaaaaggaaaaaacatctattcaaacgtgaactcaagtgttccagcaccaaatacatcatattccaaacagatctgcatcagttgggcagcacaaaaaagaaaagaaaaccacagtagtgagtagcatggtgatatgggtcagagacaactaacctgcatgatggctgacgggtttggtcttgatcctggacaggatagttgagatccctggagtcagaaccaagctaaaattaagagaacacaagcatgaattagggcatattccacagtaaacctcagtcacaaaacaattggtatggggcacaatccatatgaaaaacaaataccaaaagcacacaattgatacagatatgcaaataagaaaataaaaagttaagaggcagaaagtgcaaaactgaactatggcaaacagtatgccagcaattttacacttgccgatggaactggcacatgtgggatccatgattgccattcactcactcactcacaccaagcttgactcaataagaaattcgatgtgatcatcatgcagtgctcatcaaacttcttacaactatgtacagtattatcttttaaaataagtagtgtgcaccataaaaacactattactaactaggtcgtccttctcacaacaactaatcactgaggatatttcttcatcagacagcaacgaaatatagaagtgtactgaaaggaaaaggttttttttatataggcatagacattctagttgtttcattatgcttaggaggacactaataaagcagaactttccatctctcatatccaacacatcatttgtttgccgtacatacaaaacagggaaaggatcag

SEQ ID NO: 11662 - DNA, 8084 bp, Oryza sativa
gtggggggagagagagataggggtgggatttgaaatcgaatcccgccctctcgagcgcgcgcacgggccgggagatgtggggaaggtgggcggcgacgcgggcgcggagtggggcgcgaagaggggcggagaaggcgggcggcgtggggaggtggggcgccggcggttggggctcggctccaaccggctagaggaggaagacgaccgacaggtgggccccacctgtcggcgcccgaaggagagagggagggagggaggacttcggggaggggagaaggaacgggccggccccaggaaaggggcgccgagcgcggggagagagatgggccgacggcccatctagagaaaaaggaaggaaaagaaaagaaaaagaggggaaggattttcctgggattaaaattgcactttggtgatttttaattggttaaaattatttccaaggctctgaaaattccactaaaaatcttgttaatgcattggagcatggggaactcaagaaaaattccaccacgccgaattcaattattaattgcatttattaattagggaattagctctaggttaaataagataatttcttcggacgatttatttagccaatttttaaatcaaggagagggggaaacttcagggtgtgacacacagccaacctgtcttgcagctcacgagagtacatgcatcttcacttagagagggtatagattggtactctcctctagtttactaatgatttgttcttcccaggttctaattcacgggatctccgatcacatagactgggttaccaccatagtataactcacatgggtctcaaacccatctccttcgatgcattatctatcacatttcgtgatagtcccttcgtgaagggatctgccaggtttctagctgtttggatgtaatccaacgttataactccagagtttctcaatttcctgacagacttcaatcgtcttttcacatgtctagacgatttcatattatccttagaactatttactttgacaattaccgtttgattgtcatagttcataaggatagccggcaccggtttttcaacaataggcagatccattaatagatcacgcagccattctgcctcaacagtagcagtatccagtgccgtcagttctgcttccatagttgacctcgtcaaaatggtctgtttgcaagacctccacgaaacagcaccaccacccagtatgaagacatatccactagtggctttgatctcatccacatcagagatccagttagaatcactataaccctccagtaccgcaggatacccagtatagtgaagccccaattccatattacctttcagatagcgcattactcgctcaagcgcacgccagtgatcatctcccggattagaggtaaaccggctcaacttgctcacagcaaaggagatatcagacctagttgcactagccaggtacatcagcgagccaatgatttgggagtattccagttgattcctagcaattcttttgttcttgcgaagcaacaagctaggatcataaggtgttagagaaggcttactatcactgtagccaaagcgattcaagatcttctccacataatgggactgcaagagtgtaatctcattctcacctctaattagcttaatgtttaagataacatcagctacacccaaatccttcatatcaaaattttgagacaagaatgatttaacctcatttatcacctcaaggtttgtcccaaatatcagtatgtcatcaacatacaagcacagaataactccctcacccccaccatggcgatagtacacacatttatctgcctcattgactgcaaagccggcagatgtcaatgttttgtcaaatttctcatgccattgcttaggagcttgtttcagaccatacaaagacttcaacaatttgcacactttgccttcttgaccttcaactacaaacccatcaggttgatccatatagatctcctcatccagctctccattaagaaaagctgtcttaacgtccatttgatgaacgagaagaccatgtgaggctgctagggaaagtagcacacaaaatatgatcaatcgagcaacaggtgagtaagtgtcaaagaaatcttcgccttctttctgagtatagcccttagcaacaagccgagccttgtacttttcaatagtaccctcaggcctaagcttcttcttgaacacccactttcaccccaggggtttacacccatagggtcgctctgtcacctcccaagtcccattagcgataatggaatccatttcactacggacagcctccttccagtagtctgcatcaggagatgcatatgcttctgaaattgacttaggagtgtcatccatgaggtacacagtgaaatcaccaccaaaggacttagccgtcatttgtctcttacttcttcgaggagcttcactgacatcctcctcagagacatgttcatgtgtatgttcagtttgttctggtggtgtgattgaactgggaattatttcagaaggttggctcgaaccactatgtgtatccttcattgggaaaaagctctcaaagaaggtagcatcacgagactccataattgtaccaacatgcatgtcaggtacctcggatttaactattaaaaatctataggcaatgctgtgatgatcatatcccagaaagacacagtccacagtcttaggtccaagtttgcgctttttcgttattggtacattgactttcgccaagcacccccatgtgcgcaaataagaaagtgatggttttctcccaatccatatctcatatggtattttgtccttatttctgttaggaactctgtttaacacatgattcgaggtcaacaatgcctctccccaccatgcgttaggtagtcccgcggtgtccaacatggcattcaccaagtcagtcagtgtgcggttcttcctttcagcaatcccattagactcgggagaatagggaggcgtcctctcatgtatgatgccatgttcctcacagaataagtcaaactcgttcgagaaaaactctccaccatgatcagacctaagcctttttatttttctgtcaagttgattttcaacttctgccttataaattttaaaatagtctagagcctcgtctttcgttttcaacaagtacacatagcaaaatctagtagcatcatcaatcaacgtcataaaatatcgttttccacccttcgtcaacaccccattcatttcacaaagatctgaatgtaggagttctagtggtgccaagtttctctcctcggcagccttgtgaggcttgagagattgctttgattgcacacaactatggcacttagaacctttgacaatggaaaacataggaattaaacacatgctggaaagccgagacatcaagccaaaattaatatgacataaacgtgagtgccaaacattagcctcatcatccacactggcacaaatatagttcacagacttattgcagaaatcagaaagggaaaagcggaacaggcctccgcactcataacctttaccaataaaatatccatgtttagacacgactactttattagactcaaaaactaacttaaatccgtctctagtcagacgggagccactaacaagattcctgtcgatagaagggacatgttgcacgttcttcagctgcacgatctttcccgaagtaaacttcagatctaccgtgccaactacatgaacagaagcatgtgatccattccccattaggacggtggaaccccgtgcgacctgataagaagaaaacaatgagatgtcagcacaaacatgtacattggccccagtatcaacccaccaattagtagactgattaactgaaaaaatagtaggtaaattaccatacccgcttccatctccagtgttgccaatggtcacattagcagacttagaagtctgccctgcaggtgccttcatccccttgcgttgtggacacttcctagccagatgaccaggttgcccacacacaaagcaagtcctctcatcctggttaggattgttgttgttcttcttctgcttcttgaagttggtggtctgttgagctttgtatttccccttgctcttgttctggaccttgtgcacaacattggcactggactgcccaccatcgcccttagacgcggcgtctttttcccgagctttctcctcaacatcaagagacgctatcaacccctcaacggagtattcctgtctcttgtgtttgagtgcagtaccgaaacttctccatgatggaggtagtttcgcaataatgcacccggccacaaatttgtcgggtaagacacacttaaggagttcgagttccttagccatggtttgtatctcatgagcctgttcgactacagaacggttgtcagccatcttgtagtcatgaaactgctccatgatatacagatcattgctagcatcagtagcaccgaatttagtattcagtgcatcccacaactccttagcgtcggtcatatgcatatacaccttgaccagacgatcgccaagaacgctaagaatgcatcccacaaagagagtagtggcttcctcaaattgcttctggtgatcagcagtaagaattccttcaggtttgccagtactcacccagaagcatttcataaccatcagccacagagtgaccctgatctgccatctcttaaagtgcacaccggtgaatttattcggcctcagtgcatcggcaaaaccagccatagtaaaatcacagcgcctataataaggtttttggattgttaaaattataaacacataatgatttaacttattccataaataaattatgacattgcagatgtaaactagattgaacgcatcattagatctacacatgtaaactaagcagtaaaatatgaacatatcaaatatgcgcaacatgtcgaacacgtaccgaggtggtggaaagaccggttgctcggcaggaactactcgcggttgcgagcgtcgacgaaggcgcgaagcacgcgagcggagaggaaggcgagccgtcgcggacgaacagggagcagtcgcgcgaagcgcttcccaaaaaccttattgccgtcttctcccggtgcaggacgtcgaaggcagaggttccggagacctgctatcccgatcaccggtgcacgtcggcgagcgggatagagtagtctacgagcgacggcgcagtacagagtaggaggtaaaccctagattgatttcgcgtgtgttgcgtgaaggcggcggctcggtttatatagagatagatcgcctgatcagggcgcccgcgtaaaccgaaccggataagtcgcgcgtaacctatccggactccatgccgttttcacgcaccggatttttcggaatgtttccaaaataaaacaaatccgaatttcccgtagcaaaacaaaactgcaaaaggcaaaacaaaacaaatccgaatttcccgcagcaaaacaaaactgcaaaaggacgttttcacgcaccggatttttcggaatgtttccaaaataaaacaaatccgaatttcccgtagcaaaacaaaactgcaaaaggcaaaacaaaacaaatccgaatttcccgcagcaaaacaaaactgcaaaaggaggctgcatctgcgcaagggtgaggaaccaattttccgcctaccagacatggcgagcaagcgcatgtttcccctcttctctccaccacacatgcttcaagtagctaggagggcatcctccctttttaggaggtccccctctcctagaataagcaaggtggtactaaactccacatgcatgccatcttatgaggtgggcttttgtgattttctaaagaattaatcttcaaatgggccttagcccatctattaattccaacagaaaatataacaaatcatacaaggacagcctcatcctcaaaaccattaattcgatttatctagctaacattacaactgcaattaggctaacacaaccgtgtgaaatttccagtgctgattgagcacaaagcatgcggccggggcaccatgcatgcaacgacgaccattccaatctctacaacctgaacacacttacacacgacacccatgttgaactagaagcaagcattctcagcgacaggaaccacactagtgactagtgagccaacaagaaggtggaatgggaagcatgcccggatccggcgaagcgaagaaggccggaccagaaaattgagagaacggctgcggaggcttcaccatcgtcgtcgtctggcttgtggagttgttcttgccgctgccgacagcgtctttcttggggcgaggcttcttgttgatgtcccagcgctcggccgacgacgcgcggctcagcggccgcttgttgctgtcccatcgctcgacggagtccgcgcggcaggggctcctgctgctgccggtcgacgacgcagggctgcctggtgtcttgtgcgcgtcccagcgttcgtaggagtcggcgcggccggggctgatcccgcccctggccctcgacgacgacgacgctgccgagccgccggctttcttgttcttgtgcgcgtcccaacgctcgcaggagtcggcgcggcagggaagcccgctgctggagctagacgatgacgatgacgctgccgaactgccggcttccttgcgcgcgtcccacctctcgacggcgtcggcgcggccgggcttgggatcggaggccggcggagcgcggaaggaggcggggaggatgatgaggcacggcgtcgggagcagaggcagcatctggctcctcggcggggtcgggagcagcgccggaaaattgctcgccggcggggtcgggcgcagcgcagggagaaccgctgccgccatggctagctgcgcgaggtgtcacgaggggagagaccgatcgatcgggtgactctgatcaagcaattaaccggagaggagacgagagagcgcgctgcggagtggaatcacacgacgaattgatcggctgccacctcgaggcgcccaccttatatcatcgcaaatcaattcgactccagttctgattcggagttcgcagatcgcacccgccgaaataccacagaagaggtgaacccgcgcgactgagattcggattgcagactaatgggccgggctttccaattcgtggcgctgtggaatcaggctcattttcgtacaggcctctcctttgagaggccgtagtttagcccagcccgtgctcggccacatttcgccacagcagcggcagagtcgcggcgcgagagctaattcgctcctccccacgccacgccttttttggcctttttttttttttttgctttttttccctttttttctgattacgtttcttaatctttagcacacatgttttttaaaaatattttgatttgaaagttttaaatcttgacttaaaattttttcaaatcttaacttaaaaatttttaaatctcgagttgaaaagtttttaaatctgagttgaaagttttcaaatctcgagttgaatgttttcaaatctgggttgaaagttttcaaatatcgagatgaaaatttttcaaatctgagtgaaagttttcaaatatgggttgaaagtatttcaaatttgagatgaaaagttaaaagtttttaaaatttgacttaaaattttaaatttcgagttaaaaggtttcaaatatgggtttaaaattttaaaaattcaacttcagttataaatttcttttcaatttgttattaaaaaaaattgcgaaaaagaaaatcctaactactaccgttattaccttttaaactgtaattatagtcttgtagaactagccaatagttattttgagagttattttttttagcacaaggaaatagccattcaataaaatagctctaaattgtttggatccaagtgttatttttcagagctatttggcctttaatacactttcctattaagtgagaactgagaaagagaaaaatactttttcagtgagccccaccccagatagcaccaattagcaccctttaaagggatagtttttttagtaggttatttctaaatagacttgaaatagctcatctgtttaaaatttttgggctatttgagaatatttaagagagagctaaaaaataacacatggatcctaatagtgcataagactaatagat

SEQ ID NO: 11663 - DNA, 1925 bp, Oryza sativa
ccaaacactgtccaacgctaccccacgttgcaacaggcccaaccaaccacctgaattacaccagttcattaagctaaactagggatgagaacaatcacggtgaatggttgatcgcccatatccgcgggcacggctattcgaatagttttactctggccagaggtgtacaactgtacccacaagacacgattccacacatgtcgccatgccccgaagtatcaccatgatactgcaaagggggaaatcgtgacaagaccctccacataaccctcccctaaccatccacaccacgctaaggtttcacccccacccctcaaaaggcagtgggcggtcccctcttgcgccgcggtgaatccggcagctggacaaccggacaccccggccgacccaactccatcacgcccaccctcgccaccggtgcctaggaaagggtcgagctatacttcagatcaagcagttacccactcccgcttgtggaaagcacggtaagtctcccagggtttcccgtgaaccggtccttaactgccatgggtgcgaccagcaaaaccatgcacccacagcccaccattcagtgtattttaattaactaacaccattgcggtggcaccaatctaaagctatgccaatagacaaagtctatgtaataaggtgatccccatttgtgtgctagttgaactaagcatggctaagcatttcctaaaccaacatctagtcattttgatacccaagttatcaacggcatatggtaaacaatatgtggctgaggaataggacccatcccacattacattgtaaaagaatgcaacatttaatagaaatgcgggatacttgtaaattgggtacaatatgatcaaacgtattgcatgacttgccttgctctcgaactgatgggacctcagcaacgtcttcgagaaacttcggatcgacgaaacggccgaaacctacgcgacaaacaaagcacacaagcaaaacatgctataagactactgaaacaggaaacaaaaccatttttaatggattctttgcatttttcttgatttactgagacttgaatggacttaaacggagctcggatgaattacttatgaattttagaagataaactgtgtttttactaataaagaaaagttcttaatcaatttattgcgcaataagtcccagggctgacgtcagcgaggggagggggcggcgccgacaggcggggcccacgggtcagcggctcaaagcggccggtctaccgtggaccaggaccacgcgggtggtccaccgccggtccacgggaccgatggtccggatcggccgaggggccgatcggacggcacggcggcggctaggcacggctcggctcggcttcaaaaccggccggccggccatggcaaccggcggcgacgcgcacggtcgccggcgacggcaatcggcggcgtgggaagcgacggaggacggggcgaaaagcggcggcagcggctgaaggcgacggcgcacgcgcgaaggacggcggcgcacacgggagagagggaaaaaaagggagcggaggggagcctcaccggcgagcacggcgaccaaagcggaggatgaaaggcggcggtgacccggcgatgctgaggtgcggacgggcggcggcggcacgctaggagaaaacagagagggggttaggggtagggagagcgaccacggcggctagagcggccggccggagttaggtggaaatggagagctcaccggcgtgcgagagaaacggcgctccggcgacgattggcggcaaccgaatggtggccgaggtgcaagcgggctcggtgagcgtgacggtggcgactacgcggcgcggcggtggctctagcggcggcggcgcgcggccggagatgggcggcgggcggcggagctcgggtgcgcggcgcgagggcggtagacggcacgggagagtgcgg

SEQ ID NO: 11664 - DNA, 13758 bp, Oryza sativa
ttaaaaaacggaggtagtatttgagaaaatttcatctcatgccactaaattttgtcctaatctcttagttacctttcaagaaacttagtgcattgtgacacttggtcgaaaagttggatatcaccattccatgccacttctatatgagagagttattatgttggctgtgaaaatatgtttttacactctttgactcttttcttcaaaattcatttttcctctcttttctcgaccaggccgtggaccagtgtaattcttttgtttccctattcaccttgtttgcgcttcttgcttgcatttctcttttagtgtagctaccaatatggacctatggtttgccagtctattctagatcgatttcagatagttgcctccatcaacaatcatggaaagagagaaagaaggatcccaatgtataactaattaacccgattatccaccaacaaatcaaatgattttgactaaaccaatcaaatctgaacgaattaatttggaccgtcatgaatatcagaacaaaattagtagtccacttgtgcagagaccttggaaaattgatgcgtctttgaacccttgattaactgctccaggcggtccatgagaaacacttcaatttgttgctcgagcgcgtttgttgagtccagccgtaggggagtggagagctactatcattggtgtaagggctgtgcaaaggaagacatgaaaacgaagatggcaagtggatcgaccatcgtgagagctacgctcggttttgacaaaacttaaggtgtttcgaaggcttaaagactaaattgtcgaaaacggtcagacatcaggcttaattatttccgtaatcatattttttaattcaaaaacagaataaaaaccagtaaaactagaaatgaaaacggcataaaaatatcaaaagtagaaacagaactgtaaaaacaaaaacatatcggaaacataattgtacgaacagaaacatgtcggtaccgattagaaatcgataataaaggtcagaaataatcattggtggactagctttctccttatatatgcctttgtttggaacacatgagtttcacagaatcttagccagaaattacgtacgaagcaattgaagcattaattattttgttctaaatgggacctcaaatatttaggtgcttttctttgttgatgtttatctcttaacattggacactttcagactcaaaagattcgcgcttgagagaaatctaaacaaagaaatcaaatgaagaatcttcagcaatagaaccagcaacaactcttattacgtggagattgagtagatgatctgtgtagaagaaaactatagttttttaggaagcttaagaaaactgtgttttttttttaaaaaaaagtcatgcatacttgactagaagttttaaccgatgcacgattaaactatgcgactgaaatatttggccacccatacacacgctcacattcttttgtttatctctaattaattaacatgcgattctctattcttgctctagctctctgcatcgagtcagaagacaatgcctttttaattagcatgggcagttgagataagtacatggtgttaacaatatgggcttttcaggatttgtccaaataaaaaaagggcttccggtgacgtcatgctgatgtagtaatcgagctaccaattgttcacgtggagtttgtcgtcatatctttgatctagctagcacaactaccagcttctgacgagcaaactgagcatctctatcgattgatcgtgtacgtccttctctggatcgatcggctagctggtcccgattgaatcccgatcaatcatcaatcccaaatactaaatacatatatatgaacattgttttcactaaactaaatattgatagacaaaacattggcaccataattgctttgaacccgacctgtcacttgtccatcgtcgtcgaaaactatttaattaccttacttaattttacctctattttgatcttccaaggaataatctctaattgactttaattccactaattagtattctccggccttagctagctagctgaccggcaggtttagcattttagctatcttaagctgcagcaggtagtagcatatatatgccatccgtcacacgtaaatgggtgcgtaggctaacggctcagctcagccgtgatcccgcggacgtttccggcgtttcggcgcggcgcgtgagggcgagcccgagacgtacgacgttgagacggcccggcgtgtcgcgagcgtttacaagtaaaacccgtagtaaatactccatccgtttttttagtggataacattattaacgttttaatactattttcatctaaaataagtgctgtcatgagaatccgtgttcaatgtttaaccgtccatcttattttaaaaaaattactctctccatctatttttgatagtcatatttttaaatctgaaaattttatttttgataggcatatttcaatccaacaacctatcatcttaatgattttctcgaatttaatgcatgactcttcattcttccacacatgattggctacatgggctttgagaaatgtaaatattaatgaatcgcttgtttacgaggaatgactagtagcatgcttaaatgaatgataagtagaactacttatccttggtctgtgtatcaagatgaaatataactatcaaaagtagatggagggagtataaaaaaataaaaaaaagtcacacataaagaactattcatattttatcatctgctaacaataaaaatacaaatcataaaaaaaattaataagacgaacggtcaaacgttggatataaatagtgtaaaactgcacttattttgggaaggagggagtacatgtttaactattcgtcttatttaaaatatttatataaatttataaaatatacatcatggttaaaatattttgtatgataaaacaactcacaataaaataaattataattacgtaaattttttaaataaaaaagtaattagatgtgtgaaaaaaaacggaggtagtaataggcgttcgatcgagtcgtcgttacggcgtgcgtgacggcgcgcgcctcagctcacctaaccccgggtcgccgtcgcgggccacccggccacacgcggtgcgcgcgtccgatccatctcctctccgtttctctcagctactctcgcctgtacacacactcgcgggtagggagccggagcgagttggctttgttgtgttgagccctttcctgggcctataaattcggcatcacgcccaacgcatcccctccccagaagaatcccagctaccaaatcgaacctaccaactcattcccgatcgatcgatcttaaaaaaaaactaatcgtaacttttctctctctctcctatctttagaactagcaggtagcaactgcttcgagtgtagtctggtgaacgtacgatctttcgttcgttcatcaagatgaccgtgatcgacggcgccgtcgctgccgacgccggcggcgcagccgcggcggtggtgcagccggggaacgggcagaccgtgtgcgtgaccggcgcggccgggtacatcgcgtcgtggctcgtgaagctgctgcttgagaagggctacactgtcaagggcaccgtcaggaacccaggcatgcacacacacggacgccataagctactacagctcgttcgttttagctagaggcttatagttatatggtgtgtgttgcgttgcgtgtgcagatgacccgaagaacgcgcacctgaaggcgctcgacggcgccggcgagcggctggtgctctgcaaggccgacctcctcgactacgacgccatctgccgcgccgtcgccggctgccacggcgtcttccacaccgcctcccccgtcaccgacgaccccgtacgtccaaccacacaacctcacctcacctcgcctcgccgccggccgacacggcggcgacaccaccattattttctcggtttctcacgctgttcatcatgggcgcccatggcgtacgttaattagttgcgactgacacgagtagcgcattgcatgtgtctttttgcaggagcagatggtggagccggcggtgagggggacggagtacgtgataaacgcggcggcggaggccggcacggtgcggcgggtggtgttcacgtcgtcgatcggggcggtgaccatggaccccaaccgcgggcccgacgtcgtcgtcgacgagtcctgctggagcgaccttgactactgcaaggaaaccagggtaggtgcatctgcaaaatctaatctaatttcttgatgatctctctctgcccttaattgcacgtactaattaaccttggataccttttgcttcatcatgttattgttaccttttttgctttggttcttttcactgagaaaatggaaaaagaaaaaaaaaactttgtatggatatgaattattacatgccactacctagctagctagtactaccaaccatgactcaaaagaattattatgtctggcttttgagccaaccaagacaggtgctcatcgatcgattgcctgtgtcgacgtgagcactaaggttaaaagctgcttcttttttttctttttaactagcgacgttcaccggcaaaaggacatggtgagattaagtttgggtgttactcacgtaaagcatgtgaccaatccggatcgatatgataggaacacacgtaataacacgccatgtagcttagcgtgacacctcggagttttctctgccttacagtgaaggactaggaagtagtaacatgattagcttggacgtacgacttattttatccattacaatatatccacactatttttttatggaaacggcaattttaatatatttaattatattttatttagtttatatatattagtataacataagaatctattttggaaattttgggaatttaagatagtttgtagctcacgattgttgtggttaattagtaggtaaattactattaattagtggttaattatatggaattttcgaacatgcattcagcatcgaagcgtacagttgatccaacagacacacatgtgcgccgtagaggttacaataactagaagtccaacgcacccagccactggaattgaacgccggcacgtcatttattaccgatgagtcaacggtcaaccgttaattaatcagttgtagtagtagctgaacgcatgcatgcatggtcacgattttcaagaacccagtaattggcctctaatttgttagtttctggaaggaaaaaaggtttaccttgtggacagtttttggctttttgcatcgcaatccgtcgggaaaaattcaagtagtatttttttttatctataagaaaaactatttttaagagctactgtacttttttcttagaaagcagatcacagctgagtgatccggcaatatatactccctccattccaaaatgtttgacgctgttgacttttttaaacatgtttgaccgttcgtcttattcaaaaaatttaagtaattattaattctttttctatcatttaatttattgttaaatatatttttatgtatacatatagttttacacatttcataaaagtttttgaataagacgatcaaacatgtttaaaaaaatcaacggcgtcaaacacctttgagaaggagggagtatctttcaaagcaatatatgttaggcgtgaagaaattaatattgtacgacgccgaaggtaacacatctttcatgttttaatttagcatacaaatattaaaaacattggcatgtttcggcaggcaaaagaataacatatgtatatactggcctcgatcttcgcaattatggaaataaatcaaacacacgtgcatacgaaagcgaaacccaatttaatttcttgtgattttgtaatatgaaaccgaaacttgactcccaaacctaaaactgtaccgcgtcccgcataattttctcgtggatccccacagagtaattaattcttctctgaaagaaaaaaaacctagtaccgatttttcacgtcgtattccatcagcatgtcctaattaattcacctaatatttgtaatagctttgcaataaccttcgtcaaagtcaagatacaacaaccagaatctttcggaaatgttcctaaggatagagcgaccgtacatttgtaggggtaggtgtgcttccattgtggatatactgatccaatttttttagagacactcagaggtagagtttacgtgtattcatttgtagggatgagtacggactcgttgtgaacgcgtttgtattatgtttctttcttcttaagggtagcttaggtttcaggactttgcgcttcaacataagctacgaacaattatttgcaatacttaatcctgtaaagtaaaagaaaatgaaaaaaatatatgaaatgatggtgcagaactggtactgctacgggaaggcggtggcggagcaggcggcgtgggaggcggcgcggcggcgaggggtggagctggtggtggtgaacccggtgctggtgatcgggccgctgctgcagccgacggtgaacgccagcgtcgcccacatcctcaagtacctggacggctcggccagcaagttcgccaacgccgtccaggcctacgtcgacgtccgcgacgtcgccgccgcccacctcctcgtcttcgagtccccttccgccgccggccgcttcctctgcgccgagtctgtcctccaccgcgagggtgtcgtccgcatcctcgccaagctcttccccgagtaccctgtccccaccaggtaaaattaatttcatctttattactacattcgtttcaggttataatattttctaacattgcccacattcatatagatgctaatgaatctagtcacacatatatatctagattcattaacatatactccctccgtacttataaaggaactcgtttaggacaatgtttaagtcaaactttcggaatataaatcataaataactcttaagttgttgggtttaaaaatataaaaattatataaatagatttttcttgaaaaatactttcataaaagtatacatatatcaccttttaataaatatttttatagaaacaagaagtcaaagttgtgttttggagaccgtgtcgctgttctaaacgacttcctttacaagtatggagggagtatatgaatgtaggcaatactagaaaatcttataatataaaacagaggaagtacttcttaattaattacttctcctaatcacgtcatcactacattaccaccatcatgctaactactctcttcagtatcagcatttactatgtgctgttaactatagttgatcactcgttaatttaaccccgtattagggtatgtttgagggagcttctagctgctgctgtttctcttagaattagaaacttcttcaaacagtctagttttttgtctagattttgagaagctatagtttaagaatccagaaaatgaactagaagttagaagctagctactaaccagctgtttctcagaatcttaagctttccgaacatgcccttactcccttagtagagttgcgacttctcctaattaaacacgtcattagtactacacccccaccacatcatgcaaactacgtactggtattgtcttaattgtcggcattaacgtacgctgtgttgttaactatagttatagaagtagttggtgcgtctgtggtcacgagaaacagagtctaaattgattatgagtttcatgtttgcttaattagttcattatttgttctctaatctccagtgaaaggggtgtttagccattaactaatgactaattagatagcagctgctagtaattaatttggtgggattggtaggtaaggatggataagacttgcctaccaattgcagcatcagctcaggttcaggtgaaccaactccgtttcagtccggtctgacgctagctagcttgagtttttactcaaagtaaaacaccacactcaaattaaggcctcaaagtaattctaagcaagttcatcgcactaggttacatacacatatgaacaaacaacatcgtgatcatctacatgagatccagagatcgagagatttgtgttggtggcaaaagttgatcgattttccatgcaacttgtgccacacaaatacaaccaaaatctgcacacgtccatgtcgaccaaagttggtgtgagactgagagggttgagatatattcccctgtaagccacaaccaaaccctctgctaatcttctactctgtctctgtctccttcctctcgatcgcatcagcgatgatcgatggagatcagcatcatcgagatcaccatcacgatcgatcgggtagaaatgcgtagcatcaagagagcgtttgttttctgaaaattgagtgtggcggtgtcgcgttgcgatccaagttggtccgcatcgtacgtgtcagattgttcgtttgtttctgtggctctgcattttgtcgtcgctggcaaatcacacgtacggctgggtactactaataaccttttgagagtgtcatgtcatcgcctatgcacgcatgacttcagagtcctgaagtgttagtttttagtttgcatgttgcgatcgtacatcattttggaaatggttttagtgtccgccaactgctacaaggattagttgtctaatgaacgtcataagatggaaatgctgataattgttagtatttaaggcgttataactaaagagtacgtagatgatgcaaatgctaagtcctcatacaaaaatgcaaacctttcttgactttgggaattagctgcttgtgggaagaagtcctaccaatcctggacatttaggaaggggtaggtcggaatagtggaattttctaggaatttttcttggttcttttctcagagaattttttttccttaaaatgtttgtttatgaacagaaaaaaaattattgctttagttaagccctgccttagacgtctggtgagcagtgtctatgcagctcttgagtcctaatgggtctcacctaatcatatattgtttgttagccacacacaaagggttacttgggagaaagcatgacaatccctcttgcaatcatttgctctgacttctttctagtatctcgactcagctagtgatataatagtattaatcaaggagaaattacgtcatgcttgagtatgttaactccttttttctaaaacaagaggaagcttcactcagaaatacgcaaacaagaaataaatattgacatctaggagtacaaaatcaatcggaatagcctgatttcaatgcacaacctgacaagcaaccaaaacgcaggaatattcagctttgcttttgtcaaaacgtcgttacagcggggttggactaagagcacccaccccacttgctaatattacttttcaaccggtatatcccgtaaaaaccttgctgaatttggctcatatttattcaagatcctgaattgtccacatgattgtttcaaagataccatgcctgactacatgtacgtgaataaacagtctaactcgatgtcgtaatcttaccaaacctcttgtactaccttcaagggtcaccaatacgtagcatgatgtcaggtcaggaactcgggatgctttaattgggtccaaggagaccaaggaatctcaagctcttcacaagtcaagccaatcgtgtttacacctgaattaaatcccatatactcccttcattttttaataaatgacgccgttgactttttctcacatgtttgaccattgtcttattcaaaaaatttatgtaattataatttattttgttatgggttgttttatcactcatagtactttaagtgtgatttatatcttatacatttgcataaaatttttgaataagacgaatgatcaaacatgtgagaaaaagtcaacggcgtcatctattaaaaaacggaggtagtataatttttctagttaatcgaattcccccaatttgcgacctgccataggatttgttatgtaaataggtatacgttaatgttccttttcattatgaatcgtaattgtatggccaaccattacggatcacaagataatgtgagaaaaaagaaacaaaattttcgtgcattacctctgaactgttactgatcctgtgttgccatcaggtgctccgacgagaagaaccccaggaagcagccgtacaagatgtcgaaccagaagctccgggacctggggctggagttccggccggcgagccagtcgctgtacgagacggtgaagtgcctccaggagaagggccacctgccggtgctcgccgccgagaagacggaggaggaggccggcgaggtccagggcgggattgccatccgagcatgaggaaaacagcagagcaaaagagcaggaaaaatgtccatatcgtgttagtgtttaccgtgctgtaaaaccaaagtagtagtgttcgctggtttgtctggtctgaagccctgtaatacacccctgttgttgttacatgtgcaccagagtgaccgaataagtatttctatgaagttctctatgttcacaactgatttgtgcagaatttgctaccaagacagcaggttgtgaaaacccacacaccgatataatcgtgcagcaccgtttgcttaacaatagtagggtgcaaagcaaaactggaaatgaacgtacgaatctacgaacaaaatttggcgagagaaagctctagattacacagaatatacagcatatcgaataaacttaagaaattaaaccgtgtttgttagcactgacgtgcagaatattgagcaatattatttgccggtgcaagagcaacttcataaaaatctagactacagaatatacagcatatcgaataaacttacaaattaaacagtgtttgttagcactgacgtgcagaatattgagcaatattatttgccggtgcgacagcaacttcataaaaagacagtctgatgtccttatttgcccgtaccattaaaatcacaatacttacatgatcaccacaacttatataaaacactaaagcagtcattgactgtcacaaggtttcataactttcaaaatagttgtagaaaagaacaaagaatgcaacaaagagaatttaacaaagaggctggaactgttaaactaatgagttggtgggggcaaaagttagaagtagaaagcaaggaacacgtagtacaaaaatgcccctactaactccatggaattagaatctgcatcttgaatggatagaagcaattcaactctgattctaaatggagtggtgttccatcattatcaatagagatagcaacaaaccttaccaaccaaaaccaacacaaaacatgaaaacaacatagagtcctatccagataagacatcccagaattcactcacaatatatcagtataggggatataataaaatactcttgggggcgggtggggatggaagataagatttctcatccttttaatcatatacagttattctggccttatattaatcatgtacaattaattctggccttatatttggtgtagaagggcataaggaatgcaagacccaaagacattgtagtcccaaaaactaggcaaagaatcttattgctacaagcttggaatttgaaaaccagtgggtagtggcgattaccacatcaaacacagattctcaaatcaaattgttccccaaaactaggcaaataatattattgctacaagcttggaatttgaaaacctgtgggtagtggcgattaccacatcaaacacagattctcaaatcaaattgttccccaaaactaggcaaataatattattgctacaagcttggaatctgaaaacctgtgggtagtggcgattcccacatcaaacacagtttctcaaatcaaattgttcctatgtgtgtgaatttcacataaatacaaatacatgattacaactatcaagtgatatactttcaagaacccaatttacagaactataaacactattattatattcttatatacacataaacaaactaccagcccagtcataaccaacatctccatttccattgattatgaaagcatttcgagtctttgacaagcttctccctgaaaaggacatataaaccaaaagcatagcaataggtaggaagtccagcaagttggaacaaaaaaaaagttttgcaccaaaactggaactaatatccaattccaaacatgcaagtaatgacaaaacttgtgtgataaacaatctaaaatagccttcaacatgataaaagataaatctgaaatagtcttcatcatgacaccagaaataaaataggcttcccaataattaagaaccgagattcctactgtactaattagtaaagatatttgaccactcagcttaaatcagtagcttagcgatacaaaaatgtcttaaatatgtagttctatgaaataggttcgtaaatctgtagttcattggaagctatacgctttatgtgcagcttaacgcaatttacaattcatataccatatatacgttcatgtaaaacttgtccttcatatgagtaaaaacaagttcatcatttgaatgtaacattaaattttctgtttcactgaaccctcctttttggttattgcgtctccatattattacctttcacatctatcaagtatcaatacccttgacactacccttggcactaaatatcctagatgtgtaaggtgaatttggcatggtaaatgacatatcatttacatatcatttaccagaaagtacaaaggcactatgaatcaatgtataaacaaacacgtcattaccaaaataaggcatagcactcaggatcataaacgcattaccagaataaagcctagcaatgcagatccaagaattattagagaaacccaagcacataacataattattttcttttcagaacaccctaaagcaaaaggttaaatttgtgcccagtattgccataaatttatagtttagtatcaagcattaactgtgtagggagtaagcctgatatcacgaaacagtgtaaatgcttcatcctgtcatacaactcaacatgggatcttgctttcacttttctaatatctaaaagtggttctctatggatatgtcaaactgaaatacgatattcaatcatctgaaataacgattccctgcacacaaaaaaaactgaaataacaatattcaatcatatgttttttgtcaacccaatgaactacccccccccccccaaggtgcaagattcacagataacccaaaaaaaaaagcaagcagaattcatatgtttaggaccgaatgggatgttggacatggactaccagataggacacaagaatttacaggataagctataagaggttgcacagtcaaagcatgcaaaatcaaagtggtccatccctacttaaaaaaatctgcccataggacccaacaaaaatcacaggagccacctgatgttttgatgcattgaacagtttactaggtatagataaaatcacattgcatactttagcatttttcatttgttacaaaagcaattttgattctttaacaagcctctgccacaacaggacaatgaaacaaaagcctataaatacataggaaggaatttctaaaaactggatgtcataaccaattccaaacatgcaagcatgacaagtcgtgtgaacaaatatctaaaatagccttctggcaagacaaaagataaatctaaaacagcctttaccatgacagaaatagatttcccaataattaaaacccagaaattcctactatagtaattagtagaggtagtatttgactactcagtttaaatgagtagcttagtgacacaataatgtcttaaatatgtagttctatgaaataggttcacagatttgtagtccaatg

SEQ ID NO: 11665 - DNA, 631 bp, Oryza sativa
ataacggaatttctataccgaacacaaccatacactccatagtaccatacaagcacagtccgatgtacagagccaaataaatgtccagattatacattccaaaatataaatacagtccaaattacaagttgcattaatacatagtactgatgaatcccctaatgattttggtaaaaatcattaagttaaggtggatacacatcttgtcatatgatcaaatggtttcgcgaaaaatcaataatcagacaacaagatgtgcgaactcgatattttacacgactctctttaccaattctgccccgaattacacttaaaacgactcaacagcttaacgttggcttgccacgcattacttgactgtaaaactctcactcttaccgaacttggccgtaacctgccaaccaaagcgagaacaaaacataacatcaaacgaatcgaccgattgttaggtaatcgtcacctccacaaagagcgactcgctgtataccggtggcatgctagctttatctgttcgggcaatacgatgcccattgtacttgttgactggtctgatattcgtgagcaaaaacgacttatggtattgagagcttcaattgcactacacggtcgttatgttactctttatgagaaa

SEQ ID NO: 11666 - DNA, 823 bp, Oryza sativa
agagcacttctgcccacatctcatgacgcagaagacccagcaataagtatagttacatcccttgaattatgctacattagttgcaactcttagatgctgtaatcgacagcataaataaagtgtgtacggtgcctcctctacattaatatgcatatacacaacgatgaggtcataggcaaaatcaggatccctggcacaggccaagatggaaacaaacttaccatgcaaacgtcagacttgtcaactgttgaactcctctcttcagctcgacttggcaagcatcctagccgaatatgaactgcaagcacattggctggtagagcaaaaggcaggctttgcgatagtaatgttaaaaatgatccaagaaccgcgtctcttcagtcaaagatctcctgggcttcgattttgctgtgctggctgcagggtttggtcaaaggtgaatgaatgaatcaatcaatcgataggaaaagtgtgcagaattctgtccatatgtaagagaagaatgaacggtgccacacttactgttcatccttggagactcggtagtatttctcggcgagctgcctctgaccaataagctgagcaaacctctcgtcatgggtgatcacaatcaactggaagttctcctgccctttcctgctctccattattctgtgtcggaaagacagacaggcgcacacacagttagggtggaagctccgggtgataacaatttagtagtaaatctgtagttgccaaaaggaatacctcaaaagggcaccagcaaggctctctgcattaggcccatctagattggtggtcggctcatctagagctaatatgc

SEQ ID NO: 11667 - DNA, 633 bp, Oryza sativa
attcctgcagccctaatcgcacggtgggtatgttactgtactgcccagatcggtgaccgtacaagccggagcgggtcggatggcatcggtcttatccgcaaaccaaccaaccgactcccccctgcgtcgtttggctggtgtgccgctcacgttctcgcttgtcctctttcgctgctgctgaccccagcagccacgaccgcagggagcatgggatcttcagtgccgtcccatgtgtacaatgaatatgcctggcctaaataaagcctgaaaatcacattgcaaagcaagtcaaattaacacagtagtaagcaggtgcggtgagagattgtcttggactgattttgtgtggtgtcttgtgggttgcaggagatttgtgagcgcttcagcctacgacaagaacgtggaagagcaggtgcgcccggcggtggtgccggacgatgtgatcggcagcgtcgggagccctgacaagtactggggccctcacccgaccaccggcgtgttcgggccagcggcggtggacgccaaggcggcggcggccgttggcgcggcgaaggccggcgcgaatggtggcgcctccgtgctcgaccagaaggtttggttccgccccctcgaggacgttgagaagcctcccgt

SEQ ID NO: 11668 - DNA, 1013 bp, Oryza sativa
gtactgagcaattactgtcaattaatcttaatcaatcgcaagtggatgctattgagtctgttatctcagcagtgcagtgtaggcatttgaatctcatgaaacttatatggggtccaccaggtactggaaagaccaagacagttagtgctttgctttgggctttggcatgtttgaaatgcagaactcttacatgtgcacccacaaatgttgctattgttggagtttgtactcggttccttcatattttgagggatttcaacaagaatgccaatgaaaactttctacccttttctcttggtgatgtcttgttatttggaaacaagtataatatggacatcactgaggaccttcaagatgttttcttagattgtcgtgctgatgaacttgttgaatgcttttcatcgttgtctgggtggagatacagaatagcttctatggcttccttttttgaggattgtggttctcagtatgatatgcttcttgaggatgatggaagaagcgatcctatttgtttcctggactttataaagacacaatttgatgtgacagccacagctttaaagaaatgcataatgaacttattgattcaccttcctaggaagtgcttttcacatgatagcatcagtaatatatcaatgctctttgattcactggaaaaagttgaagcccttttacatcatgaaaatttaactgatgatggtgcaaaaaggggctttggttttctgtctattcaagacatttcttgtgcaaagtctgcattcattattgagaaggaactgaatagagcaaagttatcatgccttcaattgcttgaagatcttgagagatcactggatctacctactggtagagacagaaattggattcagaactactgcatgcgtaatgcaacacttattttttgtacctcctctagctcgtatcgattgcatcacatggaaattgcaccgcttgatgtgttaattgtggatgaggcggctcaagtgagggaatgtgaattgattattccacta

SEQ ID NO: 11669 - DNA, 7389 bp, Oryza sativa
attggaatcgaatatcatgtttccagtcaacaaagagccatgttttgagagacatgcagtcaaacatgttaaactttagcttttgatacctttgtatagaatgagcattgaaaagtaatacatgtaaatttgtccaggtgattttgaattcataaatattctacagatagaaattaaaggccaacattgtattttcagaactgtgtcactcaatttcattttttctgattggagtaaaacatgaaaaaagaagtacacgaaactgtgcagcaagatagaaagcattattgtacacaattctttcaataatgaagtcctatcatcatgcatagaacatgacccacaaagtaattgattctataaggaaattatatggtatgattaggaatcaattatgttggctttcttaaagaaccagtcaatgcaaattgatctatcctctaaaaaaattaggaatcaatattcaacacataactgttgttgtatttgtgtctgcggataaaacatttaaaggaaaggcagggataaatggaggcacctactttgcaaaagttcagcatcatcttctgtctcagtttctgaacattccctctcacaagaatcagatctttgcttctcagcaaactccgaaattttttgctctgcagaaaacgaatcaggctgcttgaggtagccttcggtctcaaagtgtgctcccattgaagtgatttgtgtaggaggtatatctccatggttattagtttctccagaatcattaggcatgtatgtcgaccagccctgttgggcctgatatatagtagtcagagggtcattcccttcttcaattaaaacagggccagaatcatcatcacgctgaaaggaatgaggcaatttcaaactactctgcacaacttgagcaagtggtcgacatctgtcatgttttttgacaagagactcttcaaaaacactttcctctgatattttctttgtgaggggtgtattttttccatcacttcctagatttggtcctgcttgcatatgtcctaaatgagaagatccattgttccgattactgagagtattttctgcaccttccaaagcaagagattctgaaaagtctctttttgaaccagcatacggaaagttctgctcaagcccttttgtcttcccagggagatttgagctatctccttttctttttttactctttttgcttttgtaacgagtactgctgagatctttgcactgttgacttgctgagtttcctaaaggaaactgaggtttttgtgtattgttccttgagtaatattctgtagaagagttatcaaactctctcctcatatcagcaaaagggacactagagatgtcatcactcctgaagccttgattctggtattttgatgcaagctgttttctctccaattcaagagcatgaagaatagcatcttctctgcgagcatatttttctcttctctttacaggagtacctcgagaagtcaatgccttctcaatacaagcatcaaactctccacacctgaatgccttgacacgctttgatttctcaaggttataccaatcgctgcaaaagaagggaaacaaatgaagaaatggatcactacacaagacatttaaatgcaaataaacaaagttcaagctgcaagtgttgtagaaacccaaatcaatgccagacaattcaccagatacttgggtatttcttgctatcaccatgaatgaaataaaatgtagcttgagatcaagatatgaaattttaatgggtgttcaaatagcgcaactgacatgatgggcgagtgaaagttaatgggtgttcaaataaaagaaaacatcattctccaacatgatgggcaatgggcattactgtttagttgtggtcttgtgggtggagaactgattagatatttggggcagtaaatatagtataacgttaagactcccttccatttcaacagtcacaggcaagctagaaaaaataaatccttaaggacaatattgaataatgtaacttatatagaaagtgagtcagcacaaaagttagcaaatccaatcagagcacagcacccaatatacccataaaaaatcaaacttggaattcttaaataatgccaaatttattttatgcatgttaacatttcaatttccagactggtatgggagaatccaatcagggcatgaactacttttttctttagactttaatttccattgaatatattcgagattctctttcagcaacatttcattccattgtggcagctaaaagacaaaacactaaatcagtaataaacttaaggaaatataagtatatatccgtatgtcgtaagctattcatatcattctgttataacttccataatacaaaacaaacacctacaaaattggctttctcagtacatttaatagaaatggtaaggcaaaaacatcatagcaaatctgaaacatgcttataacttatttaaactgtataaccacgagaatccagtttgtgagtattttttaagctctgttgaacacatgataacatcataatattgtattcacatgtctccacaaaacaccatacaaaacatcatcacaatatatgatctatttaagttgagaaaataatctacagaaccaaaagctggtctgcacctgaattgccagcatcacttgtttcaatcccacatgacagaatgagcagcacgcatgtttattgtactataaaaatttacaccctacttatgaaaacccaagacatcataacctactctcattcttcagtaaaattagcaaccagaaattaaatgtgcatcccacaaaggaatttaaccttctcacatcacaagaacgtgcatataatttcatattcaaaaattgcaaaatattatatccctgtgaattaaattcattcttccaatataacaagcaagatgtacacctcagaacaagtaacaatgagtgtaacacatcaattgaggcagcttatcaatagcaccatattgggttcaggaatgatatcctctagatggtagattgtctaacattgtttagctttccaagtgtataggcaattgacaggtgacttctttaacatgaatagagggaattcatctgaaacaaaaagttgttggctcttgttaaatactccattgttgttctgatggtatttgcagccgcaaccaactaaatatattccctaattgttccttgagcaaacaactcccaatccaatccacagaacattcaatcctgaccaagcgattgtgaagggacactaaccgagcagatgaattatagaactaagtaacagagtacataattaaatttgagggaaaagggagaaactcacacgcttgcgtcctcacggccgaggagcttgaccggagttcctgtcttcggcgacattacctgagacgccgggagctcgtcgggcccgagtatcctccctggccaccatgacccgttccgtcgccgcacccacacgatgatccccggcgagcaatcggtgatgccggtttccgcctccccacacccctccccttcccctcctcctcctcctcctccacctcccgagctccgacccatcccggttaccaagcacgaaagctccaaccccaccaaacctaaccctaggttttcaactcagcccgcttctagaagcctccttcgccccggagatctgccccccattcaaatcccggacggccgcatctggaggacgccccctctccgcgcctccacctccgccggggaatcctagggttccggcgacctgaggcagcttcggccttcttcctcctcggggagctttctcctcctccccctcgccgccggtatgctccggggtggtcgccgccgacgaagtggacgtgttccggcgcctcacgaattatatttttcccacctttttctctcttttttttttcgcccgagcaaagcgaagaagaaattagggcgaaaaagtataaaaccgaagggaaatagacgggggcgttttctttttccgggttggtttgtgtgggtggttttggtggtccaacgcgtggggcgagcgaaataactgcaggctcgggcccaaaagaatacatgggccggcggagacacggattccataaccgggggtagttcttgtctctctcttctgaggacaaaaggaaaagaaaagaaaatgagaaaggcatctgtattactccacttttctacgggtatgaaaaagtagtatgcatacatggtacatgtacccacaccatcagatgattgcgtacatcaagtttagaagtgcacctctcaaagaaaagtttagcagtacatggaaaagcaatattcccacatgatatcattgatcttaaaagaaggtaatggttccttgatacgttctggttttcgttttcccttacgtggtaaaatattttcaagccgttgattttttaaaagatatttgaccgttcatcttattcaaaaacttttctgaatattatttaaaacttgagtagtagtagtatatttaacaattaatcaaatgatagaaaaagaattaataattaattaaattttttaaataggcatatggtcaaacatgtttaaaaaagtcaacggcgtcaaatatttagagacggagggagtatataccatgttatatcttgttatggggctttagagagtccaggtggaataataacattaacaaaatcatggatttgcccaaaatgtaactcaagacacaaagcgcatatgccatttttgtgttttttctagtttttcctcacatttttcagggtaaattacgtcggtactggtggcgcattttaatatacaattttacaatactttcattcatacacataaacattcatgtgaactatacatcatggtagaatgctaggtgtactcctaccattagtatctctattgctgtaaaaacagatttgtcattcttcagtcatctcattccatcgatcgagagtaggagagtagcgctcgagaaaccgaacgatttgcccctccccacactcataatgttactaccactgtagacgctacgtgtgagataataggaggatataacccacgtatcagcgcctgtaatgatagtgacattatgttatgttagtggatcctcatcccacacccatccattcatctgcttcttctcatattgcatcccaacctagttcatcccacaaatggccctggactgttgcaatgcagaggttttgttactagtttaatacgacaagcaatatgttttaacttatttgcacacacaccacacataagctcatgcgctaaaataaatgtgtcactgtaaggggattgtttggtgtggtgccaaattttacccaaccaattatttggcgactttaataatgtatccatttgaattgataccattctctcttacaaattagcagcgccgtaatttacccaaggtttaacacctagtaatgattcaaaccaaactagccccatgtatttttactactgctagtagattgcattctatctgtaatttactcttttatttatttccagttttttttttaatttcacggtagtctgcactctgtcatataagaaaaacttttatatataaatctgaatataaactatatataaatccatgtgtagaaaatgttgtttattttttaccgagggagtactccctccgttccaaaataggagggattttatatcaacgtgacacattatagttctataaatttagataaaagagattgtttaaatccatccaaaatcacttatatatattaaaacatcccacacccatctaaaatctcttataatattaaaactgtttcacattacatgacatccaccctaaggccccctttgattcataggaaattcataagaattttaagggcccatttgaatcataggaacgaaaaaacagaggaataggaaaaacacaggattctgacaggaatacaattgtaaaaaagaggattgcaaaacacagggatgaccgtttgattggaccacaggaaaaacgcaggaatcagataagagagatagactcagaggaaatgttacaaggttagacctcttgctaacttttcttcaaaatgtgcataggattactcattccataggaattttaaaggattggacaggattcaatcctttgtttcaaagaccttcataggattttttttccataggattgaaatcctccaaaattcctatattttttctacaaatcaaaagggccctaattagaggatttcattcctatagaaatttttcctatacaaccatttgaatcaaaggaatggatcttatggaatcctatgaaattcctatggaatacctaatgccatgcaagttttggaggaattctaacatgaggttttatacctcatggaaactttcctttgagtatttatctctcctctaactcctgcggtccaatcaaacagtcattcctgtgtgtatttatctctcctctaactcctgcggtccaatcaaacagtcattcctgtgtttttcttgtgttttgcaattctctgttttttacacttacattcctattaaaatcctacgtttttcctattcctatattttctcattcatgtgatttatgatttatgatttaaagggcccctaaatctttacattttggatggagggaatagacagggtttcctaaaccgccgggcccgggataccgtgccccggcggtaagcacggttaccgcggtaaccgtgaaaaaccgtacaaaacagtgccaaatttatcaaaaatttaaattattttttaaatttatttaaatttaaggaggttaccgtggtttatattatcgtacctcacggtaaacccggtaaccccgcggttaccggagtaagggaaaccttgggactactcgactgctacgggtgacgtaagtcagttctttctccgctgagaaaattgacatttagccatgttcaagatggggtttcgctggaatgccactcccgaatatggcttcgttataatgccattgtcaaatgaagccaacttgctataatgccatttcaaccattttaactgatttccaaatgttttccaatgttttccatcattctctgacatatttgcccctagtcattttgttgactttgttggggaaaggagaaaggggatcgatccccatccagatgccggcggtggagcgtagcggcggcggcggcggcggcgacggggcgtagctgcgagtcggtggccgccggctcctcgtcctcatcaccaccaccacgccaacatccgtcggctcgccgtgggcgtgacggagagggcgaggagagaggagcggagctcgccgtgcgcgcaacggaggcgacgagcgtggtgaagtggtggggagttgcgggagggaggcataggggacgccggcgaggcactcgaagagga

SEQ ID NO: 11670 - DNA, 2318 bp, Oryza sativa
tttttgtgatttctgagcaggtggttgggaatgtctagtccagtccaggcgactttcttgcgggtcgcaatggcatattgacatggcatctcgtgctgattccattatgcgtgtccacgatctgttcgtaggctgttacgagagctggggttgtggtgcctgcgaggtgttcgtggaattgcgcgagtcgagcagaacatagagtggggtatactaccgtttgcagtttatcacagagatggaggagatgggcatcccgtgagctatgaaggtgaggatatgataaaaagttaaaaacctaaatgcttcccctctcgctcactgtgcaaactgcaaacctgcaatcttgtcatacgccttttgcatttggaaaatatggatcctgattattatgcagcttttagacatgatcctgttaggacacatttctattttctgcccaccatcattgtgatagcgcagtgcgccggtaaactattcatcaactgtttgagccaaaaaactgcactcattaggatttacccattttatgcttattcgtgtcgtaccttttgagtgtgatactaccacctaagctactcaacaaaacatgcataaatcaacttgtgcagctacgttttttttttaactggcacagctaacatatgaaataaatccaaatgcagtgaccagattgagataacatgatcaaatacacaagacaagcatcaaagctttcctagtcaggctagttaaggtgtacaaccggacagcagcaagccgttacatggccaaattgttaagaagttttgctaggtagctagtgctaaagataaaattctctccaatcctggtcaaataagtttgctcagcaaggtaactgaaaatctaggacattgttcagataatcagtactgttgctaaagattagttgaatatgtcgagggcctggtgttgcacgtccactgcttgaaggagcttctttgccactgcacatgcataaaccgccgaaccttctgatacctgagttgccatggatgatgaatcgttactatcgatgctaacatgtgtaatgggacaaaaagaatctttgattctactttaagaaaactgaattgttacttaccttagtgttgaacatgaatatatggtgatcacctataatcccacccactacatggataagctcgagctggaactcatctagaacctttgctgcatgaagcagagagttggccttcttcttttcagtgagcttgatgtttacttcatcgtccactatgcggacatcaacgtggcattcctttgacctcctctgaacccatgagctccttatggctccatggagctgattgtcttgatcatccctcactggcctcatcgatgagctctcgccatcagcggctgcctcttgatccaactttaacacctttctcctgttatttccatgcctcttctgttccaccaggatcttcagctccttcactgttcgattgagctcatctatatactcaatggcatcacctactattgaggccctgtcattctagagcacagtttgtaacacattagtgccacaaccaagatatttaagtgctacaatcttgttgaagggtaacatcatgaggatgataacattgtggaatgtgctaacacacaaaaaaggcaaggaacataggaaatatcgaactgaatgcttctattgctttctcctagctaactagaagggctaactcacttggttaggatgaacacaattaggggtgttttgatttgttaccatgtcaatatattggtagtgccaaaacttgaccaactttggtggcaagccaaactttgccaaataacttttcaaaatgccaacaatttggtagggcataatttggcttaaaaccaaaacaacccttaataacatggcactgttatcagtaaagaacatcatactgatgaactatttttcaaaaaacaatcatgttgagtgatatatcagacagcatattccatatacatatgcatcaaaatgtggtaacgcaacttgaagaattttggacagataatttcaaaatttataccagttagatgaatacacagacttataaatttactgttaggtatttgtgatctgtaaaaaaacagagatttgctaaaccggagctatattggtgttggcagtttttgaatcattagttctctgagaataaatggatgaggatatttaaaattttgattatcttcagagcatgagtaacaaatggaaatattattgaaaatctgagtggttgtctgttaatgtgagaatcaccaagttatttacagcctaaccaactaataacttgcaa

SEQ ID NO: 11671 - DNA, 4494 bp, Oryza sativa
agcttttcccttgccctttccgaactcacccttccctctcctgcattcaagtacactatcaaactgcctgtcatctatctcctgaaaaagatctccacttccaacaccaataatcacatctcgttcgtcctcactgggaaacaacccataattttggggcaacgagtggcagatatcctttattagatgagattgagtaccatggtaccctaactggagagctgaatcactagcaaacatcaacccactcccactgtctggaaccgctgctactcctgtaagttcaccgttaagatccaaatagttagtaccattcagtgttgtgtcaccgaatacggatgtcgttgccgggaatgctggagccattgtgcactgcataagattaaggagatctggtgcaggtgtgtaaacaccatttggataaagtgcagaatcatactgctggatctgttgctccaccaatatgttttgtggatcttcgctaaactgatggttgatgatatgatctggtatagtgcagatagctggatcccagtttgcagtttctactgggggaacctcttgctccaaatcaatttctagttgatgttgaaggtggttaattgctcttgcagcttcagctagattggccgtattcgagagagcttctgttgagtacgggtgcactttgaatttctgcaaatcaatgcttgtgttttcactgcttgcaggagcttgatttgagtcatggatcaaagatcctgccatgagactttgatcgtgggaatcctcaaagtaaccagccccaacaatcattttggcaaaacagtgctaggcaccttcgctccaaatctaaaaccaacacaagtaaaaaaacatatgagcagaagaatcaaggacaggatgaaaatgaaggacaaatagcatcttagatgggtgctaatctagtgctaaaatagaaattacttgcaatgcacatattaagggaaacagggctactcaacatgaatgaagcagtggatataattcaatcggacatgaaaattttcagttggcttagctgttttggttgtttcaagggaagatggagccgtggagtttaagctacgcaatctgtctgtctgtttattccgtgtagagaagttgcatatagcatgattaatgagacatgaagcaactttgcttgttgcagacctaacaaactccttaccatctttctttgcctctaatcatattcatattgatgtttgataaaatgtgcttcaaccaccccaagtttactaattaatcagtaaaatgctgagtagcttgaaatcattgccaatgccaaatatacttcatttattataagctgatcactaaaagtaagaactgtaaattcagtatgattgaaagttctatagaacttaacaactaatttacagaaacataaaccaatgctaattaggatttgcatcctgcaaacagtagtagcaagcactggaaaaaacatacctgtatctttgcctcagccaacggttgaatggaaagaacttatgttcatgaatttgcggctcaaagactcatgagatccagtgctatgccaagactattatagtggcaagacatgaaacaatacaatggtgtcacacaagattgattccaaaagaaaaacaacagaaaatgccgatagcagtaacaatcattttgctgaagggtctttatgaccatataataaaggtcaaagtgaagttctatcatatgattgttattgttattataagagacatagccgagaaagacggaaagctcacaccctttgaatttggcatctttgatgttattcacccataggaagttgagaaatgcaagtcatgctttctgcctcttaccatattctatgatttgtactgctgcagttatgctttgagaaactaaacatacaactacctacaaggcttcaagtattcaaagagcacataatcttgcattatgtagtgtagatatcagtatctgtaatttgaacttgattgtatttgtatatagctgtgcagtgtgcactcttcttggtctgcttaattccagatgttctagatctttccggttttacccatcaaggtactgatccttgagtttcagcaccttccctcagacttaaattgtgaagcatcagacactgtaagtttatccagctacaagtgcatgtaaaatagacagatgaccacgatacgcatgcaggctgcatgtcaataatgtagcatcgatcacaccttcagattttgctgtagctgttaatgatgttataggtaactactactttgcttttttttccattgtgaattaataatatgcgtatatttcgtctgcaaagaattttctgaagtttaaactgagattgcctaaataattattactaataggtgatggactcatatctagctctggatcaagggatttgaaccatatagagtaactgatattatataacattctttcacaacaggcaattgttttatgctttaggttgcattgcttgcaatatgacacctgctgagataatctacattatttttatccatctatgttaaattaatcttttggtactggagtcctatctggttatggaatcatttcttagaatgatgcagctatgtgaacagcgccgttctaagtgcttctattaatggtgtaacctccttttctgtttcgtttgatggattcctcgtggtgtgcctgcggtcatcattggatgcaatgtgaattcaatcctgcatgaactatggattgccagtacagttatattaccttcttaacatagttaaccaatacctgttatattctgttgatcaggtagagtttacggattatgcacttctgacagttatcatgaggggtctggaatccattaggtttctctccataacttctgggagctcgcatgcacaagcacaatggtattgccaagaattccactcctgacaaggtgcgtatactgttaacctccacggctctctcgccttgtgacattgtgcacagacgtgcaacctcctgcttggacccaagatgaagaggaggcgtgaggtgttttggaggggaaagggagacgtctcacgctctccttgcttcagctggattcgcggtgggttgaggcacgcagaacgcatttgcacggtcaaatagccgcattctcctgttcaacagagtacgaatcctccaaatcaccgacttcccattgcaacatactcctctcgataccttttatccttcttccatttttgacctcttttctctctttgagagacttttttttttaatactccaatgcatttttgtgtgaaaagactctacttttgttctgatccaatgatatgtataggtgcaattctctattttatttggacgtgttgatggtctggtacgatgcaactgacaatctgacattagtatggtacattccgtaaaggccgattttgcaaaatggaaaaaacattaagacggcagttcggcccacggcccagttggcccaacatagcccagtcggaaatttttttttttgaaataaggtaaaatgcattacccggctttggggagaaagccaaacagcaacatacagaatcttaaacagaaaggaaaggaaaaacaaaaacgacacagaacaaactggggatgccagcatccatgaagctctaaaacttaagaaactaaaccacccaaaaagacactttgacagacagtatcactcgtatacagacaacttccaggaatcaaaccaaagcattatcaggtaaaacatctcccggtcgcagctccttcatcttttgcttcagcttctcaagccagacgttcagctccacgcgctctctttctcttaagagtaccttccaccgattcgccagagcaattgatctgtaaaccacctgcaaaggtgttttaaccaatttgttttcaaacacaaaatcgttgcgtatagtccataacccccaacataaacaagcacaaataaaaattcccagattaacccctaactgttttttgacgacccttagcccatcccaaaaattcagaggtaccttatcacccccaatcacttcaattacagagcaccaaacgaatttagctatagggcaattgaaaagaatatgactggttgattcaactttcaaacaaagcttacaaaatctatcaccccccttccaatttctgctaaataaaagatcagcacaggggattcttcccctcccagctaaaaacagaaaatgcttgattttcagagggaccttgctcccctaaatttcctgcatatccttatcaacaacacccccaaacttcatcagtctgtacatagacttcgtagagaaaagattctttttgtcaaaaggccagattaagcaatctgaggaattattaagttctacccttagcccagtcggaaatgagcccaccttaatcctccggaagccgtacttgcggcaaaagcccattcttaacgtcgtggagcgtcgaaatcccatttccgttcagcgactgaacagaaac

SEQ ID NO: 11672 - DNA, 8451 bp, Oryza sativa
agagggatgctgcgaggcggtgggggaggcgcgcggtcgcgaccaccgacggcggcggtgcggattcgttcagcgatttcgccagggcgccgtcgaggagctaccagcacgacgaccgggacctcacgcccgtagaggtaagcggggtttatttatctgtttatagtctgttccactgttattttgcactatcattcaacatagtccgattgctgatgctatcgttggaattgctggacactttttttttttaacgaacaagatggacacttttgtgggcaggtgggatgggaggttaattgaccgatcagttaattgtctatatttgtttatttacctatttacagttagatttaatggtcgatgtttatcctacatgagctgtttcgtcatgttgaaattatgtgtaatcaactaatcattatctagagttacttgattaactgagactttcctgtgggtttgcaggccaaactaaagcctctcctctcaagggccaacctccttatcgctagggacatagaatgggcaaatattgtgttggctttcgagcaggtaatgtatctgtgtctcatttactcatttacatgtactgaagttgcgactctaggatgcttctcttgctgtgtttggaaatgaaatagtaacttgtgttcaattgtccttgctatattgtttttgttactgtataaagcaaccggcagttttcacgtgattcatggaggatagctcatacttgaataagtgcttcatttcttgggtaaaaaactgaaagaagtgacataattcattttaccagcaacaaaattacataattcattctgcgcttcagaatatatgcacatttatttgggacattgatattttctcccagttttcgaattatgtcttttgattgtttcagactttcagcctgttatcacttactgttattactcgtactgcaggagagtagatatatcataatggatccgctctttcctcaatcagtatgtgtactcagattttcattggttccgttgctgtattactctgttgttgtattattttattgtcttagcttcattattgacttgtattttttgtcgaatttccagcctgttggtttcattcgagagaaaagcaatgtcatatttaggcaggtatgtctcgtgattaatttatcctaaataagttaataccgtagtagctcatgtctcatggccttgttctttacttcaaagtaacttagtggaaaagagacaggattttgattctttaaattctctgcgtagcagtacttaagttcgaacatatatgatttcatgttctaaatattaaactagtgtcataatctcataatatgttgaacttttcaaattaactattattgtatgctctaatgtatagtgtgatatttgtactagtgtgcttagtcagcatcgactttattttatttctttataaaatattatcatgatcttatatcatgcatgatgtcctattgagttatgcatttctcttcctagtgctaaagaacagctgttgatttttagtaggttagacagatccctttcttttagctatagcaccagtaatgactccttttcttttgtgttgaatgattttttggttgctctctttgctgggcaaggagtctcttgccacgttttcctgtaatgatcgatgctacaaactttcagttagggtggctgtgatgtggtatgtaaaatttcacaatgtgtataatgtggtgggactcatgcaatgttatgtagaatttttcgctgggccggcaaaagaaaaccggccaagttttgtattaagaaggagagaaagttttacaacagaccctaaaccagaaatggcttaggctacagaaaaatttcacatcgatttagacaacagacaagcacagctgctaaaaccttagcaaattagccgccagcgattgcactcagtagcccagcagccttccatgtttccacttgtcgacaattgtggcacaaaggtgaaccgctgaagtagctcgtccatcaaacacatgcgcattcctttccttccaaactatccatgttaccaagataaccccagcatcaaaggtcctccgatccatcttgtgaactgatttgcgcgcttcacaccaccaatccaacaggtcatccatgggggaaacacaggagagtcccaggcgactcctgaccctcgtccaaactgccctcgtgtactcgcaagcatggaaaatatgggtgcatgattcagcatccttcccacaaaggtgacagtatggggccaagtgccatcctcgccgctggaggttgtccgccgtcaggcatgctccacgcatggagtagtagtatctagctatagagactgggaaaatagagatatggaagggaatgctttggagaggggcgcaaggctgtaacttgtgggtgtttgaattttttttcaaaaactatttaccctcccatttttaatgatctaacatgtcaatatgttaccatgttaagtgattactgggatgcaggggatgggctatatctgtgcttttgttctgattcaacttaatggaaacatactttacatcttctttcagagaaatatcaactcctccagttatcatgcagaatgttttatgtataatttgttttatcgatctggtagatttgaggtatagcataaaggttcattagagaaccttaactagctattaatagcagtagtttaaaaagaagtgttctctattgtacatgttcggcttgtttatttgatctggacttgttgattacatcgtttcaaaatttgttgcttattatcttggttgttgtataacttttcattgtgatgataaaaactaaatatgtatcaagtttgtgtaactgttgtgcaaaaaggtattgtgtttatttacccattccttatctttgatgtacaagaaacattttgctaatgtttcagctatttcgctcaagaaggccatttgttgcagaaattactgatgctatgggcaatgagatcttcacggtactatttcataaatttattactgcactcctttgcaaatatgttcttacaccatttaattcaggttcgacggccattttggcttatcaacagttccatttatgcagaagtgaatggcaaggtatgcaaaaattctttacttgcttctacaaatttatttagatgggaatgttgccatcagattgtttcacggaatgtactgacattgtttcacggtttcaatttggttaggaggtaggcgtagtccacagacgttggcatctctggcgtagaatttatgacctgtacttagggtaatttgatcttctgatctctatgttcccttgtttcatagactaaactcaaattactcaattctttgtgtaccttttagtattgctttactgcctgacagcttggtctgccaccttttgtgttctttaggaataggcaatttgctgtggtcgagaatcctggattttggaactggacctttactctcactgatgaggatgacaatgtactagcccagattgatcgtaattggaggggaatcggttttgaggtaaatatcttttctagtagagaattgtcaaataatatgctttttcttttatgttggtgggcattccatgcttatctgacaagaaaaaccagatacatatagattcattatttacagattgatagtaagaactgcccttccaaatttatatgatggtgttgcttttttacattgcttgaagtttttttttagagaactcatgaattatacaggacatgctcattgtgcagtattttgaatttgctttgtggtgactccacatattgtgcagtttgatccaagctgatggcagatgccacaccccacatcttttcagagtgcattgtttcatttgttgcgcactgctacttctagcctgcataaaaaatgggactgaacttttaaggactgaatgtatctctggttcactgcagctcttcacagatgctggccagtatgcaattcgatttggtgatgcaggactaaaccgtaaatttggtctcgcttcagatgtaagtgctgttctcattttagtacttcacaagccacgcattgagtgaatatttttttgttgcctaccttgcctagttaactgctatttacctgatcgagatccatgtcacaaattatggtcacagatcgatgaactgcatgttgttcgccagctgagtttacctgaaagggctgttgcacttgctcttgctgtgtctctggattgtgattatttttcaaagagaggtggctggtaagtgccgtgtgaacttaacctgtgtagacggttcctctgtaaattttggtttaactactgttgttgggaaactgattgaaatgccctttttctttcaggggacttccttttcttattgccacagagtagacgcatatgacctactaccattttcagcacaagaggaaaaccgatgaccttcacattgttgattagtgaagaaacttaatgggtcgactattttgcgcgattgagatcgttaccgaagcacgaaacggttttttgtgtcactgcatgtgctctgctcacttcacctgtcttctagtacgtgtgaatttcgaaagcagatgtcacccgaagaagtttgagcttaacatccaactcgattccgttttgctacagtacaacttgcagcgatgcagtagctcttcattagatggatctttcagctttcaggctgcaacctgtttcatccttatgccctgtggatacgaagcaaaccccatgtatgatggagacgtgcattgaagtctcgattttactgcaggtctctgaggtgctataccgctgcgagtgataaattactattgccatgcgactctagcggtagtaccgtaactctagtaacattgtaccgtcgtcagaactcagaatctagtatctggcatcctagctacaactctcataatccaatacagatacagtactttctacaggggaaaaaaacaaaatatcgtatcttttccttaggggagacggaatcgaactcttaacacgcgaggtaattggagtgatgatgtgccttcgtgcgtggaaagatggttagatggaggtgacagggaaggaaaagccgtccggaccggggagagatgacacggatcgcgtgggcttttcgtacaatccgacgttctcactgtccataaggcaaagccttgcaggccgaaaggcgaaagaattgggcttttcattgtggtagggtctcgtgctctcgttctcctttgccatctcttcgcctacaccggcttcgtccctctcctgatcctctcgtcttcctacgaaaaaaaaatgaaaaaatgctagtgctgcctacgagaggcgtcagctgtagtaacttgtacagctactactttcaccgaattgttctcgtcgggaagcgtggggggcatcggcgtgccagtagttgttatttccagaagaacagcagttggtgcgagcttttactctggaaggtgtaggagcgtcgggtgtgtgttcctgaaaaaagttagaagttagaaggaagttgagagtttaaaaaaaaaagttaaaagtttatgtgtgtaggaaagtttttgatgtgatatgatgtgatggaaagttgggaatggggaggaaactaaacacagccgttgttgtttttttttttgcctttcctttttcatttcaaaaactcaagcctacttgaatccttgctagcagtaatagttgtaattcgaaggttattgagccgaatagaaaaataacgacacaactgctacaatcgtgccgcggcaaactacaatcacaagtaaacttcatctcttaactccactaaaacaacacttagactatcataaggactccccttaaaacatcgccttcaacgaggaaatgaggcgtgcacgcgccgtcattgtcatgttccaatcaactaggatcagaccattggttttcacctagggaaattccgtgaactccagacaatgccttcaagaagggaagaacgtccattgccaagtacaaccaattaaggccaaacttagggatttaaccccggagtcaaagaattagtaacaggcaggagtaccaccttaacgaagtccactagcattggttgccccatcattctgagacagaacctccataccttccaaacttaacacaatcacaaaaaggccataaacatcatacctgcatatttctatagatacccttacaaagataatgtcgcgagaagccgaaaaggtgcatgcccaaaatccatagggtggatctaaaggatgtgacttagatgtaagcgataccttgaatcgaagccaagctgacgatgatctatggtagatctgaacgtcaccgccttatgatgaagaaaacatcattacgagaagtagccgctaaccattggataagaagatagtcggcgttgtccgcccccttcaattgcgacgaggtgaagatgtcctcgatgccggcgaactagagaatcttcttaggcacgcatgccgctacgatgcccaagccctcgccggctccaagcgaacggtggaagtcgcacttgccggcgatgtgcaacttccccatcttgttcccctagtagccacaatggaggttggcgacgatgacggtgtttatgaaaggtggtgtttacctcttcacttgacccgagcatgacacgctcgttgcaccgtccagccgccgccgttgacgaactcatccaatagtattcgctgctcagcgcgcacctgtgcgataccccgccgctgccttcaggccttcattgcaccctgcatggaagtgtgctctggcggcgacggcgagacagcttcactcggcaagaaggcgcactcctaatcgccgatccgcaaattacggattgatccgtaatcaacacgtgagcaaaaaaaaagaagaagatagttttgataaaaagttgcaacttttaaaatttagtcatgatgttaatatatactgtagtctaccctccgtctcaactaaatataatcctaacagcgaatctggatatatgcgtgctcagatttatagttaggatttatttatttttctttcgagagtatagtagatgtaaacgagtgaacatttgcaacagtgaaattttttgtttttgctggcatgccttgtgtggattcctttttgataaaaaaagaactggtagcagtaaaatcatatcaacgcggccaatacactcgacacggtcacacaccaccgcggctgcctctttgccttccccatacaaagggtccagtccccgatgatccaaaaaggcccgaaccgcagcgtctcggttctttcttccttttacttctcacagaagctgaagagactcctccgccatcaaacccctctcctcctccctcatcccactgatcactccggtttctccgcgagcagcgaagcgaccgccattagactcgacgcgaccgcgactccggcgaactactactcctcctcctcctcctcgctcttcctcgcgaatgctggtcgcggcttgctgctactagcctctccaccacccagtttggtcgatgagagagaagggcccctgccgcggcggcaacatgggggagagggatttgggcgacatcgtgctctcctggtcgctcggtgaggtcatggacgacgacctctacagaggaaaggtgattgatcgatcctcatggctgctaatgattttgcgcgaggcagtgttgctgacctgagcaatttgtttcgttatttttttattaaaaaattcggggtgtgaactgcgagatggatgcatggggttttcggtgtacgatttttttttctaaaaaaacgcaaatattagggagtgacttaacatcaaataattaaataattaaaaggggtgaggcttcgaaatctaggtcgtttaggccaccgccttgtttagctaaccagaagacccctaagcgtttctcgtacaatttgttcttctatgtttacctgggagcaagctgttgtatattgtagatgttttgtgagtcgcttgtagtgtcctgttgcttaatgccttgttctgttatagaagctcactagtcagtagtccgtacgtcctgtaacctctgtagtttggagtgttcggaaatgcagttgatactccctccatattttaatgcatgacgccgttgacttttaaccaatgtttgaccattcgttttattcaattttttagtgcaaatatgaaaaatatttatgtcatgtttaaagaacatttgataatgaaccaagtcacaataaaataaatggtaattacataatttttttgaataaaacgatttatcaaacattagacaaaaggtctacagcgtcatacattaaaatatagaggtagtatatgttctgattgctgtgtacgtgcaacgcgatcaataaatggtttgctactttgattatgcatggggatcaggaaatcatacgtttggctgcaggaattcga

SEQ ID NO: 11673 - DNA, 2939 bp, Oryza sativa
atgaaacaccaaagagcctcttgtgtatacttgactcagcgactacatataacctgctctctgattccatctgttcatatcttggttcaagaaacaataaaatgactcatagtcaagttgggagaataactatgcttcttctccatgcagcaaggttggatgattcgttgatttcacagcttgtggaatatctagacagaggttctgagtgggcaactttttttctatcgttgaagaagtatcttgacaatggtgttagcagagacatcttactcttggacttcaaatttgctcttgattgcacttataaggcaaactggagggctgaacactacatatccccgatatgctatgtagatctcattgagtgccttggctttttggctacaacgcatcttgtactgaatgactatatgttttgcacaaaatctctgttggccaaaatgatgaagtgtcgcactaccaagggttactttgagacatgtatggctcctagcacagatatcgatctgggctatgcaggtcattcagcacggtgtttcatatacctgtcagttaaggatcttttgggaagcaagcgtatgattgtagagtgggttcagaacacctctactccaactagttcttatgttccaatccttctgagattagttatcacactttatcttgtgactgtaaaccaagacgatggagatttgtatgaggttacagctttcctcgagaaaaatcatgtttttacggatttacctcctgagttctctgaaaagattagaaatgctttgaggatgaagtctcgcacagtgaagaacttcatgagggtatttgctgatgcccttgcagcaataggaactcgcatggtagttatgggtgatattaagaaggcaatggcacataaatgccagccagacttgaatgctgatatgattagcagtgtggatttgagtgatgctaagaaagtaatggcacttctttcaacagagaagtcaagtagtttaaagcaggaacctcagctgccagagatcaaatctgtttgtaacaaaatttgcaacgctacttctggtcacttccctttgacaagtgtaggaggtagccagaagagtacaagtaattttaatttgagtgatgtggatcatcctttgttggagaagtttgaggcgtttcaagtcaatatgcctcaaaaggtgagttgataatttggtaaattcgtttggtcatcttcccttttgttcaattgtttaactacggacagcgtttttctgcagaaaaatggaagcttaatttctcaaattcttagaagtcccctttcctggatagagcaaagagctcctcctgtgcaaatgttagagttgagacacatttgcaagcaagtcgaagaacagcatgttaggtaagcaaatatggttgagttgtgtgacctcgtaccatccttgtgctgcttgccaacgtgtataaaatgtggaaacgatcacctgagctcatcatgttctagcagcttaacacagtacttttcttgtcggttaatttcgtgtgttctttaaacttcatctccatttttctgccatcacagggagaagagagctttgtccgtgaaggatctccattcaaaccgggaacatggtgatggtgaaaaaaatattgggaagatcgtcgacgtgcaaggaagccaatctaaccctgacagagctagcgaatggagtggatgctcagatgacgagcaagagacgggaggaagtaatgtggtgcagtcgaccaaagaagcaccagccgctgccagctccggccccagctccaaaaacaagccgcagaaaaagaagaaatctaagaagtccaagcgtagcggcaggaagtagtctctgttttgttttgctcttctgcctgaccaggcgtcggatggccttttttgcttacaccgttgtaagtccagcagcaaggccagctttgcttaactggatgtactccctccatactgaaatcgtttttgacagcgacacggtctccaaaacacaactttaacttcctgtttctataaaaatatttattgaaaagtgatatatgtatacttttataaaattatttttcatgacaaatctatttatataatttttatattttcaatctcaagttgagagatatttataatttatatttctaagttttgacttaaccttatcctaaacgatctcctttacgagtacggagggagtacttgataagaattgtttgcttatacagtgactgtccgtgcattagtggaaaaaaagggaatgctttctcacccccagtctttgtgtttgatttcaaaattaatttttaggggcttttgcccccccttttttttgcacagttctccattcaatgttgctaagaagagttaaaaaaatcaaactaaaattcatccttaattcaagttatgaaattcaaaactgctccgtttcctattatgtctctttttcaaagttagaacttgttaaaagtttgataaagtttatagaaaagtgtaacaacatttataatactaaattagttttattaaaccgatcattgaatgtgttttgatagtttttgttttatgttaaaagtattgatatattttcatacaaacttgatcaaagtttgaaaagaagttaaaggaggttgacttataaaaaaattgaaaagaagcattgtactactccagtagttaaagaggctgtaccgctgtactactaagcaggcggctccgcctggccggtgacggtgagatactccagtaaaccccacgaaaaccctcaccctgaccctgctgctcccccgcggtgggctccccgtaaattctcccccgaaaccgcccgagatggcggctgcggcggcgcggctgttggagagggcgacgagaaccgcggcatcctgctcctccgctcttctccgcagtcctctggattctttctccggacgcttcc

SEQ ID NO: 11674 - DNA, 724 bp, Oryza sativa
aaaagccaagtagttttcttcctcactggtcttatttgttcaatagttctttttgatcgtttgatggtcatcataacctcacaataattttctttcattgttcatctttaggtatgcaaagaagctggatttggaattagtctttttgagagattggttgtactggattttgaaaaacatttgctgaatatacaatatcgcatggatcctcgtatcagcttgtttcctaatgttcaattttatgggaggaagattttagatggtccaaatgtcatgtcctctgtctataacaaagattacacaaacctcccttttggtacctatgcttttataaacatcagtgatggaagggaagaaaaagagggcactggaaacagttggcgaaacctggttgaagttgctgttgttttgcacctgatccaaacaatttttaaaagtatatttctttttctcatcatggtatttctaatgtctatatgaaactacttggataatataacattatatctttatttcttgcttacatgagatattgccctacaaattagagtgttctttgcctacgttgtacagttggctcagaatttcttcagcacatggtccttcagtatttattgtattgtagagaaatataactttactgacttattagctgtcagctgcaacaatttgtgattttgatatccaatgttgagtgtgcgttgtaaactgctttaatctgggt

SEQ ID NO: 11675 - DNA, 7062 bp, Oryza sativa
atttttctacttagaagagattaaatgaagagagagtaggattatctactaatctgaagatagtctataaaaaaactttctacttgaaagagattaaatgaaaagagagcaaagttatctactaatctagagatagtctataaagaaaaacgaggcaatgtattagagagctgtagatacctatgtagacatactattgaggtggtttactattaatctagtttattgttgagatatatatgttttatagagagcaccttactttaccattacgggtgctcttagcaggacaacacagtgcgaagggcacgcaacctcggtatttacacccagcaaaatggccaatttggacgtctaggcatctattctagcgctagcggtggttgcttcatcaacatcaggcactgctttcgttcactaaacggaattgcctggacgtattctacaacagagacgacaacgactacaaattgaaagaaatggcgcaaacaaggcctttggaaggaccatgcaacacgcgtcaacaatgtaatataatacttaaatctgaagggagaaaagcggccagctatgagcaagagtcatttgccaaggagcaaactatcagaaagagcaagagagtgtacaaagtgatgcaaaaggccgaacttccggccttcattcttcggaagaaagtacacattacagcgtgcagggtgaaatgggatttggttcctgtgcagtccttagtatgattgcaacttaagcagtcatactatagctgtagaatgcaaattcaaaagcccaaatttgataagacactgttcatgcagaaaatacagcaaaaaaatattataggaagcctactgtagcatttaatctagaccttccattgagaaattgaatggacaagatcttgtgcagtccctaacgtgcagatgtagttgggactacatctgatcccaatcctgtgaaatgctaacttcttctcatatggaaatatgatgatgttcttcgctttttttttctttagtaattttcttattataatgttataatcagatgcatcagttgacattttaccacatcctgcaatacaatggattttttaaaaaaatatatttaattcaataattaataaagtgaaccttaatttgttttgagccaagccttaccaacttcactctctcacctagcctgctagtcatcatgcttgtggaaatagcaggttagtgcccatgagccaaattgcaaatgccattttgtcaaccggaaaccccatagggttaggttgtcattatccggtttggagtttgctcatcagctaatagaatcaaaggaaagaaaaatcggttgtcattatctggttcgcggtttgcccatcggctaatggaatccaaaggcaagcaaaatcgatttacctcgtgctaccttggaacaggtacaaccgtacaactagtggagtgcacattgggaaactaacctatcatttctttataaagtttggtacattccaaatgaattactttaaccaccatgttaagaccaaattgacttctgaaaggatcagatatttctttctgagaaatagttgaacagacattggagttcgacaacactctccaattattcctagtatacccgtctctgggtttctacatgattggcagctcagagcaacacagaaaatcattgtcatgaaactggggactgagttataataactaagggaaaaccatttgtgctgggaggactaacatgagagggccctgaatgggagtagaatggtgtccatgctttcctcctccttggtaatgttatcaaggctcaaactcggaggatgcttcgatgtttacatctgcatgctgacctgattcgcagagcagagggtcttcttcggtctgcaggaccaagtgttgtttcatcagccttctcagagcttcaagttcaattgccacctctatcatccttggcctctcttcacctctcgaccttaagcatcgtaaagccaattgtgcaacggttttaacatgtttcgtgccagcttcctcagctacttgagaatctacaatttccaacaactggttctgatagaataacatactaaaatgacatgctagatttctcacatcatctgtcctaccatcagatataggtttctgtcttgtcaatagctcgataagaaccaccccaaaactgtatacatcactcttctcagttagctggcttgtttggaaatattcagggtccatgtaccccaatgtcccctgcactaaagttgtcacatgggtctggttgtgtggtattggcctcgaggcaccaaaatcagacacctttgcagtgaagttctcgtcaaggagtatgtttgatgacttgacatccctgtgaataattggttcctttgtagctaagtgtaagtatgcaagtgctgatgcagtttcaactgcaatccttaggcggtcctcccatgaaatcaggacagatgtattttgaagatgagaaaaaagggccccattggtgatgaattcataaactaacaagggaagttctgtctcaagacaacagcctaatagctggaccacattcttgtggttcacttgtgaaagaatgaccaactcgtttatgaattgttccatttggttctgatcaactcgctgcgccttcttgattgccacaaccatttgattggataatatacctttgtacacgatcccaaatccacctcgaccaatgatattgtcatcactgaagctgttggttgctttctcaagttcactagaagtaaatatccgcagtggtgcaccttgagaaaacatcttctgcttcagcaacattccaccattctgcataaagtatctctgtcttatcttcgcaagttttctcttcttaacaagccaatgggtccagaatatgagaacaaggagaagcagtagcagagctagtccagtaactgcacagacacagaaaattcagggatctctactggatgcagcattaatcaactcaagccttcaaattgaatgattacatcattcacatggcaaggcagtgatacagggcttcagaaacttgcctattccaatcaacagtgtgccaattccattgcagccactgccctccttcaagccatcacctctcatccctgctgggcacatgcagtagaaactccctttcgtgttgatgcacttatgcgtgcatggcctcttaatggtgcattcatcaatatcttataaaaaaatcacatgaaaccagacgaaatcaggcatgagctattcttgctgactactaaattcaagaaacataagctgaggtaactagcatgaatgtattcgttaccttggcatccatcgggcccttgcaagtaagggttcccctgaaacccaagggagcaattgcagcggtatccaattccatttgatgagttatagcagtaggagttctccttgcaggcatatgacatgaagcggttcgcctcctcacagtagccaccatcaatggaccactcaagaacaacagggcggtattgaggattgttcctgttagtgttgctcagatcaacactagagaaaacataggagttctgctccacgatgaaagcctcgccacatgttggagtattattgacctccttgggcctgctgagctgcccagttatgttagtgaactccaactcaagcttctttaaccccttcggtactggtgcttggcagcaagccacgccagagcacataccatcaattatattgcttttggtggagcaaaaagaagcacagccaccgctatacccgctgctaccgttcaatagcatggctaccatatcacaacccagagctgtaaatttgtttcttgtatctgagaacgtgaaattggtcccctcaaggctgaagctagaattccttttgcactgctgagaagtggcactggccaagatgcttacaaaaccatccagcaacgagatgttaagaatcccaaacatgatattgttaatgcgtaccatcgggccagatgaggcacatgtgatctcaaacccttgggctggggcagggttcccaccaagaataccaaagggataagggatgggaatattggagcacttggaggtgcttgattccatcgaatgaacataagatgcaaagatgcatgtgaggaggagcaatggcaggagaagaaggtaaagcatcatctttgccattagtctttaacaagaaaaaatagaccatggcaatactgctatcaactaggatggaaagtttggatcatggaggagaatggactggaaatcggaggttaaataggtcacaggctcacaacctgaggaaccacttggcacgttactcaaaatattcaaggggaaggtgcaaggaatggcaggaaaaagctaacaagcaatttttctggcttatcccttttactgttgttgtcatattgcccttgactcaacggtagacttgctgcaagcatctttcagctaagatggagacatatgatcgcaagcactctcttccccaggtgcatgggctcacaatgaatatgaatatatcatattttttgaccgggcgaaaacagccgggttgacgttaaacagaaatgtttggtttcagactgatgaaaacatgaataagcttaagtcttaactaaattttactagctgacacaacagacaatggccatctgtttacaatctcaaggctgcctaccaatcgaagcatcgagcgctaaattttccatcttatacgcgggctaattgtctttttgtatagactgaactatccttaccttgccgtcagcgtcagacacagcaactccagcacggccacagcttctgcacgtcacctcatcggcctcaactcgcgggaggcggagcccgccaaccacctgcagttcagggccgtagggagattgattacccgctccctcgtcgcctccgaccccgcccgcctggccggcgcccggcgctcccccatccggcatcgaataagcccctctcggcggcgatggcgaggagagagagagagagggggggggggaggggggctggggctgggatggcggccgctttcacctgcggctgaggaggcggtggtggatgatgcggcaatggtgtgtgggccggaggaggagagagggggatagggccataggggatagcttgaaaaagcactatatcagtttctcaagttatttatcaattttatatatctccaatgaaattaagttgctactccgtagatcttaaactttatcaatattagcacatatgatattttttttagtaataatcctgaaaactgtgaatctgtgatggtgttcttctgacaggttccagctgattgctgaatagttaattagcagagtaatttgctcatttacatgtgatcaattgaaatgattcaatgctcatagacaggtcacagggcatgctcgtgtgtgctcgtcttcttgtttatctgatgaatgctaaaatacagatcaacgccaacacaggacatggaaggagagcaaatatggttcagtgagtagcaaaaaagtgattcagttttctcatatacgtgatcaacattcaatgctaaaatacaggacataaattggctctctaaaaagtatccacgaaatggagagctgattatgtactgcagtagaacaagcagtcaaataataactttggtaatgtaaatgtatgaagatgtatgcgaagtatatcacaatcctagatctgttcttgacacaaagaatgccatatataacacactgtagaagttttcagaactaccaaatctggttattgacatatactgtgatacgacggttaacagcgaagatagactgtttacatcatttggtgtacctgttctgatatgttacatcaactacctaaatatgtgcttctgaacataaaggtgaaacaggttcctctaaacagtaaataactactacatctgaatataggtgtagcaatatacatgacaacctattgattgttggctatgtatgtaaaaattcaactaaacagacatggtataaaatgctgaagttagtactttacagtacaggagacagccaatccaagtagtggtcaccattcttattgctctgcgaacaagctacttcagggaggtggttggctattctccggagaaggtatccatcagattgcctaatcaagatatggcatttggaatggaatacaactaatggttctcaatctttacgtcatccactgcagtcagagatgagcacgtttgatgtatgaacattatgccacagcaatgccagagaatgtacatataaaagttgcaaagtctgaaccagatcaaacaatgccaaccatagcaagctaacgctgtgcatcccgtatggcaggactagccactctggcacggtgagcgatagaaagagatggcctcccaacagcttccattatcctactgaagacgacctttgcaggaacacacgtgacaagtggaattgctccctctggtttgatcaaatcacccaaaatattgtgcagctttgcttgacgaccttctctgtgatgcctttttccaattgaaatggaagaaagggctctgactttctgacttgatgagcttccttttttggaattagagggcttcttttgagatctatgtgacaatgggctccgaaaactggtgttgcttcgttttgaaagcctaaactgctgattgaagggggtggaggatctactaaagggcggattcatatcccacaggccctcatcgtcaccatcatccaaggtcacccgtgttgaattagaacgtggaattcttggcatagcagtccttctgcctgtacgccaagcaggtgatgcagaggtgctatgttccagaaaatcatcactggccaaaacaaggtggtcagttgaaccatcttcaagtatttcaatttggataggatgcccaactattgctttgccattcagtctgctcatcaaagaaaccaatggaacatgctccccttgatagccagcctgtacattcaggtcaacattaaatagcattgggcccatgtaaccaagttgggaggaataattttgtcgatacaatgaagctgggctgcaggaat

SEQ ID NO: 11676 - DNA, 6457 bp, Oryza sativa
gataaggaggcaggcagtaaaaaaaaatatctccctggatctggcccagtagagttcttttggtaaatcctagtactccgctagactttctagtttctagtttctacaggtaccacagatcgattgtttgagtcaggagattaaacaagtcttggttatctttctgaagtgttactgaggatgcccatatcaagagtcataaatcatgtggaagcatcaagcatgggagatctttactagttttaagcatactaactagaactaccatcaaactccttacggcaagaacacatgtaaagctccatagtccataaaaatcagtctgaaacataaaaaccaggctatataaccacggaagacaaaaaaaaaaaaaaaaaaaaaaaacttttgcgcgtgttcagagcctgaaacttcagaccaagcatgaacagctacggaaggaagacgagcagaagtgataccgtacctcggggaggcggccttgccggccaggacgcgggcgacgaagcttccagcgatcacccgccccttggagctagctactgctgccatgcaaaggtcgatcggacgagagaggaaggcgaaggttcagtgtttttcttgggcggcgagattgggaggagaagcggaagagtgggttttcaatcctgtggactgctcagctaccactccggctacttatagcgcccccgaggaggatgatgccggtacaccagcgtacagtcaccgtgacccggacggaaaaagagaatggtggtatattacggcgattgggaagccgcagtagtgacgaccatttggctaattgcgatggccgcagccaactaaccaacggctgaggcatgctgtccctcaacgactgcatcgatcttggccttcttggacactccgtccgcgctatgccgtccgattatatgactaagatcacgccttcttttatttcttttttgtttctttctttttcctttgatccttttcttttcttttttttccctttctttccttttctttttgacagagccacgcatttcaaacatgtgtggtgtgacttgtaggtacaaagaagttaacagctgaattccaacgcgaatttcaacactttgtactgcatggttatagtacttcggagaaaactggtccttgggaatgtttgtttgatgttttatagttatataaaacacaattaaacacctttttgttttcacaaaactgttaaaggagttttaaaaccttgatctagaatttcaaatggttggcactataaacatcaagggataagagagagagaagggttgagggggactgcatgagtaacgtactcgtttaccactccagccccttttgtgcaataaatttctcattcaaaatggcattctttttcctgcaaatgaaaaatggtggacggtcgaatctgtttttttatcactagtagtacatggaacaaggaattaaaggggatcaaagactttttgagtagcgttgattcgaatgtgctgagaaaatagcattgttgaagcattcagatatcgttaacaatcaacttgtattggtagacgtcgacatcaatgtgtttatgtagtgatacagtacagcgtatatagtagtaacattcatactaagcaactaggcgagtcttcgtctgctgatggttaatatatgcttggaaaacttcgtttccttccccgtgtaaataaaatcataaaaaaaaacccaccaactttccatcacccaaaccttacggaaacaaaaggtttcaaatttgaggagtatacatatgcacatatggtacataatactatgagctacgttaaaaaaaaaacgatctatacattctgtctagatcggtttttattttcggacggatggagtatgctgttactaatggagtaggaacgtcgatgacaacagatatactgctccatccattccaaattgatctacatatttttttttggtgaataaccaaagtggtcctcaagtttcatctgaggctcagtttagtccttgatatttcaatctatacatattagtccttcaagttttcattttagttcaaacttatccttgaaccaacaattctcttcataaatgacacttatacccctcatcatttacatatacaagagaaaaattgcatgcttgaattttttatagataatacatagtatatattatgtaaaacgaagaaaaaaaatatgtactaacaagtgtatacgatagcaattgcttaagtttcatgtgcacatgttgaaataatgggaagtacatctgtaatgttgtttattcatgttggctttctcttttctagtatatagatgtatataaattaagggcaaaaaggacattttctaatagaaatattgactagaaatagccatatggcatattaagtggacccaaggatgatttcaagccaaaacaaatatttgaaggacctacgtggacaaaatgaaatgtaaatgaccaaattgagtcttcgctgaaacttgagggactaaattagctattcacccttttttttaggttatttataaatgatctacatatttgtgtttattcgttaagtctattcgttatttgtgcattggagtaaatagacattgatgcatacatccatacacacaagtatttataatccacatgcaatatcttgatttgctattggctaagaaatagtggggatggtgtatgcatcgagtttgttgctagaataaatatagtatgagagagttattagtttttcttgatcttggtgtacttataaaatatatagatcaatttggaatggagggagtaatacttgcgaattgaccagcagtgcatgcattggagattgagggctacataattaaaaaataagcataactttgcttagggtagacccaacccaaaacactagacatggttttcataaactccacatcatcaagaaactagtattatacactactcttccaatgcaaacaccactattctatacttcaatttaatgctacttagagcacctgcaatggtaaagtaaggtgctatctataaaacatgtacatctcagcaatagactagattaatagtaaaccatctcaatagtatgtctacatgggtatctatagctctctaatacattgcctcgtttttctctatagactatctccaggttagtagatagctttgctctctctcttcatttaatctcttccaagtagaaaaatatgctgacatggatctcttatagagagcctatagataaccattgtgggtgcccttatctcacatgatgtcttggatgttgtatagaaacaatgtctcatgcaagacatggtttccttttctttcctcatttattcacttgccacatcattttttttcctaggtgacaacttatttaatgctatggacaccatcttagacattgggttggggatggacttacccagagcagaataagtacgtgcagcctgtcttaggtctcgtcttccaccggccgccgttaattagctgattagctcgtacctggtacagtttctcctatcaagtgtactgtgtagcccacatcggaatatgccatgcgagatccggattattaagcaccgactccgagtgcgtttctggtcaattagtactcgctacacgtgcctgcccttgtgtgcgtgtacggaagtcaggacgccgtgataagttgataatggagccacgaacgcatgatctgtgctggtaaattaactgtcatcgttttgacttagcgatcattgatcattcaacaggcagtactgctctgatatcgtccagatattcatggaccggagtttccagaattccagaattttcaaacatctctcaaatttgtcccctcccatgtctacgactacgaggaagaggccgaaaagagcaaaggcgttggcttgccagtgcaagtttctcccgataggtggcgtcaggctatctgccgcaaccgattggtcgttgggaattcgcactggcggagcgttactggtacctgaatacatgatggcaccccaggattaggataagcacgggacagtgggacatcgatcggcacgggcagtagctacctttgcgtgcgtgtgcgccgcgcacggttgaagccttgaagatgatgcacataggcacggcaccagacgcagacgatgatgcgtctcggcagcctaaagatagacccgattcggttgctacttacatgtgtcatagctgacgccttctccgtgccaggtttcaggtttgtccatggggagccagaaaagcgatcgatttgggcgcggttggggtcacctggtcacgaaagcgtgcgacgtgtcccacggcattggtagcgccgcgccgtgctcggttgccaccggccgccaacgcgtgcgacgcgatgtgggagccggaaccagatgcggcgtgtacgggttatggcccgccggccacacgtcgtgctcctgcgcgatttatcggtgactactcgtagctagcagtatagtaccgtagtattcccaaacggaatctcgcaaccactagagtgtacagtaatttatcccggcacagttgctgatcgcgacgctacagtagttccggtacgatggtggaagcgccactgaacaaacaaacatgccatgtgattgaagagccagcttacgacaattaatacggcatctcgccaaagcgaaaaccatagggccaacatggagtaaaaatttgttctcgttttaagttcatgcatgtgcccgtgtggcccgccacggtttccccccctcgatctctcccgacgtacgtgcgtgggtataggggtacagcacctgtcgttagctagaatcagatccccggctggaaaatggaaacacccgctcgtttcgccaatcgctgcaaaagtggaaacgcgatgagatggcgcctatctagtagctaaccccaacaacgatggctcattccggggcacaccagccgtgccgtgccgtgccgtacaacgcaccgctcggagccggaacggcgtccctttcatgagttcatcgtcgtcgatgatgcttccagcgcggtgtgttggcgtagtgcgcgagcgaacccggactgagataagatcctgactagtcacgtcgtgatcggtggagacacttttatccgcggcttgaattcgcacgaagaaaaatgaccacaccggcctaagagctttggacggtcgtactcgtctcggctgccaccgcgcttgaagtcctatcagactagcgctggccctgactaatcctgcacaaacattatccttttcaaaaggaaaagggaaaattgtcgggtttttttataactaaaattgtcggtttgctcaacgttttatttcatgatggggagtacctatacatctttcgaaagaattttatgatcgtatcacacagatttttaatttttggattaaaatctgatagatataataaaaagcaaaaagcaattaagaaacaccataatggacactaaattactatatcctcaagaaaaagaccaaatccaatacaaaatttaaaatttacatgcgaagattcaaaaattacattgtaacttacaaaagttgcagtgtaagtttcataaattacactgtaacttacaagaaaatgcactgtaaatttgagtgagaaaatcgagtgagagataagaaaaaatctttcgagtgagatatagcaaaattgttcatgatgaaacagacgtgccagatatttctgtgtttccacgacacacgattagcgtccaaaacttcggcccacatttggtaagaggtagcccaaacttccacgggtttgtggactaaacaccagaacggactctattttggataggactaaatccactaaagtcctttaatattggtccaatctgattcacatcctttaatcgtagcatccgatattttaatcccctactattaaaaatcggtggaaaaatgatttttttttatttggttttgagggtggtttttagtgacatggttcgttgacctaatccaaccagttgagttagcatatggggcctaaatgttagggattgtttgtcttatatcatatatcctctcgacctttcggtctcttgatccccatttgtctcaatgacgctgttgtcagtcttgatgacatcaggtacgatggttggatgctacatcgctgaggacagagaaatggaccgtggatcttctctttgtgttcgcccgcctcggttagcaggtcctcgatcaagaggtggcatcatagtcgtactcgagcatggcgtggaggctgacctcgatccggatagagtgcaggtcagcttcactcgaagatggtggcccgaggtggagcccatatcatcatgcacctcctcaatctctttgcgacgctgaggattccttgagcttagtgtcgatcaacctccttagctcgatgatgcagcgtcggtttccccgccaaccatgcaaggcaacatggtttgcgacgcggtaagg

SEQ ID NO: 11677 - DNA, 3078 bp, Oryza sativa
tttatatccgactcccacgctcccttcccccattttccccatcgctccagctccttccacaagttccactgcaattctgcaaacgaaccagctcaaatcgaagctcgaaacagggagagccagagaagcgcgcgtccgcgacggcgagtacgcaggcatggacttccacgcgctcccccgccgcgacctgcaggcgctgtgcaagcgcaacggcgtccgcgccaacatgaccaacgccgccatggccgatgccctcgccaagctcgccacggtaagccccgtcaactgttcgaccggccgtcgcttcagtcgcccattgccgtcctggattttgtttggtgcgggatgctcatgtgctacctcgccgggcccttcgcgttccaggttgatgggatcgaggagttcgtcaagcaggcagtcgccctgccaccggcgccggcgaccaagccggcggttaaggcggtggcggaggaggatccgcgcgagaagaaggggagcccgctcccgcgcggccgccgcgtcacggtcagctcgccggaggtggtcaacctggacgacagcgacgaggaggctccggggcagagtaaggacgcccctctcccccgtggccgccgcggcacggtcaggtcgtcgaagctcatcaggccggacgacggcgaggaggagggcaaggaggacgaaaatcggggcgagaacgcgcctgtgcatggcgaggggcggcgcggtgccagcaggcgcgcccgggccgagcccgtggtcgctccaactacgaggagaagggccgctcccactagtaagatcgagacaggtgatgtggctgtggaagcgccaccggctccgaccactcgccggaggccgcagactagtacggaggctgcaccggcaccaaccactcgccggagggcccagagtactgtagcagcatctgcagaggagaaggtgccgaggggtagacggacgacgaggagagcagcggcgaagaagcccgatatgctggaggaagaaaccagagaacctcttgcgcctgagcaaaatagcgcacacgaggagccagtgcaggaagagcaaggtgaaatctcaattctatcaaccatttcgctcgaaacttgtaatagatccatttcattattatgtagttttgaggtctgaatttagtgtgcatgttgttcaattggggaaattcaggaattgaagtggaggtgcctgcagaaactgtcgaggcagtagctcaggaatgcttgcctgaccctgatgcagtagttgaagagaagccggtgcaggaagaggaaggtgagatctccgttctgttaacgatttcactagctccatttcattcttctttagttgggaggtctgacttgagtgtgcctgttcgattggtaaattcagggatagaagtggaagcacctgcagaaactgtcgaggcagtagctcaggaatgctcacctgatgcagttgtagaagatgagcaggcagctgtcgaagctgaacagactatcagccaggatgattcgcccatttttggcatcgtgactgggacaattgttggagcgagtgaggaagcccctgtgtgcaacagtgagtgtcccaagaacatggcgactgaagagagttccgacacagttagtgaagagaaggaagccgtgcctgctgatgaggtgccgctggttacggtgacatgcggcgaagcaactagggatgctgaattgcccaccaatattggcaatgccaaagaagaggatgatgatgaaatggaggctgcgcatgaggctggttttgcggttgaagtggacggatctgagactgttgatgagctgattggtacactgacagagcatgctgacaatgccattcagcttaatttctcagcagagctcagttgtgctgatgaagaggcgggagtatttgccaccgatgatctgcagcagagctcagcgactgtgaagactatggtggcagacagcgaggccaacgaggaagaggatgcactggaagcagaaaatgaggtcggttttgcggttgaggagaaggaagttaggacaggcgatgagccgcatgaaacactgtcaaatgatgctgacggtgccattcagcttggggaggatgcactggaagcagcaaatgaggccggttgtgcagttgaggagaagggagttgagacagttgacgagccacatgatacagagacaaatgctgctgaaaatgctcaagaggagggagttgtggccagtgaggatctgctgcagatttcagagaccgagcaagatgaattcaactcggatatttgccatgccgttgaacacaatgaaagggacaatgtagaaagtgtgtcatcagagagggaggatgtcagtatggagaatgcgttcaccggtgacctcacactgaagttcgacggtcctggagacttgggtgatcgcaatacctctcttttggaagagggagctcggaccttgccactatctactgaaacgcccaacaatgtcactgatgcggtggtcacagctgccgaggaaatggtgtctgaaaccatgggtgtcagtaataagaagagtactgaactagctgcaatggaagacggcaacgaagtgaaggttgtggagaagcagaaggaggatcctgtggaactagttaaacttagcctaaggactcttagagccaagctcaaggagcagctgactaagcacaaggtaatgacacctgaccttatttatgcactgtagactatctattatataattaaaggaatagaaaaaggagcctccacgttcgctctcatggcttagaaattctcacattaatcagagaaaaagaaaaaacagagtccatatagaaatacaatttagaaatagctaaaatctggaattaaaaattaaaaaataaggaatattagaagaggagactagagtccatatagaaatacactttagaaatagttgaaattcggaattaaaaaataaggaatattataagaagagtatagagtccatatagaaatacaattaggaaataatagaaattcggaactaaaaataaggaatattagaagtagagtatagagtccatatagaaatacaa

SEQ ID NO: 11678 - DNA, 5215 bp, Oryza sativa
tcgcgaactaacttaaatataaccatcacttgctaatactttatccaattatctagtagttcttgcgttctctcgtgagaatctcatcgcgtgatgatttcgggcagtggaccggtgtcgcgcatgtgcgcgttaataaccatttgatagccacgaatcaattagaacatgtacaatagcaggctataaaccagctataaccacatatcgagaagaaaagagaagagagaagaaagcggactatagatttatagccggctgcaacacggactccaatacgttatgagtatataagagataggaccgaatattaatgatgtagtatatttttatagataactattatataaatgggctattagattgactataaatgatttggagcccagttggctatactattgaacttgctcttaacaagtactacaactgcagcgtttgaaccgatctcgcctcgctctaataacacttcatcttccgagttccgattgtccggggttggtgagttggtctgttggtggccggggcgcgggcgcgcttacctgttctccctcgcgtggagctctttgactacgcccgccagctgcgcgtgtgtataaccttgcttgcttgcctctcacagccgaagtcgcaggcgcagtcaggagctatcgggaaaacgggatttcccccagctttccaaggttcgcgggtcaatctcgcagtgatactccggcggcggcaatggacgccggcgaaatcatcgtggcccagccatcgccgcggctgtataaggtatgtgaaacttcatgagcgagctcgccgtcgacccaagcttagggagatatagggattgatattatcggtgcagcagtgcgtgattagttgtttagtttagcttgcttcttaatttgagggctttcatttggagtttataatctgattgtttggattgcttttgtgcagagtttgactttccggaggatcgcgacgaaggaaaggaccattccccaggatgaagagatgaaggtaagcacctcttgatcacgtttgaactcgtcctctgttgttaattagtcattaacttgcgtagttgtagtccgtagtaatagaaaaacttggcgggcggggtgcgatgtgtgatgatctgctgcaagaactgagaaatttttgcgtcaaaaaggaactgagaaatttttggataatggatcacataactcgtcttctaaactctaataaatggatgtatacgaccattttgtgcattcgttttagtaaaaaaagcagctacacattgttttcttgtttttgctagtactttaatatagtatacatgctatattgttggtttattacggattccatttttcaggtgtcctatggtaataattttcgcaagtgtttttttttgaattcatcactgcagacaacaagaaatatgatttaatggtcaaattgattaccctgcaaattgtgttgtgacaataaaatgatattctcaatttcaagaggccagcatgcaatttctactatcataaaatagtgaaattaattgaccgtatcaagaactgtacacaactgttaggtttttcaagttattgtactagaccgtatccacctgccagatttttgttctaaaagcgtaatttattttatattaagctattatcaatatctcgatgcaaatgtgtgttcttttttattaaaagattctttcactagggaaaaacgtccggccaatcaatttgtcccagcatagtcgccctatgggctatttttataggccttaggcagccgtacgccctgttgaaaaaaaaaaagactcccagctcaaacccagcccaaaacatctgttaatttggttttacatgtaaaatcattgggagcccgtagattcagaaacaaaggtctcaaattggatatttttcttaatttttatattatttcatattatttctaaaagattaaaaaataaattacagttttaaagttttgcaaaaatttactcctcccgccctaccgtagagcgatatatgtgacatggcaatccagggagggggtgccgtggcaattttgcataaatcgccctcccctaggacgatttattcttgagaaggagccatctataaaattgtcatgacgcaaaatttagtgatgcatcgggtgcgttatggcaattttacaaggctcccacccgaggagaaatcgccttcctgtaaagtgatttatctttcaagggggccacctacaaattgtcacggtatacctcccacggggtgccatgccacatagattgtcctattgtaaggtgatttataagtccacttttcgatatgtaaaattttaaaatgataatttattttttaattttttttaaaaaaataaacaaatcctcaaattgtgcaatcttttgaggccttatttcgttgcaaactttttcttcaaacttctaacttttctatcacatcaaaacttttttacacacgtaaactttcaacttttctatcacattgttttaattttaaccaaactttcaattttaacgtaaactagacacatcctgacttcgttcgcagattcgcagcccgaggttccaggacgaaagcctcactgcgccatttatactagacaagaaagcgaggagcaaagcgccaacagtggtcctaggattcgagtgcttggagagcacagcatttaacggcattgccacgaacctggtggtgtacctggagactctcctgcacggcagcaatctcgcgagcgcgtccaatgtcacgacgtggttcgggacgagctacctcaccccggtgttcggcgccatcatcgccgacacgttctggggcaactacaacaccatcctcgtctccctcgtcttctatctccttgtaagcatcaatgcattttgcaagatagtatgttgaaatccatatgtccaatgtgcttaattaactttgcaatccatcgtctgtgtgcagggtatgatgctggtcaccttctcggcgttcctgccgaccaccgcgctgtgcaccgtggtgggctcgtcgtgccagcagccacttcttggcgcgcagaccatcgccttcctcgggctctacctcgtggcgttcggaagcggcggtgtgcgcgcggcgctgctgccgttcggcgcggaccagttcgacgatgacaacacggccgaccgcgagcgcaagatgtccttcttcagctggttctacatctgcgtcgacttcgggatgatcgtgtcgggccttttcatcgtgtggatccagcagaacgttagctggggacttggcttcggcatcgccacggcctgcatcgcgctcgccttcggcggcttcgtgctcgccacgcccatgtacaagcgccgcatgcccacaggcacgccgatcaagagcctcgcgcaggtcgtggttgccgcgtgccggaaggcaagactccgtgtccccgcggacactactcttctctacgaagtccatgacaagatcaaccagtcgaagatagcgcacaccgaccagttcggctttcttgacaaggccgcggtggtcatggagtccgacttggaagaggaatcgaacgacgtcgcggcggatgcctcgtggaggatctgcacggtgacgcaggtcgaggagctcaagatcctgctgcggctattgccgatatgggcgacgagtatcgtgctttcggcggcgtacgcgcagctgaacacgacgttcgtgcagcagggcgccgcgatgaacatgcggatcatgtcgttcaccatcccgcccgcgtcgatggtgtccttcgaggtgctctgcgtcctggcatgggttctcatgtacagctccgtgatcgtgcccatgctcaacagcttatccctggccaacggcgagccgtcgcagctgcagcggatgggcgcggggcggctgctcatggcgttcgcgatggccgtcgcggcgctggtggagatgatgcggctggacgcggcggggcgcggcgagtccctgagcatcgcgtggcagatgccgcagtacttcgcgctggccggcgcggaggtgttctgctacatcgcgcagctggagttcttctacagcgaggcgccggagtccatgaagagcatgtgcacgtccctggcgctgctcaccgtggcgctgggaagctacatgagctcattcatctacgccgtcgtgaacgcgttcaccgccgtggacgggcggcccgggtggatatcggacaacctcaacgaaggacacatggactacttcttctgggtcatggcggcgctgtgcacgctcaacttcgtcgtgtacagcgcgttcgcccggacctacagggtgaagctggtcgtgtcgtgattgttcgttactcccttaccatgatcaggttacacgcaatcgtggtcgtattgtgttacagaagaatcttgtactcctagctagcaatagcgacagccgacagtatgtgtaaagttcaaggaaaaaaaacaaggtttgatgggctgacagcccagcagcttcctttatgggccgtgtgcttgccaccggggctgatcggtccaaaaggctactccaataaaaggaaaacgtccactttgattcgtaacgtttaaacccaaaatcgggtataaggactctctcaactattaaaatcgattaaaaatagcccctacaataatactattaaggatggtatttgctgatgtggcatgctaaccataatcaaaaccacgagttagtaagaaaattgggaatattacatggagtcgacatgtcattctcactattctttccctttttatttccctccctctctgctcccatatctctctctcctccctctttcccgtcggcagtagagaggacaggagcgatggcaggtgctcgaggatggtggcagtaaccaccagcattggtagccataggtgtcagagaggtggatggggaacaggcgacggctgaagaaacaggcagcccaatctcacctgatatgcccacaccgctcctggcccataatccccataatcattatggtcacaacgatagctgaaccccgtccatgagaagttcacctgcccatccatggaaagaaaggaagcaacggtggtggtcggaaggtctctttgagctcaagctcatctccttgtccccatcgtcggtgaggcccttcaagctctgggatccggcaacaaaagaaaccaagctactctggctctgaatggcactcgatggtaaagttcctgactagtcacgcatccaga

SEQ ID NO: 11679 - DNA, 538 bp, Oryza sativa
ctaaaagtgcttggcctaaataggttactgtctacgaacaatttgtttaggtaggtcatgttgattctggcaagtcaacactctctgggagactgctacatctgttaggaaggatatcgaaaaaagatatgcacaagaatgagaaggaggctaaagaaaaagtaagtttattattgttgttattgtactctacttgatcctgatgttccattcatattctttgtattatggaaactattttttaccagggaaaaggatcatttgcttatgcgtgggctatggatgaaagcagtgaagaaagagaaagaggcgtgacaatgactgtggccgtggcttatttggagactaagaagtaccgtgtagttttgcttgactctccaggccataaagattttgtaccaaatatgatatctggcgcaacgcaagctgatgcagctattcttgttgttgatgcttgcactggttcatttgaagctggcatggacggtgaaggagggaaaagtgttggccagacaaaagaacatgctcagcttattag

SEQ ID NO: 11680 - DNA, 16361 bp, Oryza sativa
  unsure (1)..(16361): unsure at all n locations
taagctgagcatgtttttttgtgtggcaaacacttttccctctttcaccgtccatgccagcttcaaatgaaccagtgcaagcatcaacaacaagaatagctgcatcagcttgcgttgcgccagatatcatatttggtacaaaatctttatggcctggagagtcaagcaaaactacacggtacttcttagtctccaaataagccacggccacagtcattgtcacgcctctttctctttcttcactgctttcatccatagcccacgcataagcaaatgatccttttccctggtaaaaaataatttccataatacaaagaatatgaatggaacatcaggatcaagtagagtacaataacaacaataataaacttactttttctttagcctccttctcattcttgtgcatatcttttttcgatatccttcctaacagatgtagcagtctcccagagagtgttgacttgccagaatcaacatgacctacctaaacaaattgttcgtagacagtaacctatttagacaaagcacttttagaataacaaaattgttaaggaacatatgccatattcagaacagaagatgagtatagcatactattgcaaggtttagttggctcagcactcctgattcctcattagcgaacatccacttctcaggcttatattcttcaggtaaataaggttttgcagtatctacttcattcttttctaaacctagcttctgtatgtcagaagaaagtttctgggccacatcctcattctgcgcagaactgctagccctactactctggtcctccttcagctgaaaatgatcagaaatcaattgagctgtcctctcgacaggcacatcttcaggaagtgcaatgtgtttcacctttttcccagcgcctgatgagctaccagcagatgtgtactgcgtggaaccaactgttgaataataaaataatttaaattaaggtgacaataaaaaacacagctaacaggatttttttttcaacaggaaggcttatcaaccaacagatgatacaactggttgggaagatctgcaaatcgagtacaaataagtcacccttacaaaagtagcttggttcagtctttggagtgcatgacacgtgagctgtgggttgttgttgcccaacaggtgaaacatttttaagtggtatgcaagggaacaatctgttcagccacactaagtaacaatggtgcttgggaaagaaaaggatcaaaatctgcttcccgcacataagatgatctaatgtgcttcttttatatggtgaataatgaattatccttttcataactcaataaggtgttatagaaggagaagctagtttaaaggtagaacagagttgcatacacaaaattgtaaagcatctaccatttgcaccagcagtacctttctcatgagatatgctagcattctttatctcagggtcaccatcaaagtctgtagtacgagtattcactggcatcttggtacagtcagatttcggcatcgaaggtgtcccaaaatcacttggtatcccatggactgtaatttaatagttataagtacactatgattacattagaattccttgttggaatacaaattgtgattcaaagaaaattagaatgggtgaagcatgttaccttttattgaaccatccttggcagatttcataaaggattctcgaaaaaccccacacatctcacaatacaccatgctttcatgattatcgaacatgcacatggagcatctccaaagcacaggcaccgtacttgaggacttcttcgatgactctgcacaatagagtggtgacataatattagagatcaaggagctgtactaggcgcagttagcttgatatgctgaataaatcacaaaaaaaactcactgtacaacaacaaagtgaagcattcagtgcatggagcttatgaggaaagcaacggttaaatgtataggcatatgaattatttcaaaaggcctcaaatatatagaacaataatatgcatatgcaccaggattcagtaagcaaccagtaggtaaccctggtagttctaactggcagccagctatgtttcgattctcacccaatttgggtagatttgatttgcagtaagtttttattttgatggactaactggatgaatgatatttgactcattccaaaaaatgcatgttgaataacaatgccttcgagacaacaaatatctgaagtgcatatgatgggataaatgggcaaggaaattagagcaaggccaggtaatcggcagacataagctacacgatcactgcatttgtttgaacaagcaatgctattggaagttttagagtaattaagcataccgtgttcttatttgcatattcaggcaatagaggatgcgatagcaagtacgaatgcaggatggaaacaatgtaatgtcattaacaacatttaacaccactgagcaaattatgataaccgggtgaacgctccttgtaacctacaccgccgtaactaacctacacgagtagatatgttaagtgtgcatcatgaagcgactctaatagctatttcaccattcttacaagctgaggtgtacactgtctagtactagcttcaaaccttcgacataatacctttctcctccttcacggggtgctgaatgtcgtcactgtgcccggtctcaccgtaatcatcgtagtcctcatcatactcatcatagtcatcgtcgtactcgtcatcgtagtcaggcccagagacaaccttgcgtggcatcctgctgacacagcggcgtacctaatggggaacaaaaattagtgttattagtaaaactaaaaggttaataaaaaggcaaagagaaaacctagcttccagatctagaagagaagataaggttgaggcaaattcgagagaaaaagggtgtgggtagaacgggagggatggcaaagaaagaggatgtgcgtcggcacgggtgctcaccggaggcgggtgtaacatcccgagtatttagctatagtcttagtcatgctaatgacttggtcacactggctgagagcggtgttgattgagccacgatgctggctaggacctataaatatattgattgttgttttattctggatattaaatggtttctcgattgtttccttgtcatttatttatttagtcatatccatatgcatcattgatttattcttatttagactaaacctggtgaggagtgggataatttagttttggttaaactatagtgtagattagtcgtcacgaagcgaggtacacatatgcacagtagaaatcacagttctttatttacagtttaccactacaggtctgcatacatacatgcatataattgtacactagaaattttatacagtatgcattctatatattgtgcatatacatggtgattatagatatcatatcataaactgaaccatctcagtcaaagattcaataattatttatttttcagaaaaactcttgagttctagggcaattgcatatcagtccctaaattcgtagtagtcttaaattttactaaacttgtgggactcaagtgcaaaagcactaaacatgtcaggctttacaaaatttctattgatcgtaaatatagcttgagattatcacaccaaaccagctttgttgaggtggcagcaagcccttatccaaccggcatgcaagcaggtgagtcacaaaagaaaaaaattatcccatatatcaacccagctactagagaaccagtcttggttacatcggttggaaaccaatctcaagcagcagccatagtaaaatactcctcagtcgcaagaacaatcaaccacagaatcaagcagtagtagccagcaattcggctagagactcagctgaagacagagaaataatcataggtagcatatcaatagtaaacacctcagtcatgcaacaccacagccgtagcagcctagagtgagcagcagaggagactagggtgactcagagagagagagagatagttgctgttgtagttcattagtttagtacaaaacaatcagagcaaccatagcgaccatggccaggaaatcatatagacaaatcaaagtagatgagtaggagatgcttgagatccaggagaagcaagaatcttcaaatcaagaaagagaaaaggaaactgttgtaaattggattaggaggcaaaaccagcaaggaacaagaaaccaaataattcagtagcaggtcagggtttcaatcaagcaggaggtacctgagcttcaagaggagaggggtttcagctccaggaggaggagctgagttggtacatcaactgcaaggggagaagctagagttccaataggagaatccttgaaccggagtccagggggagtatctgtagaaaccagagaagagaaaatcatacaaccttcataattatactagagtcattaaccaggtaatctgcagattagaatagaactaaaatcatatcatggcatgattcttgtgtgatgcatatattagtatgcgtaggacttgggtgttgcatttgcatccattagaagatgaaccagagcatcttagattcagtaaaatattcatattaaatagtttgagcttcaaaacagaatgtgtaactaatatgatataaatattttcatctaaatgtcaagtagaagataaattctggctgagattaattatgtcatcatgtagctaatagaagaaatcagggttcagtacatgcatgggattattgatgctttattgatgcaagaacctggctttgatcataagaatctggatagtatagttatatatgtgtaactaaaattttactatagataaacaagtgttcaggtgataaatcaagaaacagtagaatgtatataaagatatcatcaatcttatgtctttatcaagtttactaactgcagatttttgtccatagtacaaatattgatttttttcgacatatagataaaatcagattttagatttagccatggacttggaaattagtatctgaaccctagcatagatttaagttatcatgaaggaggacaactatagcaattctgtcaattaggataattcaattgtagataaatcatttatcaattagtaagcagtaagaaatagtagcatcgcattatcagccaaattatgttaattagctgtagcaagaatcatcatgcgaatggagttcttaaaataagtaatattgaatctataggattaatatggttagcaggtgtacatgtatatttttagttttgaatgcaaatccataaaccgaaacctatgggcctctacagcaagtcacctagaagagaattatatcaaaatcagaaccgtaggagttggtaatataaccttgctatgatcaataccataaaacacaaaattacttatcagagcttttagtaatcagtatactttgtcatatagatcaatattcattgttcataggtcatttgatcacttttgtcatactaccatactgcatcatgcatgtaggaattaatattgaattcctgtattatgctctgaatagtagcataggggagctgatcctgctaacatattagcatatagcagatttcaatattttaatcaccattgaatacaagcatatataaggaccactcctgataatgtgatttctatttttaatcttatattgcaaaagcgtatgcttgtgtatgtgggtattttatccattcatagcatctaggcatcatttagccatagtaaaacaattagtcaagaagagccagcaagggcagtcatgagtatatcaccatcacgagagttatttaggaaaaattcacaaacatcacccatacaccataatccacagtatattaccacacacaccacacaggagagcacaaatatcatatcagaggagcagaagagagaggaagaatgagaggaagaattggacactggggtgttcaccaatggggatagggtgcagccaccagttgtgctgtgttttccaccggccatctccatgggggctgcagcagcaggaggcggatggctagggttagcaggagcaggctcgtgggagccaggggaaccgattcgcggcggcagcgggtactggagggttaccggagttggagtccggcgaccggagcgggggagcgcggcggcgttgatggcgcggcctgggagagagcgtgagggaggagaagagaacgaggaaaaaaaagagagagagagagagagaagaggaagaatcaagaaggtgggttaggtgggttgtgttttgttgggcttttgctaatgggctgtagatggtggaaactaagatagtgtttggcaaatgggaaagggaaatgattttccacccatctttaaatcctaaccatttattctccctctttcatttaatcctaacccttcatttatttctcaatcccaattctatcccccatttcctattatccaaacacactctaaagaaattaagaagtagagcttggataaaaaagaaattattatagaatatttaaattggtttaaactctttaaaataaattcttgaaaatcttgatatattattacagtcactggtctattcattttatcagattggtaatttaagtacatacaaatacaacttaactttgcatatcataatcctaatagaagtatctccttcaaaatatatcttatgaactactttattgatcaaagaaagtaaagatgtatatttctatataaatcaatataacttgtggctattaaatatatttttctcttgagaagcaaattttcttctaagtaaaataactaatcttccttaaaatgaaagtttaataaaagtaagtccataacctatatagatctagtatgtgcattcatgttaaatatatcatgtgcatcgcattcatataaatattcttgtatttagttgtgttttattgtttctttcagttgggcgtttatcttggatttctggaaatcttcgttggtttattcgttcttcaattttgggtatctcaggcaagtccaacacctttgatcaactcttgttatattttcgtaattgcaatctatatgtatcactttgcattaaattatattttctataattgaaataaatatgctgatggattggattgactggtggagcagtcagtcatattatagatgtattctgaacctgctatggtggtgggggttcagttgcatatatttatcatcataaggttaaataacaactgttatatggcattcaagcgccgtagcgatcgtgtcgaccatatgacctggaatgggacaggctggcttagtagttctttcttaatggctttatcctgcgggcttaaggactttcgcgaatcccatgagcgtgggctaccgatgagggttgccgttgttgcgggatccgatgattcgccgttgttccgggaatcacccgagagataattggcagatgggattgatgaaaagcttgtgaccttagccttgccgacatataccataaagtgtgcttaggcgctggcgtggtggcggtgtagcacgggtgttaaaaggtttaaggcttctatgggtacagcgacacacctctgcagagtgtatgaattgtgatatgtcactcccttttcgggtagaaactgcgaatgcggcaggaaaggaacctatcggaggttctaatacctatggtgccttatatgtagtagattttataattgcttaatatgagcttttactacactgtgtttatgaacatgcataaaacttccttgttggattatgggatttggagatatatgtattatgcaagtggattatgggcatatatttgttggattgctatagttggacttgttgagtaccaatcgttctcatcccctatatatatttgttggattgctacggctgttttgtacacctgggtgtacatactccctcctccttgttggatatccattagttggtaatgaatagttgggtttaaaaaataatgtttaattgttttcaaatttctgcatgcatgtcggttgtgttctatttgttttttcaaattttcatatgcatgcacaccggacggtgaggaatggcgacattcaaaattttatatatactttttgcttagttagtacaagtatatactcttttcactagtatatactatattttttcagtacatattttgttctgtttatagtagaatatactatttgttttcagtatatactgttctatcccagtatgtaatgcttttttaatccagtatatatatacacttaagtcgggcatatactacttttatagttagaagtagtataaacgcatatttaatttgttttaagcagtatatactttttaatgtagtagcagtatattatatatactaagacatgcccatcaggatcacatactgatactggctcactggcaaatgctcatagcgatgttatgcatagtggttcattagtctggtttcatttgtcacataccgtttcattcttccggcttcttggtttgcgtcatccggaaacatgttcatcaccagcatgtacggctgccgttgtgaattaatggagcaatcaaatatgttatctttgtgctgatagtttttaaagacggtatatactattttttatgttagtagcagtatatactgtttttaaactaaaaaaagtatgtactggccacatcagtatatactatttttttaaagtttgtaccagctagtgtatactgttttttagtttagtagctgtgcatactgtttttagtttaaaatcagtatatactatatatctagtaacagagtattaatacctaaaaatatgtactaccgagaggtgctattatcgactgagcttacagtcttacactagctagctcattgattggtaccttcactgtagaagctgtcagcaaaatagtatattgcaattttcagtgtgacgcaatgggtttgatctgccggagctctcgccggtccagaaaacaaattgcactgacgcagcggccgcgcaccactcggctgggaacgctgagggtgagggctgggaggatgagttgaatctacgacactgcatgcaacaaagaaattatatgcctaatcatacaaagggcctcgcatcaaacaaacgagaagtaatggatctaattaagcagacaaattaatcgaagtgattcagggaatcttttcggtctacaacaaaggacttgtattaccagcaccattgaagatttgatctggacgggagggactcagatcaactcagaagaagactatatatactacttgtctacctcctccatggatccgccgaggattagaaactgcagcactccattcgctgtcgacggggagaagtggagcacgtacgacctcaccagggaatctcgtcggagatgccaccacaaccgccgacgacgattggtacaggagggacgagagctagccgccgctcgtggcgacgttgaatggctgggagtagtacgctaggattagtcatttgatttaattacgtggacagtttgttgatccgaaaagaatgggataattaagaatcatgcatgttattgtttttaaaaacgaaaaatcaaagcgggtattctaggatgagacccggtagcatggatgatgcgaggggcctttgatgaacggtggatacaagcaggttggagtacagaatcattatatatatatatatatatatatatatatatatatatatatatataaaaggacactcatatagggcaccatggtgcctgggcactatggtatcaaatgcacaaaattgctaaattttttcaaattttttaaattgtgagtatatacctagttataataattcgattcatatctatacctatcaacaaaacaactcaaatttaactttatttcacaatccatgattacatacctaactaattatatatatggatgctatatacctagaattaaaatctaacaaaaacaagttcaaattcagttcaaacttgctttgaactagttagtaaagtagttaatgttaatacctaagtaattgaaaaagtttcatactcatttgaattggttatatactcaatttcaacaatggtgcccgggcaccattgntcaaattgagtatatacccaaatcaaatgagtatgaaatatttggatttttccggtcgtcacaccgatttttcgtccctccataaccccacgcgcacctcctctccaaatcccacatccaattccaatccaatccaaaaacaaaatcttaatctcaatccaaatacaaattggaatcatcacaaaatcctagagaaaacactactacaagatcacaagaacatatttcatcaacaacaacgacaacacaggaacatcacaagcacaaaaacaccgacgctggaaggggagggtgccgccgtcaccgccgtcgtcgtagggaccccgggccgctgctgcctcccctcccgctagatccggaggaggggagggcaccgtccctgcccgccaccgcaggagggggaacggctccgccgccggtgggggagggggagcctcccctcccgctggatccggcggaggggaagacgccgcacccgcccgccaccgtgggagggggagggggaacggccccgccgccagtgggggagggggagcggcgctgccgcggtggagggggagaggcgccgcctgttgggacgccgcgccaccgctgcctctcctcccactagatcctatagaggggagggcgccgcccctgcccgccgcctcccctcttgccgcttgccacagccagccaccgtgggagggggagggggagcagcgctaccgcggcggaggaggagagacgacggcgtcaccgtgggagggggaacacacatgaacctttgtcgccaccatgccatccgccgaagaaagagagagagagagagacgacgccgccgcctctcccgcccacgtcgggccgcagccgcctccatgccgccggatatggcggaggcgaggcccggcccaccgcctccacgccatccgggctgcagccgcctccatgccgccggatttggaggtggcgaggtccagtcggccgcctcccctcccgtccccaccaggccacagccgcctccacgccgccggatctggcggaggcgaggtccggccggccgcctccgtccctccttgtaacgccccgattttcgttcgggattaaaaatcaattaataatgcatttcctagaaattaaataaaaagttaatcaatttaatcaagtgaaattatagaggaaattaaaatttcctttaaaaatcattggccgggaatattttgtaatattctttgtgccctaatgtactctccggaattttccgtgaattttcggagctcgagaaatagtttcaatagcacaaagatcattgcatcaattaaaataaaaagaaaacaaataaaatcctccttcctctctttgggccatttttcggcccaaattcctccccctccttcctctcccgcggcccgcgcgcctcctccctctctcgggccggctcccttctcccttggcctgctcgcaaaagtctgttttgcgtccctccttctctcccttcgccgacaggtgggaccggcggtcccacccgtcagctcctcctcctacctctcgccggccaaccccaaccgccattgccgcccacgtcgccgcaaaatccggcgccctcccgcacccgagctcgcatccaaccacatggacacgaccccctccacgtcctccaccttttcccccactcaccccgcaagaaacggcgccggtttgacctccccacgagctccacttcacctccccacttcgccggccgattccgccgctccccggccctctcctcgccccttgagctataaaatcaatccccgtggcctcctcttcctttttcccccttttcctgagtccccacgccctctaccgagctctccacgccgatccccatcgccgccgctgctcctgccgtcgccgcgcctcaccacgtgtgccatcagcttcgccatcccgcgctgcacgccggcctccactcggtttccttcaaccgctatcggaaccacctccccaccgtgtaacctctctccgccgcttgccgccgaactccggccgcctctcctcgccacgctagccaccgccaagccgcgccaccgccacagtcggcttcgccgctccaagccgagcaccagccaccgcctcgttcctctaatccacaaccgagccgccctccccactaccaaccagagccaccgtcgccatttccgcctccggccgcgccgcaccgcctcttcagtccgccccgtgttgtgttgtcgccctccacggtaccgcagccatcatccgtggctcagcaatccctccgtgttcgccggtcgtcgccggactcatctccccgtgcctcccggtgagctccgtcgtcatttcggtcggcgtttcctgccgcaccgcaactccctaccctctcctaacctcttcatttccttccctaggtccctccgaccatcggccgccggttcctgctcacggaacgccgccgaaccgccgtcgtcgttgcctccccgaggagcgccgccgcctcttcccgccgccggcgacctcccgctctgcctcgtcggcccgcacgctcggtgagcccctcctcccgctccccttccctttcgcgtgcatcgccactgcccgtgagcgccgccgtcttccggctgctcgccgccgttcggcgccgccggctgctgcctccggaggccgcacgctgcccagcaccacggctcggccgagccggtttcatgccgtgcccgtgccccagccgcgccgcctcgtggccatccgatcggctttgggccgatccgggccgtcggttcccgtggaccggcggtggatcgcctcggtggtcccggtccacggtggaccggcgcccttgtgccgctgaccggtggggcccgcttgccggcgccgcccctcccctttgatgacgtcagcgaggtccatttcctttgtaaaaataaataataattgcgcaataattcgtgaataattatagaaattcatttaaatggctcaaaacttctaaaattcatatctaattcattcgaactccgaattgagccattcaacttgcaaaattcatctaaaaatgagctctacatgtttgtttagtttttatgtactgttttcttggtttttattagagtttttcctcgttttgcgtgccagcgtgtagttcccgtcgtttcggaagatcgcgttcgcaaggataagagttcagaagatccaagtgaagaagcaaggcaagtcacacactccccttgagcatgttgatcccaatttataaattttttaccgtttacaaataaatatgcatgttttgctaattacatgggatccgggtattacctatctgctcgcttgtgccatgtttacttgatatctgttctttgtcaaccttgggtaataaatcgcctagcttgtgttactttgatgacctagctagtactatatgcttagccatgcttaattaccactagctcagttgatggggtaattacagttttagaccttttagtatcagaatgagctgcgtgctcgagacatctggccatgcttcatggtcgtaattatccaactaaaatgcgtctgaatggtgggctgtgggtgcatggttttgctggtcgcacccatggcagttaaggaccggttcgcgggatgccctggaagaacttatcgtacttaccacaagccagcgtgggcaacggctgggcttgtagtgtagctctcctctagtcgacgcatccaggcaagggtgggcgtgatggagcggggcgggccctgcgacggcctctgtcgcttccggattcacctaggcacgagaggggactgcccgttgcccgctggggacgggggtgaaacctgaggtgtggtgtgcttggctagagggggttatgcgaagggtcctgtcacggcctctttccggtatgtcgtggtggcatgtcggcgcacggaaacgtgtcgtggggctgtgtcttgtgggtacagttgtacacctctgatcagagtaaaactattcgaatagccgtgcccgcggttatgggcggtcgaccagattcaccgtgattagtcccatcttaataaattgactcaatacactgtagttcaggtgggttggttgggcctgttcaacgtggtgtagcgttgatcagtggagattcaatattactgtaattactcaacagttttactgtcttgctcaataaaatgttttacaactgcctttatgcaaatagcctcaaacccctccttgtatccccttgcacgtctgcaccgttggtgtggcttgctgagtacggtggttgtactcagccttgctatttttcccccttttcagaagtgtagtgcttctgagctgaagatggagttagaggaccaaggctcagaccccagttgagttttgcctgtggagtggagctgaagccccgctaggatagcctttttccgctgttgctgcttttgtttcggtgtgaggactaagtgcctcttccgtaagtattttacgctttatttacgtttggaactgtatattacttgtcgttttgtgtaccctggctggtcctggacagggatttaatacgtaaaatagtctgaaaatttgggttaaatttctaggccaggctcgccgttccgttggccattcgtgagctccgccgccaataccgccgtaatactgatctattcctactgctagcactggatctgaggctcatgatacagctgctcacttgatccatgagtgctaggtctagatcttgctgcttgagatggaatttgtgaaggggaaggagacaaagaaggggatcgagaggaaggaggcaggagacagaaggggatcggaagagggcggagaagacgagaaaaagagggaactttctggaccgagcctttggagagatcgacaggggaagagaaaaaataaaataactatagtgggggagagatatcaagaaaagaagcggcgaataaaagaggggaggaaaagagaaaattaaaaaatacacaaaacgagatgagacattagcgcatatttaattgagtattaactattttaaatttaaaaatgaattaatatgatttttaaatcaattttttatagaaaatctttaaaacaacataccgtttagtagtttgggaagcgtgcacgtggaaaacaagacaaacttgtccaaccactgtctaacttgctcattattttatttttaaatatcttaactacttaaaaaatacataattttccaattgttacacgaaaattttttgtccgtataatgattggcgccctccgtccctgcccatgccattgtcgcgcaaaggatgggaagaggcagccccccgccgatgaagagctggagccgcacgacggattccctgtcgcgcacgcgccacctcgccggactgccatcgccaccatcgctctactcgcttgctcggacgtgccggagagaaggggatcagggagaagagaagataatgggattagggacatgccggaacagctgcaatctaggacggccattctctctcccgcattgggtcgcctgtgctgctcgctaggacttctagcttggctgggccgccacgtcttcatgggctggcactatcggctgggccgctgtgcactagcacaagcgcttgtatgccgcacagtgccaggccggttcgagccttttaggccgaaatcagtttattttttaagcaactgatttaattaattttagaattacagaaacttatttgtcactattttaagacatttaaaattgttgggaaattatgatcaattatttggtcactcagtaaattatttttaaataaatgaaaccaatgaaaagatgatttttatttccttaagtgcatgtttctttgtcattgcggatgccttttaccttttttcctttgcagaggatggttaagtcagatctataactgcctcccctcccccgtttgtgaaaatttgtgaaagttggaatatgttttgaacgtgtagaaaatttgaaatatctcacgcatgaattataaagtttgagatacgacatgaatctgaatgtgtatacaatatgaaatatgttttgatatttccctgtataaaatttggagatatttgtgaggtatgtacaaattcaagatttttatgcagcaatcttaaccattcatatttagctgatattcacccagtgcaacgcacgggcatatttgcgcgcgcgtgtatatatatatatatatatatatatgtatatgtatatgtatatgtatatgtatatgtatatgtatatgtatatgtatatgtatatgtatatgtatatgtatatatgtatatgtatatgtatatatatatatgtatatgtatgtgtgtatatatatatatgtgcgcgc

SEQ ID NO: 11681 - DNA, 10524 bp, Oryza sativa
aaatccgcggccccgcagcgcgagaaacccttcaccgcagaaaccctagagctcaccctagggcgccgccgccgcagccatctccgccgccgctcgtcgggctctctccatctcccatccaggtaaacggcacaccccccttggatctctccctctcttaggttgccatttggtagagtttttcttgttgatggaatgatgacgggtgctggaaatgtgcttcgctaatgctagtgctgcgatctgtgatccttttgctgtgagataattggtcttgctgtcgttagtgttagcttctacgcgttggcagtaggttcttggatcgaatgcagcagcgggcgttgggtttacttgaaatgttctgtttttttaatgttacagtttcatgtgtgaatcatagaatatttgtttccgtattgatgaaatggacaaaagtatggttaggatctgaatatgtagttccacgtttacgggatgtgtacaaacttgtatatgttgcattctatctctcctgattggttgttacgctcatttacttgctttgtccttacatgctagtgttatatgttagattcattctgtcatatatatacatatatatatacatatatacatatatatatatacatatatatatatatatatatatatacatatatatatatatatatatatattattccttgtagtgttgagctaacaattaggtgaagagaagattcgacaaaattgatcaagtgttgcatttctctacatcaacttattgttgaaggtgatgaagatctagaagagcaaggtattgttagtgttactattttggtaaaaactaatttcttatggtttttatttaatgagtttcactacaattgtttctgctatgctactttagtgtgcccatttcttagtaagttggttcttactaaggaatgagccgtagaccggtattctatctcggaagtggaatacgtgggtcgctacagcgggaagggaaagcagctagagcgcacgacgacgacacccacatgctgcccgcggagtggatggagaacggcgaaggctagcaaagaagcgaggagacggaagttgaggccgacaaaaaacggggagatcgagttgggggagtcaggaggggaggagagagtatgcggcggcggcggcaaatttcgtagcggacgccggcaccacctgcgacgggagtacgagactaacactggaatcagaaaatatattattaagacattttgaaaaggagactagaaattcttaatttaatcagaagaaaattagagtttaagaaatatgatttaaaaaatttcaatacaattttcagaaattagagtttaaatacaattttcaaaggctcgagtagaaacacaatttagaaattactgaaattataaattttaaaaaataagtattgaaagaaaatccatctagaatacaacataatattaattaaatttcggatctgaaaaatatattaaaagaagagtccatctaaaacacaaacaagattaattaaatttagaaattaaaaataaaataaatcccaaaattagattccactacaatttctaaagagttcaagtagaaatacaaattataaattactgaaaaccagaataaaatatatagtatattggaataagagtccatctagaatacaaaataagattaattaaaattacaatttaaaaataacataaatccccaaagtggatttttatacgaattccaaagaattcaactaggaatacaatttagcaaactaaaatacgagaattaaaataagtaatattgaaagaatagtccatctaaaacccaacattatattaaataaattttcaaataaaataaaatgaattctaaaattggattttcaatacaaattccaaagaccccacgaagttaacccctcacttccccttttatactgagttcggttattcactttcccaactcatatctctcgtttgacgtggcacactttttaaactactaaacaatacgtcttttgtaaatattttctataaaaagttgctttaaaaatcatattaatcttttttaaataaattaactaataataaattaatcatgtgctaatatgttgctctgctttgagtgcacggagtgttagttatacaactacatattctcagaatttgggcgacaatctggactgtttggaggagatgaagatggaaaaagtatactttgactccttcaacaggtatatcgactcctccaactatcaaaaccggtgcaaacaatgtccctaggtggttttgaaggtggttttggctgacgtggcgcctacgtggtggttttgaccaattctttgtcctacgtggcgcttacatagcattagaataaaaacaaaattttgaaaatacatggaacccatatgtcattcacacaaaaaaaaaatatattgtgggacacacatatcatccttcctctccttcccttcttcctccccatctctctcctttatctctctctctccccccggcttttctcttcaccggaggagcggcggcggcggtttggcgcggcgccacggcggcggcctccaccggcgggacgcgtacaggtacggcggcttctaccaccgtggggagggattccatggcaacgagaagcagctggtggccgagatgcccgtcgagccggcaacggcgaccaccgtggtgctccccatcgcggagccagatccggactcgcgccacgatgccgccgtcgcggccgctgaggagccggtccatggcgaggccgatgaggaagacgaggatgagatggcgagtagccggacttcaccggagggatgtttgcgcagaccgttcacatgccgtccgatgtctgtctcctggaaaatcacaaagcaggaacttcaacttcatctcctctccttttgttgcaaggggaacagaacagcagtgacggtgaaagaagaacgggagtaaaaagcttttgttttcacctggagcgccttgtacgtgatgtccatgtctgccaggctctgcagcaagctcagcagctcgtcctccggctgtgaggaaagaaacgaaaaaacgtgcagctcgtgtcaaatttctgtggtttctttgaattcgtcggcgaggtggtgaaagaaaattaaaaaaaaaaacctcagttgctgcagccgccggcggcggcggcgtagagccgctccacgaaaccgtcgcgccgcgcgcgcagctcgtcggggcggtcgtgcgcggcacaggccagcgcggcatccacgagctcccacacgccgctgcctcctcctccaaatgccgccagcgcgcggggcagccactcgtcgtcccgatccatctcccccctcgcggcggcagcggcgagacccgacccatccgcgccggagtatatatcggatctttccaactcagcgccacacctcacaaaccccatcaaccaaccaagaatccgacaccaatcaagaacccaacctccccatcgccactgccgccgctcccgaccgccgccgctctggtgaagaggtcggggggagagagaggtaagggagagagaggggaggaagaagagaaggagagggaggatgatatgtgggtcccacaattttttaaattttgtttttattctaatgccatgtaagagctacgtaggcgtcacgtcagctaaaaccacctaaggatattgtttgcaccggttttgatagtttgagaagtcgatatacccggttttgtggttggaagatataaatcatactcggagatagttaagggaattaaagtatactttttccgatgaagattgatagaagctcctcaaacaggccgcgttgtagcaggctcatgcggtagttcagcccaatatggcccattaaataaaggttgcgttccacttggatcgctaacgttggcagggatatcttcctttttcgggggaagaaatggcatgtagatagacgattagaggtagagcgccaacgagctcttcacgtctcaactttccaagcccaattgggctaaaagccaatgcaatcaaatcacatgaatacaccatacaaatattacaattacaagaaatacaaattaaccgatacgcccgaactccggcggatgccggtggcccggcggcggctatcaggcaacggcagccagtgccggcggcgaagcggccctctcggcgacgacctgctcgtagaggtccctgatcttgagcccgacgatggtctggaagagccccgtgccgttgttgctcccggggaagtcggcgtgcttcagcatctgctgcgtcacctctccgtagtacttggtcgacaggttgctgaggtgactctccacgtagatcagctcgtccagcttgtcgaacttcccgtccatctccagcaccgaaacctgcagctcacaaaaccacatcaattttgcaatttctcctcacatctgctgaatcggtgatgggttgttgataattactacctcgtggccgaagtaggtgtccgggaagtacgagaatttgatgccagggtaggagcaggagagcttcctgccgcaggggatccagctgatggtcgatccttcgtcgaagaggtaggccggcgcgaagtgctcgacgccttccttcatgatcagcttcacgcgcagcaccttgccttcgtcgccgtcgtcgtccgcggcggcgatcagccgcgtcggcaggacctcgatcacggcatcggcgtactgcttctgcgggtctgcacagaagacgtacacaaaaatggatgccagtgttgaccttgttgagctcgatcttttgatttagtggtggattagtgtgtttttaccaatatacgcatcgaagtcgggcttccgggcttcaatgctggccttgatgctctccaggctgtgcccacgctctgccatgtctctctgcacaaatgggacgccgcaaaatgctagtactattcataagtaagagaactgaactctgtcactgttcccgagcaaatcgtgacacaaacagacctgaattttccatgcaaacttgatgtcgctgctgatgtccaggtagatgctgaagtccagcaggcccctgacacgctcatcatacctggagtaacgcaaacacaacacacgttaatgtgcattgcccggcatatagtatagtagaagttgtagatcaacatgagaagaaaaattgcaaaaattaatcacattgggtgcaggccctcgacgacgaggatcttggggggagtgatgagctctggcgggtcgaggaggcccgtggcgtggttgtagatgggcttcgcgacggcgcggccctccttgatggccttcagctgccggtacatgaggtcgaagtcgttggcgcgcgggtccagcgccgtcacgcccctctccttccgccccgcgcggtccagcgagtggtagtcgtcgaggcagatcaccgtggcggcgtcgccgaggagcgtgttggagcccgggttgccgccccacggaggcgccgccgccgccgcggtgccggcgccgagcacgctcgtcaggcgacgcacgaacgtggtcttcccgcacccggagtcggcagccagcccgatcaccaccgtcccgcccgccgccgccgccgccgccgcggagcacgacacgcggaacgggaacgccgccgccctcattgtcctcctccacctcccgcttctcagcaggatggtcgtcgtgctcgccgagctgaacgacctggccgccattgatcagggcgttgcgaagctaggtccaagagagtgagaccaaggagtagggagagcttgcagtgtggtgtccgttcttgcttgatgagttgcttcctctgttagctcgctgtcagctcagcctcagctcagcgacgaaatatcgatcaaatgagttgagctagatgtactgcaggatgcttagctagcttgagatgattgagactggattttcatgggctttctttgtcctgcatacctccatgccgatatctagctagagacgcgcgcagcagggccggccggccggcggaagaagagaaatcttggtggtggactggtggttttcgcggggttgcagattatggtggtcctacgtggtggcggcatgagggtggccggctgaaaacggagggcgccaacgtatgtgtttgtttggtgtatttggcgaattgcattatgattccattggtgaaaatggtgattctcttgaaacacactcggttaaccatacaaagatactgagtactactgattctactcttcctcttttaacgcaccacacgtgagttgtaggatttgccacgagcgcattgctcaattgtttatccgttgatttgagcttgctttaactgcctaaactaactgatagccgcaatcacgcgcgatgttacttgtcactgatgaccaaggctagccatcctagaacagactctgtcaaagaaggtacaaacatgggtttccaccgaggagctggctgaaatggactgcagaagcggacgcgtcgagtattggagcaacacagaagatggcccatagtttgtcaagttgctgtgaacgccaaaacgaccgcccaaactgacccacaggggtgctttggtttccattcaaagttcagggcgctggttctagagaagatccctgccacgctgcatgattgcatgcaccgccgcttctctgccttattgtcaaagagtaacagcaaccgtaccatgcgatcagcaagcataccggactgcggtagcatctttaacagcaggggaaaaaaatcaggtagatagaaattccaggtaggcatcacatacaattgtgcagataaaactggaaacttgcaacgaattgtgccagatgaatctgctttgagttagatggatagtaaaaatcgggaagcacagcatcaagccaacaatccgcaagggtgcatatatatgatccaggtctgaatgcaattttgtgtctattttcccgagcgagaatagccttagctcatttaacggtaaccaacaggcaaaccggcgatctacccaatcacatacggactacagtttgccaagaatcaaaacacctcgttccagacacaaagctatgataacgatgctaacaacctaccccataacaagcttgaaaaggtttcacaataaactgacatgaagagacattctcagggtgtactgatttgtatgcacagaagcgatgcatgaagaggtgtgctactggtgatcaccggaaactttccatcatgatgaatagcttcacttgttccctctgaagtacatgtacactctctgcatccaccgatagagaagtaataaaaaatattaaatgtacacattttgtaccctttaaaaaacaaacaaatcaagtaatgatcataaccatggacaagctgggtattcgatgacttgcaggaaccaaaaaaaaaagcaatcttcaattaacattgagtataaacttggacactaactaataggtaatgaaaattgggcagtacaatggaattgtagtaccaagaaattaggaaaattacttccccttgacatttattttagtgaactatgaattgtattcacgaggtttactagctctgaaattaaactaagaaagggtgcagagcaatgtgaaagcagaagtacttaacttttagtttacatagcgaattactacaatagtttccatttttttgaaactgtggctctaatctcaatgcataataatctacagaaggaatacggaccacttcctcatgcattcagtatcctgacaacaaattactactttattagttactactatgcagatatctataatatggaaagagaagtaacaagtttaatgctttaagcagaccagaggttaagaaatatgtggtgcatttaatacatgcatagagcattcataagttaatatctgccttacattcatttcatgtgtgcaccctgatttaccctaaaataacgtaggcttctcttgtgctaagctaactagtgctaaaacacatatatataaggacagagaaggcgacagatccctcgaagagttatggatagaattgatagctcatttgacagaggggatatcagtttatgagaacacgattttgttccagacctgaagaactccaatgctcagcagtgtctccaagcaaaacagcgcgaaccccacaaagtaaaagatctgcaagaaaagaaaaacatcagtacttaatttcctactagttggcaccttaaggttaattcaaagtgctggacacacaacatattgcagaaaagctatccagcttgcttatttatcaggaggatttgaaatggaatgaggcaattcaactcaccccaattatcacatgctcagaaaaggtgtctatggcagccagtatgcccctgataagcaaaagagaaataaacatgtaatattaatatctcagaaacaagaacatgcaaaaaatactaccaagaatgagctctagaatttcataattcatcagtcaatatttaaataccaaataactgcatattaataagcaaacacttgatataacttacgttaatgattttccatgaaacacaattggcggggcaatggcagcaataatgcaaaagccaatgtggatctgtgccaaatatcaatgaaaagaagatgatatgatccatttgataagcagtagttgtaatgtcaagaaaacataaaaaaacagttttcagctataacttaccaagtaacagagaaagaaccatccaaaactgaacgcactgttagtcctgtttaacaagtaaaagaaagtgtcagatacaataataaagccatggttccagaactatacagcacaaaccatagttcaggtccactgaaatgttttatactagctccacaaaggagcagtgcaggtctgcataaacttttgtgcaaaagagatgcattctctgtaaaatgcactgatggaaataagcaagataactgaaatgcgctaactaaaatataacacctgtagcaagatgcgctaacaaaaataatactctttgaaagacacattaacagaaagagtggtaaagcagaaaaatatacctcatagcacggtagagaggcctataccatatcaagtacgagaggggaattccaagcaaggcatagatagtggcaaggaaaaacagcttcgaatctacaagcataagacaacaaccattaagcatgagccaatgtacaaaaacactttggcatttatagaaacccatgcaacccacctccctccttgatccaacagactatgacagcgatgaagttccatgagaggcaaagcacgatacctgtagattaaaataacacagacaggacatactgagaaaaatcaaagctgcctttgaagcgcaccgtagctaccaccacaattgattaatccagagactcagctagataagcaaacaatgtagtactaccaaacaattgatgtagcaaattgcaataacaatgtccaatctacacctaccaagccagcttgcgaacgcgagatactgcaatttctgcaaattagccggtatctcattggcaatgtcatggtgaatgatcgggaagaatggtggccagttcttatcctccattggcactccagctgcatcaaaaaggaaaaaaaataatgcgaaaatgagcgcactcctcttaacacaactggcaattgaattatcactgagtccaccatcagtcaaacaagagcataccattcctcagcgcttcctccctccttttgatatcctgcagccacaacaaaaccacaatgatacactaccgaatcaaccagcatttcaaaagtttacaagtggaatggagagcaaaaacccaccgcctcccgccgcttcagatctgtttcccacgatgagagctcccttgccttgctcttggagtcctgtgcagcgtacacgcccccaaaaccctcagattcgcgtacgagaacaacaggagaaaggaggggggaaaaaagagggagcactatcacgtaaagcatcttacgcccatggtgtcgagcgggacatcgacggtggcgtcccccctgccggcgccgaagccggcgggctccgtggggcggaacccgtactgctgcctgctgccgccgccgccaccaccacctcccccattctgcagcgccacagccacacctcatcagaaaaacagcacgcgaaaaaaatcccagatctaccaccactccacgatccacgaacacacagtaaccagacaaaaaatcaccccaaaaaaaaacgaagcgtgcgaggagaggagtgtcggctcacggagaaggggttgtcgtcggcgttgccctcgtcgaacgggttggggtcgtgatgcatgccgccgccgccgccggtgacgcgccgctccttcctagggcttggctccgcctcgccgccgcgcgtggaggaggaggaggaggagaacggcgggtaaagcggcgagtggtgcagcgcgtggcttggcttggactcgagtcgcttccggttcaagcggttcactcgcttttgcgccgctttttctcacgtgacgtgactgaattgggggggggggggggggggggg

SEQ ID NO: 11682 - DNA, 8392 bp, Oryza sativa
aaggatggtcttggactgggtgattgggcgcgccacctgtgagcaagcccggaacaacagcttcaagacacagtaccgctgcaacaacgagagctcatgcatggacaggttcatgggagagggctacgtgtgcagatgcaaagcagggtacgaccaacacaacgggaatccatacgaggcaggcggctgccaaggtaaatagtagatacttctaaacacagtgatctaaaaaatatgcactagctagtgaaaacagtttgttatagtttctttctgtttgtatcatggcagaattcaattaccatagaacttagctaactgctatgaatagaactgtatttttctgctttctcaatgtggcttcacactatttatgaagatatcaacgaatgccggtctctcatttacaacaactgtagcgtactctgtcataacactcccggaggatatacttgctcttgccccaataataagactggtgatggctacaggacagggacagggtgcattgactcccatcggccacctggtaaatacatgccatatattttttccgactgcttttgtttaagataatgggatatttttttagattgcatataatcctacttattctagaatttctgttcaaacaaccatattaatcaccacgtgttatttctagaccaattttgagataagttggaaaactcaaaaaaaaaaaaagcttttaaacggttcttcctgggtacttttatgtttgattggatgagaaaagatgaaaggtctaaattgattctactaccaataaataccacagtaagaattttgttccttttaacgtgactatgcatgaacttaggattgcctgggtgataggagctttgttccctttttacttaaagaaatgtcaatatgaattgatatatttcttccggttgaaacgctaaaatgatattgtatgcatctcctatatatggctggattacgctgtaatatttcttctctaaaaaaattctgcaatagttactcgtaataatgcgtgatgatctgaccaagatcatatattctctctctcatgcaggcgcccctacccacaaccaaccgcaaggtatcataaaacaaagtgctttgttcaccacacagaagagcattttaagtgcagtctttctaatcaggaaattattatttgttcaatgtaccgggagaacgttcgaaatcttgtttacaacatctaataatgaaccagtagcggcctaatcatttttcatttggaaaacatctcctaattgcatgcaatttactattattaggcctagatgtgtgcagagaattgaacccttgcacgtactcaaaatcctgcaaggatgagcaaggagttacttcgtgtgtttgcccgaaaggcatgatcggcgatggccagaagaatgggagtggctgcaaaaagcagtttcctttatataccgctttgggtaaatatgctcaacacccggcattccacatcagatcattcattttctctcttttatttttaattcctctgctattaatacagttgtcaaaaatatctcccgtgcagaactgctaatctacagtatatagccgctgatgattacgtcattactaacatgaatgattgaacatcatatagatatgaccagtgtattgactgcattcatgattaatgattcagttgagctagcaaaactagattagacatagctaatgacgataaacattaaaaatgtgttaaggttgtaaaaaatacctcaatattgtttctggacgaaagaattgaagtcggagctcataaataaaccggaaccatgcacaaatcacaatttacaatctgcagacaaatagtcgttcggtcaaaggctcctaatattgattgcaattttatacttctttttacttccacaagatatcattgagaaataagactaacacaagttgtgaatattctcatccagtgtctgcaggtgtagctcttgcacttacggccacgctagctacagtgttgttgtgctactacttgacaatgaagaaaagaaaggtggaaagaaacagagctgagttattcaggaagaatggaggattgctactgcagcaaagattttcgatgatgacatctcaaggtgaggattcatcagcgaagatatttagtgcggaagaactcaaggatgccactgacaactatagtgagagtcggatccttggtcgaggcggaagtgggatggtttacaagggtatccttccaaataataccacggttgccataaagaagtccatcttgtttgatgaaagccaggtggagcaatttgccaatgagattaccatcttatcgcagattgatcacccaaatgttgtcaagcttttgggttgctgtctagagacaaacgttccgttgttggtttacgagttcatacctaatggaacactcttccagcacatccacaacaggagttctttaagatgggaagattgcttaaggatagctgaagaaacagccgaagcacttgactatctgcactctacatcttctacaccaatcattcacagagacatcaaatcaagcaacatacttttggatgagaacttgatggctaaaatatcagactttggtgcatcaagatcagtcccatttgatcaaactcatgtaacaactctaattcaaggaacaattgggtatctcgatcctgaatatttccaaagcagcaagctcacagagaagagtgacgtttacagctttggagtagttcttgcagagctattgacaaggcagaaacctatttctgcaagcaggccggaggaatcctgtaacttagccatgtatattgtgaatttatttaatgaaaggcgtctactacaggagatagagccacacattttggcagaagcaggtgaagagcagatacatgctgttgcccagctctcagtcagatgcttaaatttgaagggagaagaacgaccagttatgagggaagtggcttcagttctacatgggctaagagagtcgtttgacgaggagcaaatcatcagaagaagcaatgaatcaatacagataactaatggacaagacagtgtacatagtgaggcaagaccaattcccagcttgcagtcttcaggggaaattaccactgagtacagcttgccagctgaaatactgccttcttcttacttggcaagatgatgctcttattacgatactgtaaaggaattttgtaaatgttcacttccgtaatttttttaggcaaaagatattagtgcgcacgtctgtgttaggggatcggcaaactgcagccctagacctatcaagggtgtttgtccctaaaaaaattggttgaggccaagccttccaacttccaatcctcaacctctgacctaaccatcatgtactataaatagttgagtatgaaccaacttcttgtcgagcagtaaacctacatggttgatggttaggattaggagagtatacctcatgctttgacttaccccaatgagcgtggcgcggttggactgcttggccgctccgttgctggtgattagtggcaatcccctcgggcttgtagaggtcgaatccatcttcgctcgcgttctaattgcgttttgttgctacggcggcggcggcggcggcgatgcgaggccggaactcacgaggaggacaaaaggtcggacaggtgggcccttgtgagaatatgggttgctgcgacgcgacctatcgaggaaggtgtggttcgttatagacttaaagttgggccagaagcccataaggtgattgctgcgaactgcaggccgtgatggttcggccttactactcggtgcttctgggcgatccctcggccttgggctggtagcaacttcacacagagtcggcaaagtttccttcttgtatacgtggccttagattctcgagctcatatggccatcatcaattcaggtacggcacatgcaacgcaacacagagagcatagcaaggttaataatatagtcgaattgttaactataagattctttatagctttctctcagcctacccatataatagttagctctttatagccgatttatctctctcacagagtttcttggttcttgtgttcaaaccggcggtaagtttatagcccgcttctcctctctctcctctcctccatctcagtatttagccggcttatagtctactattatacttgctctaattcacgagtaaatttacacggaggaaaccgtggagggacgcactcgagatggggagacgatgggaaccagactagccttaatgttgacagcggcacgcattcaccttaatgttgacagcgttttatgctaagttgctaacttgctatctgctcgcagtagctttttaaaaaataaagctcaagccttagcattggccaccacatacaagagcgctaccaactgttcgatccaagtgacgtgaaagaaaaagagcaatgaccagtgtaacaggggcgctaccaaatacttttatcttcccaaaatataagaaattttaaatagatggggcacatctcagtactataaatctggttcatctaaagtcccttatattttggaacatacatttatattttgggacttttacgagaggacaacgattgcaaactgaaacaaaggcgaatcatagctttcgagatttcttaccttttgtccttttaaaaacttatttgttattttacaaatagatttataaaaaagattattctaaaaatataccctattcacggtgccagtattattggcgtcatggtccaacatgacagcgtcaataacaacattgatgttgttgtcctctctccctgtaagtcaagtcattatatgaaggggttcagcgtcactgacaccgacatcaaggatttatttgaaaaaaataaaaatgacctcataataaaaatattaataaataggtccttgacgtaagtgtcactggaataggaaacctatttgtaatttgtaataaaaatattaacattttagttattttttttacaaattgctccacagcaccattgccattggagtcaaccccttcacatagcagcttagctttcgcgaggagcgagggggtaacactaatattattagcgccgtcatattagaccataataccgacgctagcgccgcgaaaagggtctatttcttaagtaggtttttccaatgatttatttataaaataaatttttagatggtctaaaatgtataaaaaaaaattctgtcatagcttccaaaagtaccgtgcgtccatcaagctgtcttcttccaagggcagccattatatcgagtgcatagtgtgcaatatctttgcatgatgggagtcacgtcaagttgcccttctccgaagagcgagtgcatagtgacaaacgactcgtgtgttgagatgagaatcaaaatggaatcaaatagttcaatgacaagttgccatcctttacatatggcaaattttgctacggaacacgtaaaaatcgtgtaattgactggaagatactgtaaaaacgtaataatgcccatagacactacaaaatttatgtaattggttgtaaaacatcggagataatattttataattttcgagacaaaagagaggagggaattttctaagggcctgtttggtacaggtccaactcctaaatttaactctaggagttgggtctggagtggagttgtggagttgtctaaactcagctccacaactctagtccattttgtgagagagctccacccagctttactcccagttttggtggagctgaaactgtttggctgagttccagcttcagaaggggtggagctggagctggagttgtgccaaacaggcctaaatggccagattacccccgggttttgaaccacccatccgccgcgcgcacgacgggcacgacccagacacgccgctgcgcgcgtgtgcaccacgaaacaagtcgaacaagattgatccattcgctaccaagctccggctggtaaacaggacaacacagtatgaaggggcacgcagcctcggtagttacacccagcaaattggccaatttgggcgtctaggcatctaacggtggttccgtcatcaacatcacgcacgaactgctttcgttcactaaacagaatttcctggacgtcacttttacaacagacgacaacgatcacaaaaaaagaaatggcgcaaactcggcctttggaaggactatgcaacatgcgtcaacaatgtactactacgtgataatatagagtcgcacgtctgatcaagccccgtcaaacgaagggtcaaagcaacccgtgagcagagagagcgacctcaaattacttctaacgaaatggtggacctaattaaatagcatatcaaatataagggcgagttataatatggaaggcctgagagtatgcatcccaaaccacattatatatgtatcccgctaaagatagttcatgtggttctttccttgtctaataaagccataatgatggagcattaagccacatcatttatgaattaaatttgaaaaatatactatttatttatttttttcagaaatattcatgatataattttttccaaagatatatcgtcgatgctgcataacagttacacaaaaatgatgtgtgcgtgacattgcgggcggtatcgcgtggtgagattgcaagaacgaacggtctcgcacaaccaacataccatgcgagaccgaaacagtagggtcaattcttagtgattaattagtgtctaattagattaattaatcgctaatcatgatcattagttgagactgtttggagctggcgctgtttttggctgcggtgtggctgggttgctacgcgagaccgcccgtgtcatcaagttatttctgcgcatcggttttacgagattgacggtatattttaaaaaaaaattgtatctcgaatattttttttaaaaaataaataaacattatattttcaaatttagttcgatcatttatatcttttctaaagctatgttattttagttatttctagttcttgaatgattgattgaagatgcaaatttgatgaaatccaacctactatgagtaaagaataaatccagcttcattttatttaccacgtggtgataaaattttctcacgactacagctgcggtattttgtttatctagtttttctctccctctatctgtctgttgatgtgaaattcgttgtacacgaaggctctaacgcagattctaaatcttgataagatttggacgtggcaattattttgatcttgcaactaataaggatgataggaataatcgaaccaatgaaccaatcagctaatagtgtagttgatgcagattcgatggtttaagcatacattgtatggaggtctgatgcaagtagattaaaatatatatcggccaactaaccgatacatctgataattgaaccttagaataatgataactcgacagctagaaactccgatggatgtcgcataaaaacttattaggcttactagaattaaacttataatcagcaatctaacatatcaaacctaactgagagagtacaaaattgaagagaataagaaaaacctatttaaccgatagatctacacaacccatgcatattgtcaacgggctatacctgtagacgggatttgtagagtatggggatcgttagaaccaggttatacgcgagatcatatcaagcagacaaggacaaatatttatattggtttgggctcacaaggagagtaataactctagttcagtttatatggatttatggatgggatgtcacaaatattacaatagggaatagagcgactagaataatctgccgactagaagccgtcaagaacggcccgacgagatatattcgacgaatataacttattgtttctcaatgtggctttagctatcgcttgtaactcgattcccctccatgaatcaggacttgtaactcgatctcatgtccgatcatgacttctggcttcctccggattgcttctcaatcgtacaactcttcaactacctcctttttcttcctcctcatccgatccccttcttcttctcttgcgaatagtagaggcggcatgggcgagcacagcgaaggaggtggcgcttgcggcacagatgatggaggcagcgtgctcgagcactggattccggggtggcgaaggtggcgctcgtaggaacgacacgagcggatctggcggcagcggcgtcggccctcgcgagcacgactggatctagcggcggcggtgtcggcgcttgcgggcgcggctgaatccggtggcggcggtgctcacagcgaatccggcgatggcccttgcagctggatctccggtaacagcaactctatccaggtgctttgagcctgctccttgtgttattcccctttcacatggcgggttcgtcaccttcttcccctccccatggcgacaa

SEQ ID NO: 11683 - DNA, 2036 bp, Oryza sativa
ttgacaatgtggtgctacagtaaatatgtgctaataacggattaattaggtctaataaattcgtctcgcagtttactgacggatactgtaattagtttttttattagtgccaaaacaccccatgcgacaccctatataatacctgatgtgacacgccaaaactttacacccctaaatctaaacaccctctaaaccaccagcagactacatcatctttcatttggaaaaacttaattgcatgcaatttactattatatttacttattattaggtctagatgtgtgtgctcacccagaaaggaacccttgcatgtacccagagtactgcaaggatgaacaaggagtaacttcgtgtgcttgcccggaaggcagaaatggcgatggcaggaagaagggaagtggctgcaaaaggcactttcctttagatactgctttgggtaacatactcaacacccagcattcttcatcagataattcattctctcttttatttttatttctcattcctctgctattaatgcaattgatatataaaaaatatctccattgcagaactgctgatccataatatatagccgttaatgattacatcattattaacatgaatgatgaaacatcgtatagatatgaccagtgtattgactgcattcatgattaatgatacaattgagctagcaaaactagattagacatagctaatgacgataaacatgaaataatgtgttagggctgtaaaaaatacctcaatagtattgtttttgcacgaaagaattgaagtcggaactcataaataaaccggcaccatgcacaatcggtcatagaatcctaatatggctcgcacttttacattttcttttttttaaaggaaaacttttacattttcttttacttccacaagagatcggttaaggaagaaaattaacacaagttgtggatattctcatacaatgtctgcaggtgtaggtcttgcactgacggtcacgctggctacaacattgctgtgctactactggacaatgaagaaaagaaaggtggcaagaaagagagctgagttattcaggaaaaatggagggttgctactgcagcaaagatttttgatgatcacttctcaaggtgaggagtcatcagcaaagatatttagtgcagaagaacttaagaatgccactgacaattatagtgatggccgaatccttggccgaggtgcaaatggcactgtttacaaaggaatccttccgaataggactacgattgccataaagaagtctattttgtttgatgaaagccatgtggagcaatttgtcaatgagattaccatcttatcacagattgatcacccaaatgttgtcaagcttttgggatgctgtttagagacaaaagttccgttgttggtttatgagttcattcctaatggaacactcttccaacacatccacaacaagaggactttaacatgggaagattgcttaaggatagctgaagaaacagcaggtgcacttgcctatctccactctacatcttctacaccaatcattcacagagacattaaatcaagcaacatattgttggatgagaacttcgtggctaaaatagcagacttcggtgcatcaagatcagtcccatctgatcatactcatgtaacaactctaattcaaggaacaattggctaccttgatcctgaatatttccaaactagccagctcacagagaagagtgacgtctatagctttggagtagttcttgcagagctgttgacaagacaaaagcctatttctgtaggtaggccggaggagtcctgtaacttagctatgtatattgtgatcttgcttaatgaaaggcgtctactacaggagatagagccacagattttggtagaagcaggtgaagagcagatatacgctgttgcacagctctcagccagatgcttaaatgttaagggagaagaacgaccagttatgagggaagtggcttcagttctacatgggctaagagagtcgtttgacgaggagcaaatcatcagaagtgatgagtcaatacaga

SEQ ID NO: 11684 - DNA, 2028 bp, Oryza sativa
ttttgtagattttcaattccttcatcgtctctaccctaaccatcatgaatgtggaattagttgagtcaagtgcccatgagaccatggaggcatgagccaaatggcaagtgctaactgctctcgtcaaccagtagagctgtaggtttacctgtatttcccatggaatttaaaggagggccaaagtgttctatacctcatgctttaacttaccccgatgagcacggcttgcttggactgctcggctagtcggctgctccgctctggtaaccagaggcaaagtgtcctcgagccccgatggtcgaatccatcacttccactcgcgttctggtgcgttttggtgcgacggcggcggcgccggggacaaggagaaagaaaaaagtcggacaggaggcgtcccgctatatttccagccgttcgatggattgtctgcgcgatctgttctagttgggccggaactggagcgcgaggaacgtgcaacacatagtttattgttgggccataatgggattgcagcaaacgcccggcctgtgatggtctgatgggattgcgaggaacacggagtggcccaactaatctcggaagcaggggtgatcgaagtcagtagcatcttttggaaacgacactttgattgatctaaattatttagtgtcgagaaattaaaaaaaattatatatacctaaaaagataacagtaagaaacggtaccctttatacgaaaacggcactcgatcaattggaaattttcacgaccatttccgaacccgcatgcactatcatgataaagactaaagagaaaaaggcaatagaatttcaactaaaaattttgagggaattttggcatgccgatgtagagaaccatggtttacataaacaacaaaaactagataaacttttagataaaagtggcatacttttcaaactgttaaacggtgtgtttcgtacgaaaactttctatatgaaagttgttctaaaatataagattaatccatttttcaagtttgtaataattaaaacttaattaatcacacgttattaacacctcattttgcataaaacacttaatttttatctttgttttcattttcaggagattcaaacaccacctcagttgatatattgtacactaccatgggaggtccattgatagaagtggactgctctccatgcatttatccgaggcactgtccctgtggtacaacttcagcggctcaatgttactcattttttcctggccgctctcctcttgaagcaactgcatctcttggcaatcttcagcagattgctgctccataagctctctcaaagccttttcacttttcagggacaggtgttgtttcattaaccttctgagcgcttcaagttcaattgctacttctaccatccttggcctctcttcccctttaagcttcaaacacttcagaatcaaatgcgacaccacattaacatgcctcattccagcttccttcaccacgacgcagtccacaatctcctgtagtcggttctgctgggcaagcgccgtgaaatgtgaagctagatttatcccttcctcttgcctatgataagatatcggtttttgtctagttaatagctcaacaagaaccacaccgaagctatatacatcgctcttgtcagttagttggcttgtgtaaaagtactcagggtccaagtatcctaatgttccttggactaaggttgttacatgtgtctgattggaagggactagccttgaagcgccaaagtctgataccttcgcggtgtagttctcatcaatcagtatattggcagacttgacatcacgatggatgattggcacctttcttgctaagtgaagatttgcaagagctgatgcagtttcagttgctatcctaagacgatgctcccatgaaattggtaccaaatttgtattatgaagttggtggaacagagctccattcgatataaattcataaaccagtagggcacttcagtctcaagacaacagcccaatatcttgaccacatttttgtgatcaatctgtgaagaactatca

SEQ ID NO: 11685 - DNA, 2500 bp, Oryza sativa
tgtttctgctttgcaagcctcctcttcttcactatccagtaagtccaaaagccaagaacaatgagaacagccatcaaaccaaggcttccacctgaaatgggtatttgaatcttgaagttactactacttcatgtagtaatcaattgtttgttctggttgataaaatttcgaaaaagagagaataatattaaagattgcaagagacttgcctacagtagacaacattgttgtatctcttttacacccaatgccttgcttcttgccatctcctgtcatgcccattgggcatgtacaattgtaaccaccagctatgttgatgcacttgtgggtgcatggatagttattcccgtcgttgcattcgtcgatatcttgtagtcaaaagtaggaaacaaagcaaaaaaggatattagaataaggcatgctagccagtaatactatattggcaaccaaacacatgaattgaggatttctcaccaacacatccaatgtacgggttgccagtgtaacctccagagcaattgcagcgatatccagctccatcttccacctcatagcaataactgttctccttgcacatgtaggtttgacgactgcggcttgcctccttgcagttgccaccctgtatataccagtcgagcaccatcggcagattccccaagtccttgtataggtcatgcctagagaacacatacgagtcctgctccgcgatgaacgccttgctgcaccgtgtgctgccgctaccgacggcactcgtgggtggcatcagctggtcccgtatgctggtgaactccaagtccagcttgttgagccccttgggcactgacgactggcagcagcccacaccggagcattcgccgctgatgatgcttccatttgatgcgcagaacgacacgcaccccccgctgtatctgctcatcaccgtgctgttggtgttaccgacaacatcgctgctgtttcttatcattgccatggcatcacagccaacggcggtgaacttgttttgcgtgtgggagaacatgtagtttgtggcagtgaggtcgatgattccctggctattgttatggcactgggaggagtatacggtctggccagtcacacgtacgtatccctcgagcagggagatgctgaggacgctgtagttaccaccgagcaaaatcattgggcctgtttgacgacatgatatcgcaaagcctggagttgacgttaagcttgagttggtggcaattttgaaaggaaatgggatatcaacggagctattggggcacttgagtgggctgatctgggaagaactgctcgaggaaagcgataacaagcagaggagaagcaactgtgcaaggaccatggaggaaaccatgtgtgcttgtttatcagaacgaggaactaaacctgctgcaaagttacaaggatcaagtcatgcgactgagcgtcttcatatacccctatcggaggagcacagcgcgattttcttcctttagtcaacaccattttgtcgtatgttatacggaataaacgtggactgatttgttcctaatgggagggcgtgatataacttgtggttgagtcgaattgttattcaaaggaaacatatgagagagtgattagttattttagaaacttttccctggcagtagcaagctggtatctactcccgctttgatttttttttaaaattctctatgttcgatcaaatgtaacattgaatttattttgataatatatttattttgtattaaaaatattgctatatttttctttataaaaatcttaaaaaaatcaaaacgacttattaatatgcaacggatgaagtatatgatattgcgatatccatgcctataacttgtaagcaccgtcgtcgtcgtggagtaaaaccgattgcaggccgcaagccacacttgacccgattcatttccccgtcaaccaacgatcttgtgcatctcacacacggtttacattctgtggaagagaggcaccgacgcaccgtccacggcggcctctgccgacagtaactcgtggccgtaacagcgcatggttttcgcgctcttccgtatccgtcaacccagcagcggtggcctctgctcgcggcccgcgcgggcgcacggcgccgcacggttaaaatccacaccgaacagggcaacaggccgaggcccgaaccgatcgactcgtgaggtgcgcgcgagccgagatgtacgtacgacgtgtccgtcgcaacactcgttgtcatgcgctcggtgctgacggtcgcgtgtgatcagatcacgtcacacgggtgttgaaccatagatgcgcctgcgcgcgcgcgatgtcctaactaacagacccacccacgcgcccacgacgaaatcaagcctttcttccgagcaaaaagccctgaagagcacatgcgtagcagaggatgcagctgcgtgctggtcgcagccagctcgccgtgcgcaagctgtaatgcgcccatcgatcaaatgacgagaaagcataggtgtgcagaaagaagtccaggggccgg

SEQ ID NO: 11686 - DNA, 5630 bp, Oryza sativa
tcaatacaatttcggcgcatcgccacctttttgctttagttttatttcgacgagttcttgctttcgggttgagctgcatcggtttcgatcttcaacaagaggtaaaacttgttatgacggcttgtgttctcgggattagtgcttccatctttatgatactctaatcttgtttatgtaattcgtcgagttatcatatatcttacataatctctagcaatatcgctatctaatctacaatcggctaacatctgttaatggaggacagccgatcaaattagattttgacgttgatttagattatgtaagatatctaccactctatgaaacttccagtggcttgattgtctagatattgttcttcttttcatacttagtcctgcatcagttgagtttgatctattaagttgtgcttagaatatcaatctctagcctgccttctggttgccgattagtagtatcggagtttcagccgatcttatctgatttaactatattcgctctatatgcttcattgacatgttaaatccgccctttatgtcaagatcttattgcacttaagtatattaggcttttgtttgatatattatacttgttttgatatcttgatatagagtagtatcggagtattagccgatacatgctagatctatctgatcggttattctataaacatatatagtcctgttattaatatatatttcgatctaagtaatttatactgtctcggcatgtcgaccgatctatcccaatcacttgatttaagtatatatcgatataagaattatatattgttaatatctacagccgatcgaatagatttagttcttcattgtctatttacgaccgccgatcgattcacatatgacatcggctcaaagataaatgatatgtcatcggcacttagccgatcagctatcatttatagatttaactgcggtctctttgtccccatttcttgttgattgcaggatcaaattaactggcacgctaacacacccgaaggtgagctttggacctgcactagatttaagcagatctctcaggcctcgtgtttttcatcaacaaatagatgagcaaattttttattgcttatagctggtcgcctggtccttagatgtaatggtagctcattcaagtggctcctattaaaagtattcccacaatgtatgtgaactccttacgggacttaagactctctgtatttctacatcgctgatgcccttatcatttcaaagactagcaagtgagttggacggagagcagattggacagggatgaggcggacggcttggtcgcttggataccgtggcgacgggataccggtgtttactaatttcgtagatacatgccaataggatgcaactgctcaagcctcgcaacttttacgagaggatcacaacgaccggaaattgaaagaagggggaatcatagcttccgaaaggaccgtgcaatatcttcttcacatgttgggagtcccgtcaagcagaccttctccgaacggcagctgtcgtatcgagggcatacgtatcaacgatttccgtggcgatttcaaccgcagtgagcctatcaacgacatcgaatgttccaatggcaagtgccatcttttagtggtttgcataataagtccagctggggttatcatcgacttcgaccagcaattgaccagcacctatcttcatcttactttttttcgagttgagggccttatcttcatgaccgatttgtgatatactttatggtatttcgtacgttccttccgagtgccaaataaactgccaatgatgctagtaccttttatgttccgttaaagttgcaaaattgcacgaagtcacgaacgtgcttgtaagttgtaattcaacgcgcacactgacccatatttatatgtgtataataataataataataataataataataataataataatgataataataataataataataataataataataataataataataattattattattattattattattattattattattattattaacggtgcatagcctacttctattaattagcaccttcaaaaaaactaggacgatgtattttgagattgacgaaatcaccatacgcgtctagatgttgatcggtgtctactaataaaaaatagccataaatacaagtatcattgttaagtctaagtcttaatttcggttggtaggttcctttaaaaagaaccgtcacaaggaattcatatcaggactatctacgcatttcttgtcaaattttaacacaaaaatttaacaaatataattatagaacaaccataatgtaaggggaaaatatatgaaaacaattgttggatccaaaaataaacgtatgagatttgtccacgccaataagagtaaaaaaaatttactcacaaattcaatcataagtaaaaattttactattgatgaaatggacaagtcttagacgtctatttttatccaatggtaattttcagatttccactacatatgcggttttcactacatattttccatgatgtaattacattacaacctatttgcatgtaaatacaacataacttaactcaaaaaatccctcaataaaatggtatttccgtgaaacggaggtcgtaggactgaatctactcacatgggcacacattatgattcttttcttcctcgcttgcacgaattttcaagaaaatttgactgttcaaaattgtgtgaaagttatattgtagttacatgcaagttacaatataattacattataattatattaaatttacatctgttaaatttttataagaaaatttgttgataaatacagtatatagcaaaatcgttaatatcataatacgtatatatgagaccttgtataactttgaactcggctagacaaagaaaaaaatgtacgcagaagaaaaaaatcagtgccattaaaaatagatagcccctaactactttgaacttcagctcaatggctaggcttgtgagattgttttaggcttgagcttgtctagagctctttgtaattaaggccgatcgagctaaagcaactcataagcgtcaagtttttttcccctacctttcttgttagaggctcgtaaggcccaagtctttttacataaaaattccaggttattaatctccaaaacaatctacaagaaaattagcacgactcctatgataaagacgacccattgacccactccaccccggtcctctcgggccctatcacctctcgctcccgtgcatgcaccacagagaagtacagttgagcataggcgacatggtgtgcaggcgagcaagcattccagccgccacagaggcggctgctgtggcttcatggcctctcggcccactggcgctcgcgctcgcgctcgccatcctctcggcgatgccccacgtcgcgctctcccagaacctgacgtgcaaggatgtcccctttcccttccgcgaggaaaggagcggagcaacctctgtccccgggttcatggtaacatgcgggcgaaacaacgaggccatgctccggatcggcgagcatatctacaaaatcgacaaggtgtcggtgccggaacacttcatcaccatacgtgcagggcccatccaacaggtgtgctacgaccgcagcaggaggccgaagcagatcaagccgatcaccagagtcgatccggctccggctccgacgagcttgcaggccacgcccttcaccttctccaggcgcaataaactcgtcgccaccggctgcaactacaggttcttcgctaacttcacgagctcgtcgggtggtggggacgggacacccacgagctgcgacacctggtgcaacgacggaagctccgacaccatcttcaacggctcatgcgccgataaggcctgctgcacgaccgagatgcagatggatggcgcgcaggaattcaacctgacgttaaagccgtcggggaatgtcgaggccagcacctgcagtgccgtcttcttcctcgacaaagacgagcaagtcttcactagcgccggtgatggccggaatatggcactgaaagaagcgctggtgccgctcggttaccgcaagatgttcttggattgggcgattccgggcaactgcgagcagaactccgcgtcacagtacccgtgtggcagcatgagcacgtgcaacgacgtgtacaacggaacgagctacatctgcagatgcaatgaagggtacgaggggaacccgtacgagcaaaacgggtgctcaggtaagtactttcatcgacaacagacaggctagtacagtacgttttaaagacagatatgattagggagctcgctgttgttcattttcacttcaagaacttgtgatttagcctgtgaaaaaacagataatttgggagctcgctcgattacctgctggctatgaatagaactatgtttttttctgctttctgaatgaagcttcgcactatttatgaagatatcaacgaatgccgggatatgaataacaacaactgcagcagagatgcaacctgtacaaacactgatggaggctttacttgctcttgccccaagaacacggttggcgatggttacagggctgggacaggctgcagtattgactcccttccgccatctggtaacatgtcacgtatttttggaccgaacaaaatcctattaatcaccgttgcatcacccatcacaattctcattcgcatatatataggtactactccctccgcttttttttagtttgatataccaacatttttaacacaaaacaaacatagtactatcaaaagtgcattcaatgttagatttattaaaactaatttggtgtcgtgaatgttgctaattattttataaatttgattaaacttaagaaaaattgatcaagaaaaaaaagccagatcatcttgtaacataaaaaaaaagagtcaaggatgaaaacggaggaaataattgattcagtccccttgtgccagaagttaaaggtattaggagtatataagattagttttgaaaactgttcggttcttttgctccccttttacctaaaaatgtcaatataaaaggatatatttctttctcttgacacgctacaaagacattgtgtgcatcttctatggctggaatatagtaagttcttagctgtactatttaagtacttcaatatggctgtacgtaatatttaggacggagggagtatgttctactcctaggccttgtttggatcctccgaactattaaatagtcctctggaatcttactatttagaattattaaacgtagattaccgataaaaccgattccataacccttagatgaatctaatgatgtatattaatctatgattaacagctgattactgtagcatcattataacaaatcatggattaatatatctcgttagattcgtctcgcaaaatagtctagggttatgaaatggtttttgtcagtaatctatgtttaatactcttaaataacgagattctggagggccaaataggaccctagtaatgcgaagaatctgaccaataacagtagagcattctccctcaaaccaaccgcaaggtacgataaagcagagtgcagtttcttcacagcacagaagagtaatttaagtgcagtctttctaataaggaaagaacaaagtttccactgttcaaatttctgtt

SEQ ID NO: 11687 - DNA, 3501 bp, Oryza sativa
tcgaaagagttttgggcttcatagtcacgtactaaaagcttattgctccaaataggcttattaatgggcctttcaagtgttttcacgaaggcccaacccaatcagaaagtaagcacaactaggccgctatataaatgcgagtaacccgttcgagtcgaaaccctactgcgcctccactcccacccgtagcgcctccccgcgaacccactcccagccgccgccgccgccacctgcaaccgagggctcgccatgccgccgaagctcgacccgacgcaggtggtggatgtgttcgtccgcgtgaccggaggcgaggtgggcgcggcgtcgtcccttgcccccaagatcggccctctcggtctctcccccaagaagatcggtgaggacatcgccaaggagacggccaaggactggaagggcctccgcgtcaccgtcaagctcaccgtccagaaccgtcaggcgaaggtgtccgtcgtcccctccgccgcggcgctcgtcatcaaggccctcaaggagcccgagcgggacaggaagaaggtcaagaacatcaagcacagtggtaacatcagcctcgacgacgtcatcgagatcgccaggatcatgaggaacaggtccatggccaaggagatggccgggaccgtcaaggagatccttgggacctgcgtcagcgttgggtgcaccgtcgacggcaaggaccccaaggatctgcagcaggagatctccgatggcgaggtcgagatcccttcggcttaaaaggtatacaaatgcgtctttcttgttacccttttttgtagctaacttgcaatgcaattgttaaattcataaaattttcatgacacaagtctgttagtgccgtactgttctgctgtaatgtttatttttccatatgtaggtttatatgtaccaacatggtattggttgaaaatgaaatgcatttggcctcattgcttttatagctgtgtaaccctataattcttagtatgaaagcatatataactttttttaaccaagtccacgcactgtactctttgtttgcaacgttgaataatatgaatggaattacttgttttgtaactttaacaagagttgatcatcacttgtcatgcgttatactcgtgatattaagtgaccgtttctgtttacacttaccatcctgtttttcacttgttctgccgaaccgtgcaatttattgtgtaactttgctgttttggttgtctaggttattttcagtgtactactcgcattgtttctctatgcaacatactgcatttatgttaagctttagttaaccttcctgatgtttattggcaaggtactttgcccgatattttttgagacttttgattcctgtatggcgacggaaaatcatagggtgagataggagttattaggatgggattgccatttgattgaatcggtttatgattatatagtaagctcaaatagcttagtgcggagtatgtctgtaattgaatttatatctgattaaatgttttaatgggtatctaaatgtaattgatgaaaataaactattcactgtagcctgtcctgaaatcatgtatgtataaccatctttatgttttattaccttttcaggcttgatatttgaggacattaccatctcgtgctactgaagtgatcatttgttccaaaatgctgcttatgtaccttacgagacgatgtgattcgacctatttttgtcatgctttagtagtgatcttgttgagacctcaatgttactattgcaacttggtaccatttggtcctctggaatggagtttcaagtacttgcataatttaatctatagtcctgtctgatgagatgtctgattcagttttattttctgtgtgcttgatctgatcaaaatgcctactagtaatattttcaggaatctgtcactcttgcttgcacccgtttctgcaaatgggacattatgaacctgtatgattttctcagttcttttaccatgataaaagcacatctagccaattctgattactcacgaacttgctatttagcaatgggattttttctctattgacagtcgccaattctgcccatactattgtttcagtggatttcttttagagataggagtaggtgctgctgtttaccagcattaaatcaatcagtgggattttttatgaggaggtagtagttgtttagcatggaattaaacgatatgtggccatgagggttgttctatttggccatttacccgtcgagtcctcttcaaatttaaccccaatatctatttggccatgaggatatgtcacgattatcacatattcgagctgcttgaaccaaggatgtcataacatttcgtcagacgatgcaaaattcacgacatttaggatttagcatttcataaatagagctgcttgaaccaaggatgtcataacatttcgtcagacgatgcaaaattcacgacatttaggatttagcatttcataaataaaggaaacgaatttaacatggtaacagctaaacaaatgggccatccagatcgcaaacatgggtacacgacgagttcctacacgacgacgcatcctcgatcggcccatcgaatagcttagaacgacctaactgccttacaacgaaaacacggcccaacaccacaggaaactcccacgcgccgtggcggcgcgggaacagcagcagagtctccggcgagcttagaacaagggcggcgggagcgcggcggcggcggcggcgtggctgctccgcgcctggtggcagagctggcggagtctggtgggcacgtaccagatggcgaggcgcgggtgcgcggcgaagacggcgtcgatgtcgaatccgtggcgcgcggagatgtcgacgagcggcgcgtagcaggcctgcctccacgcccccacgttctcgccgcgggccttgtaggcgcgccgcagcgcgtccgacgcctcctcgtccaggcagtgcagcgcgtagcagtgcacgtagtgccgcatcttgggcttgttgatgtagctcgccccgaccttcttcgcgtaccggaacacctggttcgtcacctgcatccacccatacatgcatgatgcatgaaggccatttcattgcgtttcaccaccgagacgttcgcgtgtgcgtgcagctagctcgtgcacatgactcatgcgtcgcacagtgagatcacggatctgatcggctgcttgggggcgcaggagcgcatcgatgcagcagccggtccgtccgggctgtgagtggacgggatgcaaagccatccaatcaccctggaaccccgaccaggccgtgcgtgcattcatttcattgcaccgtctccgagctgagcgccctgatccacggcggcaggtgagctcacatggccgtacgtgcgagggattgccgccacggaatccgaggaagtggccgtcctcctccccctacctccatatggctccatggctgtggggtgtggctccattgccatgcatgcctacgctgatggctagggcccgacaagacaacacatggaacgcaggctttgc

SEQ ID NO: 11688 - DNA, 4688 bp, Oryza sativa
tcctgcagcccacacatggaacgcaggctttgccagcctacctgcaactgacacgtcggcactctttttcaggttggtacttggtactactgcgcatcggcgtacgcgctcgtgtccagctcttcctgaattcttctactacccgcgtacgtgaagcatccactacgtaatcactgtttgcttgtaacaaagcgaacggacggctatgcatgggactaatgaaacagggagagcacgagtgcatggcagaaataccggtatgacagaaacagggagcatcctgttaccatgtgatgtgtgttcctcgtctgtgagcatgaattggtagaatagattaacaccctagcaagtcttacagaaggaaagtgagcattcctgctgttttacgaatgtttttcaaaaggttttgcccgttgtacagttgattttctagaaattttaaacactgtcgcccttttaagtcaaagagccaatgctaaaagttttgaataggcggaaaacttaagcattgaaaatactcaagttatttactagatgctttagtaatcaactgtttgttaccatgcaatgataatgaatctttcgcacctttttaactcaagactggccaacagaatactcctactccatatctgacggcagcacgatgtatttgctcctactagtagtacttataggagtaactgtgaatgagtaataaacaataaacaagtcgagccgttgggatgacagtagtcttagggtgtgtttgaggagaaggggattggggagattggggagattgggaagatacgcaaaacgaggtgagccattagcacatgattaattgagtattaactattttaaacttcaaaaatggattaatatgattttttaaagcaactttcctatagaaattttttgtaaaaaacgcaccgtttagcagtttgggaagcgtgcgcacggaaaacgagatgcttttgtctctcaatcccccagattgcccaggaacgaacgttcccttattcagatcgtcttacgtctgcatgcttatgcaagaacgcgagcatagtagggtaggagtacgtaagatatagagtacgtaagatacgtaatgctcgtaaatcacgcgtaccttggttggggacttgtgtccatgcagcttagccatggattgcacctgcagcaggaagaggcggcactgctcgtacagatggaacaggtagtccagcccgttcttcttggccctcgccacctcgccgggctccgtcaccacgaaaggatgctccctctgccgctccccgccgccgccgccggccgacgactccgtcgactccgacccgccgccgccgtcctcgtcgcagcagtccatctcgtcctcctgcatgtccagccttaggtcgtccaccttcttcctcctcgccttcttgcccttcctcgccgcggatcccttcttcgcctgcttcttgccggtcaccatcctcctgccgttgtcgtcgtcgcccatgccgccgctccccgccatgtcatgctcgtcggacaacactgttcgcgtgcatgcatgcatcacagcatcgtgtacagaacaagcacaggaacatggttaagaatttaaccgatcagcttttgcatgcatgcatgatgacatcgtcgcaattcacacgcaagaacacacagtacgcacttaatacgcacgagcgtgttcggtaatcacatgaaacaagaggagaaagatagtggtatgatcgatgcgtaagataccttcctgggaggcgccgtccacggtgctcccggactggtgcccatggtggcggccgccgagcgacatcaggcggccgcgctcggctcgcagcgcggcgcggaggccgaaccgctcgccgaggagcaggtcccagcggaacagcccggcgagcgcggccatcatgtcgtcgagctcgcgctccgtcatggccaggagcgtgctcgccgtgaacccgagctccgagatccgcgccaccgtcgacatccgcacgccgtaccctgccaccagctcctccagctccctgggcacgttagccggcggcggcggcggcggtggtggcggcggtggtggcacgggcgccggcgccggcgggccgaggtcccaccggaacgggtgcgcggccgagaaggcatcgttgggatccatgcgaggatggctactagcttgctgtccttgcggtcggccgggctcggtttctccggttgtttcttgtgtttcgcccacacacctctgtgcgtcgcgttgggctcgttatatagcggccactgtagtgttgggctatagttgctgcacgcggttgacttgacaaatctccatagctcgttgcattggtccggatcgatgtatctgcattcacgctagcttttggtttttgtccaatacttggaggaagggagcgagctaccgatcgatactacgtgaaaacgacctgtcctgtagaaagctgcatgcgtcgctagagcacacacgatttgatagtctagattctagtaagccctattacgtgccggtacataaaaagtaggcacagtaagccttataggagtaatacacccacacattgtgttgtcctgtcacggcgtacgtgcatttgtaatgtggcgcacgtctcaagtgtccttcgatcttttcgtcccgtctctccttggaggtagcaacggcgtcactgttcctcttccgaagaaaaaagatactcctgcatgcgtactgttgttgcgtacacggtgaacacgggtgaggccgtagccttgtgcccttaattatcgtacgtggcggttgtccatgtaatcgtgtgagcggtgggggcagaagattagcgtgtcattctgcagattttccccacgctagggcaactcaaaaatgtttttgattccgagggcgaaaatatactttttaagaattattttaccattctggataattaatgtatcgagagacaccgtatttttttaatataaaacttaatacttttagatactgtgtattttgagataaacaaaagagtaaattgcatcagcggtacacgaacttgtcaggttggtgcaatctagtacatgaacttctaaaacgctcgtttctgtgcacgagcttgtttgatgcgtgcgaataatgtcaaaatcgcactgcaaggttaatcttgttgattctgtggttgatttaaactctatgtaaacattagtctaagaaggataaacatataataaggcataatgattgtataaaaaaataaaaatttgagtaatgatgcaagggacagaaacaaagaaagataaagtggaatctaagaaaaatcggtcttgtcgcaccattttagtcttagtttgcacataccagacaaattcatgcaccaaaacgagacgagcattttataagttcatacactaaattgcacgcacctgacaaatttatgtaccgctaatataatttactctaaaaaatgtagtgtaaaatttctcttcttttaaagtctcactatggtgcattcattggtcttatttgattggaggatttagatcttttttacaattatttcaattaacggtagtagaaatatggagtgatatttattgtaaaaaagaataatgtgcatggtgtataattgtcatttagcaatgattaaatatttgtttctctttctggattttttatggaatatcatcgatgccggtgcaacggatgaccacagatcaatctagccggggaaaaacataaatgacaaagttactcctaatcaccatattaatgacgggggatttcttggttttactccctccatccaaaaagtccaagacctattttctttttgaccaaggccagtgagtaattaattaattcattatgtgacaaaatcaatgaacatgtaaccaataagtactgaagtataatgatttcttaggctccgctcaaaaatttaatataacacatagtaatgactatatggataggacttaaacttttagaaaaccaaaaaataaaatatatcttaaaacttttggatggagggagtagtcagttaccgatgtttctcctattgtgtcaaaggttggtttgcttagtcattaattagctcgatagaacactaggaatagttcacggtcgagtccgaaagcattaattaatgaaatgagcctagtgcatcgagtgttttttacatttgaatttaaaagctaccataggcaaggaactctacctattggtagtatattttgggggtaaacgacattcaaccactctgcctaacggtacaacgctcgtattgctctctcataacttcgtgtttacgatttagactactccaatttcgcttgttgcttctataattcaatcgagattttctagttaagagagaattagttatctattagctcaaagagacgcttatctttagcctctaccttatagttgacggtaaaaaggagaaatgaaggtagcaggggactttaatatatagcaaaattaccacgttttttaatcatgagacagttgtatgagagcaaggataatagtacagctcacttcctactattagcacattttaaagccaacagatataatagattagctataaggttggctataattttcttctcttctctgtctctcacttatacatttaatgtatttgtcttggagtttgtaataatctagctcttgtatgagagccaacacccttgatttttcactatct

SEQ ID NO: 11689 - DNA, 4329 bp, Oryza sativa
tggttttgaagatgattggatttacaggtgaattacaggtgctatcattttatgtgaccggtcagaccggggtgcgtatgccggtcagaccggcagtgatcgagcggtcagaccggccagcccgcggtctgaccggccgactctgtgtcggtttcggtttcgggttgtttgtttggatatccgtgattatttcatgattatggcttctagatggatactatacgtatgtaatactgttgtttgatactaatgagtcaagttggagatagcttggtctccgaatatggtttctttgtttatttcatgtgtaggtgactcgatgtctcgggagagtatttgcggtgatggaccgggagtcggcttggggataagacgacgtccgtggtggtcagagatcatgcgggatacttaggctagagttgatgcacgtggttgatggagattccatatggcatacgatggagttattatgtgcgtatgggatgcggactcgaatttggaaggagtccaaatttggtatgattggttatgtaaagtttgtttcttgtactagagggtttcctaaggtgtttaggactcctagtatgagtttggttcgtggctttaggctgcctacctcatgtataaatagagggggagcgtgaggcttcccgatatcgcttttgagagcaattaagttgagttttgagttagggtttcgagtttagtcgaaatttttgtaaggagtgttgttggtgcactttgtaaacacagagagaatcaataaagtcgtcatccactttaagagttcttcgatttgtgtttaccgggtttcggcggtctaaccggcgacacaccggcggtcagaccggcgacacaccggcggtcagaccggcggcaatgcggtggcagaccggcggcgacagcaggcgaggcaggcgacttcggcggttcgaccgatcgatctacatcggtcagaccgatgttcatcaggcggtcagaccggcgcaacatcttcggtcagaccgcgatccatcgatttcgagggtaacttttatttccgctaaaagtttttgttttttgggtataccaactattcaccccctctggttggcttagttattgctatttgatcctacactctctcctccaccgaagcttatagtaggcttatagcttactattatacttgctctgatatagtagcaacgacaagtgtatggtttatattaacaaggtgaagtgagggcggtggaagggtaattgatcaatagtaagagaataaggtggtgggcaaggacaacgttaaccgaggatagtggtttggagtggctagccaaaacaaaagatgatgggggcacacacaatggctacaacagcgactaccccacacgtacgtattactctccagtgcatcattacatcatcacggttttttttgattgggctagtgggcctcagatggccttttatgtgcatgttatgttgaatactacattcagcaaccaatgacaactaactgattcaatacccatcgtcatttccattaggaacaccacaacgtgaaacacatttgaaacgacaacatgagatgacccgacaagatgtatagaaataaattttgttagtaaacaagctttccggttgttttgttttattagcaactcctaaattttggtcatgcattttttttaccaatggtttgaacgtggagagaaaagaggtactagggttacctggttgagcaaatcttgaagcaattgaaacaatccaaaagtaactgtattagaaaaagatatgaataccaaatagacaatgcatttgctttatacctttaatttgttcgagcaatcaaaacctaaggaatgtttgatttcttgtctatgtatccattggaattgtctatttatatttgtttgtcacaaaaatgttgtaagtgaaccaaagcaaacaaatccataggtaattttaaaattttgacaagaagtcaaataaccgtgcattaacaaaaattagtaaagtatgtattgctttcccccctcctcctttggattggtgtatttttaatgaaccatacattttcaaaggattaggtactattaatgtcttttgttgtagcagggggtaaacaccatcctcccagtccggtcaaaacaccaaaggaaaagaggtcttaagaattctaagtgtccaacttggaaaaagctcgtgactcagaaattaccatccgagtggtaaagtaccattaaagtggtaaaatactatcctagtggtaaaataccattcgagtggtagagtaccatccgattggtaaattctcatccgactagtaaaataccattcgagtggtagagtaccatccgattgataaattcccattcgattggtaaaatactattcgagtagtaaagtctcactcgagtggcaaagttccatccgagtgggttttcaacttgtgactggtaaatttcaagggcccagcaagtgagaaggaatgtatgaactctcaagatggaaagtgcgtttggccaatgaacttgagggaaaacactactcgagcaatgaagataccacaagaagattccgtggaggccactcccaactacttctatcagttgccgccaaatgaccataatgacctctaaaatgtatcaaaatgtccttagggttgctgacctggcaagggcattatggtaaactcatatatccataagggcaaagttgtaagccggccaaaatcctatagcaagacaagaatatcaatcactaaagttgtgcattttgtgttcgagctcatttcttatgataagcggagaaaatgaacttttccgtctatcctcgaacttgtccatgactcaaggtcacgacatctttgtaacacaagaagaggaaatctagaggaagagatttcctactcccatcatcatttggggaatatggacctcttctcttcctttttcctctcgtgtcggatcggcgtaaagtttcgcgagtatactttgggggtgtttgattgagattgatataagttgatgtggctatcgctacagctacaccaacaataactagtatagcaaatctatgctaggcctgttgcggcgttgtggtgtgccatcgctgagggcaccgaacacccgctttctcaactacggtgctagtggagtattgttatatggatccattgacaatagatccattaataatagcttagcatgttgtaaaatgcatacaaattaatatccactctagaattcctcatattcccgtgttccaaacagcttgtcctattgattttttgtgtttataatcctacagttttgtatgcacctattgatctatttctatgtttttcgtaaagctatgtttttcctatcatgaaggaggcttaattcatgaaacaaggggctaaaaagggaattcagctctatgtacttcagtagtagaggtggaagtaacgagctgaatcattggtggtagagaaaaatacgtgaacggcatctatcgtccagaccagatccgcatacaagtgcaaccacgctaaaattaactgacccaggcttttctgcctctcctggctcccccctgctggccctgcctccctgcgcgagaacatgcaagcgtaatgtttttgcaactgatgatccccggatagcagcgcagtgccacttatgatgccgagacgacagtgcaatttgaccgacgcctaccacaccgctgctcttaactttgttcaaactgcagtgcacagtgcagtgtgctctctcttcttaattcaccgaatgggatgctctctctcgcacgcaggcacacagtcgatgtgcatgcgtgagacatgtttgtccggttgcatgcattgctcgccacttcgcagcatctccactgagatgccgtctcgagcgtatcatgtctatctgtaaactgctgctcccccagaccaccagcaccaccacgccggccgtcgtcgtctgtgcgtgcatgcatgcacacctctcaaggcacatatacgcaccggcatcgcggccgcgtacgtactcaatggggcacgtgatgaactgacgagcactggactggtattattcctcccaattgaatcgttcatcagagagctctcactgcttcttgcactcccatgtgcatagcagctatagctagccggaagatgtgcagatgaattcatgaacttgaacgtgcaagtgcaattgtgcaagtgtgtgagcatatcatgagtgtgggcttcagtagaaaatcgcagaaggctcaacagtttgctttttttgaaacggcgatcggtgactgtgtgcacgcaattatatactgagaattctgagacgatatgtgcgaacctgcagg

SEQ ID NO: 11690 - DNA, 751 bp, Oryza sativa
cggaagatccgctctttgtggaagtagaagccgacgtttgggaaagcgagcaaggcaagtcacatcatccttgagcatattgaatcccagtttacaaaattatttttaatttaaattaatgcattatcgctttatttaaattcccgcgttatcactgttttatttagccatgcctatttacctttgttatgaccttattattaattatttccttgttcaccctagagtaaacaaaaccccaactagtggacactctactcatggcaccactagtttaattttaggtagatgcttcgcaatttaattaggtaacattaggtggttttacaactctagactttgggaacattcatatcacctggacactatggaatggtttggttattgtggaattggcttcacaccgctccttctattcaaaatccccaaattggttttaggctgggctcgaggtgcgtggttgggttttgctagtcgtacctcgggtactataaggattaagctcgggcctctgttgcaaagcactactgtactttcacatgtctagtgggtaaggcttagtttgtggctcagtctggttataaacaaaagtacacggattggagatggatgaagtcgggggtcgatggacattcttcaaggcaaatgaaggctacacgagctgcggcccggtagtcgagatgtcatggcagagggttggtgccctgctgctaggggctcaatcttgcctgcctgtcccgggggttcccgg

SEQ ID NO: 11691 - DNA, 2299 bp, Oryza sativa
ctctagaggatcccctgcttttatcttcacaactgcgcgtcttcaccaccggtttgcttctgttaccgccgacttgtgttcacttcattacagcaatacaactttgtcatcatggtggagcgacttcatctttattatcttcggcaccggcaaactctattgttgctacttcgcaagttttactacttcaccaaccacgacgtctttgtgaacctcgacatctcggcatgcgatgccatgttattttactacaacaagaggctctccaacattcatgatttctacttggacatcttcaacacatatcttcaatcaagcaataactattcgacgacaagaggctacagttctcgactctatgttcagttgtttcccaactaatcaaagagtcgggggctacacaaatacaaggctcaaaatttgacaaattttatgtcaagctgaagaaatcaattaatcagccaacgagtcaactccaggagtcattatcttcatctttgcttcggagcagacattctacttcaacaacttcaaatatttcggtttagacgagttgggcaacaacatcaactctcctccaattgacctactatgcaaatgctgatgagcgtctttgtcattatcattggttgctacactgctattggctggatcaccgacatcgtcatcttcatcatgtcggttgcgtttgtcgtcgtcaactattttcttcatcttcatgattggtggatttcgccatcactgttgatgcgcgtctacatcttcatcgtcggtttgcttttgtcatcaccgactgtttcttcgcctccatggttatgcaacttcattacctttgattggtgtcactgttttttactaccactgacatcttccgttacttctgatgagcaatttcgtcttcatgttagtcatttcatctccatgccgactgcgtcagctattgccaatagacaattttgactatgacagaaggacaagctatatgctcaggggctcatcaactcaagcgtgaggattatatctccaattcggacttgttccggatacattccacatggattcatagtcatgagtctattttctatgctcaaagactggaccaattattattccccgtaaaggctatcaaccgaatacttgcgccagtcgggattcaattattatatttattttggagtatcccataagggataatcattcagatcagaagctattcatatgagctacacttggtctatattacccagaagatttgttactcgggagcatgtcacatgcgtcatcctttaaagggtgtcgaaggcatattttttggcctaggcctaatatgtctgcagcccatattttcaggtgtggcctgtcacgttcttttagggacttaggcactttttgcttaggccaaagtgcgcgtgatcaagtgcccaatacccttaaaatccttttataccgcagttacttaacttttttaggagtggaacaatgcatcttaaaaggtgtcaaacagtaaagctttatatagctgccccgctgacttttttatatataagtcaagagctgttttgggtttttaagcaattgatttgatacaatatcattgcttttcgccacgtaagtgtgcatttttattgaccaatattatggcttaggctgattatatattgtggtcattttctaggcggttggtaaatcctttatgagtttatttactcggattttacaccacatatgccatatatttccaggtgtggtgaaaccatgtgtcttctagggacttaagcacatctgttaaagcagtgtgcgcatggcgtatgcccaatactttggaaatttctttattcacaatatacaagcttctttatagctattttgctatatcactcatcatattttacaaagtagttggtatatcacttggatcatattattcagggattcacacatcatatgctattatcgaaaccactcggttggttagattatttattccttgactatatgtttggtttgttcaattaaccacatagtcgggggctacacctattaggtgcatctagtcggtgcacctgactttattttccagccctccacagtcttcagatttggtaaaagtactcgggagaccatgacaaagatgattgaagcactcggctttggagtaatctggttcgagagaagattatcttttcgactgcgaaggtctcaggggctactgtggatattatgggtaccccatacccatacggcatggttatccgactagtcataggggataacttatatctatgtaatatgtaacaga

SEQ ID NO: 11692 - DNA, 2622 bp, Oryza sativa
ctatggaagacaacaagagtatgcttatgatgatatgatgttaattatgatgaacttacaaatttgttttgttaattgaatcattaactcctttgcaaaagatttgtgaaccaagtcggtgtgcttgtggttgggtagtcaagcttctgctgttctctgttatctatctatatttggccggtcggcatatgtaactataaagtagttgtaaatttgaatcgctttcatcttatttgtatttgctatgcataacaatgcttaagatgaaaatgtgaatctagtgcacatcttgggaactagattcacatgaatatgagttaaggatatttgatatatcatagatctttagccattttgtcaagtcacctgaatatgtaacacatctggtcgctgccttcgtgtggtttgacgggcacatctcaggctgaagttgactggcaggctaaaggcccggcaatgtctctagtatccttctctcgaggcgtcggatgtttcattatgtttgtttgatgacttgaattattcacttcatacctcaaatataatgagaggggtcctctagagtcgacctgcaggcatgcctatcgtcatcatcatcatcctcatcagcatcggtttcggccgcgtcctacgcagcacgacgagttcgcacctggccgctcttcgcgacggctcgcttgtgcttcctcgacatcccaacgtcgtcgtcgccagccttggaagggatcgatcggttggccaattcgccgccatgaacccggttcacctgaccgtcagcctggcgctgaagcaggcgggcgaattctgcagtagtacgaactaaaaaaaacaacgaattaggccgaagcgcatctccgtaaaggaaatagatgtcaaaaagcgaaagcaaaactcacgttcggtcccggcggggagaacaaggcgaggaagcccaagcaccacctcgcccttgttgatggaaaccccccagtcgcaagcaaggggggaaatccgaagaaggcaaaactcctcgcaaaggttgtgggtacttaatcgccgcagaaccttgcgaaggaggatgagccgggactcgagggtgccatcgatctccactttcggcttcacgacaatggagaccgcaagacgccaaaaacggagccagttcgccttgtcatcctcggcggggtaaggattgttgatgtaaaaccacttctgcatccagttccactcccacttcaccatagacgcaggcaccggccaggcgtccgaacgctccggccgaagcatgaagttgacgcagccgaaaactgtcttcctcggcccggctggcatgttcacgtctttggttgtggcgcacgccgtaaacaagatggcgaacaattcggtggtaggatcgaaaccacacgttcggcacatccatgcgaagacggccaacttcgggaatgctgacgggctaagctcaggaagcctgacctcatatatcgccagcacagacatctagaaattgtcgcatgggaggcgaagtccagcaacaaggaaggcagcaaaaatgactgttcgcctgtcgcctggcgaagggacggtggcttcgcccgcacagttcacttggccctctgcaagagcaccggagaggacgaactcagccaagtcaggctccttgacaagggacttgccaaggtagcacgaccacccttcgccagggttttcgccggttgacccggctgtcacgccatgataaattcatcccgaaataaaaatcattctctaaaaggaataatagaattaattaaaattcgaaaagaaattggcaaaccttaaaatgcgtacaagaaaaattcgaatgtggcctagagaatttttgttaaattccccttgctctaaaaggagccctcaaattttactataaattttagaacaccagaaataattattaagcaacaacaacctttagcaaagtttattaaaaaaaaacttaaaaataatcctccttcttcctttgggccaagtcttgcccaaagcctccctctctctccctcggcccgcggccgaagtccttctatgctccctctctttttccttccctctctccctcgggccgcccctcctatccctccttccctctcggcccagccgctcggcccaagccgagctgcagccctcccacgcgctcacatgtgctgactgcgccagaccacgtgggtcccaccctcggtcatcgtcctcctcccgcacggcctcctctctctctcccgtgaaccctagctcctttcctcccttaaatccatacgaatcaattcccttcatttcaaattgaggctttgttcgctagctgtgggaattaatccgggtaaagcctcccacgtggggtttgggttgtccccacaccccacacccaatccctacctggcttcctgcgaatcccccacctctcatccctctcacgttagactgttcggacagaggtgggattagaagggatcactaccattcactacactttaaaatcagaaaatgagtaaaacatgttggaaaattcggataaaataaaaaaaatgggagaaaggtcacgaacgtcaaaatattttagaaatgataaggaaaaaattgatctatgaaaacaaaacaaaaattaaacgtggaaaa

SEQ ID NO: 11693 - DNA, 524 bp, Oryza sativa
cagataactaatcaactaactaaccggtggcacacaagattactgctaacaaaactctccctaagcttgatgtgccgattatacaggaaacataccaatttgttcccgcagctcctgaaacttgattcgagaaagcggcttcgtcaggatatctgcaagttgcccttctgtgccgatgtaactcggtgtgatttccccattctccacggcttcacgaatgaaatgtaattttgtttgaatgtgcttacttcgatcgtgaaaaacagggttcttcatcagggccagagcggattggttgtccaccctgagatcgacgacttcagttgctgcattcctgaggtcaccgaggagccgggcaagccaaatgccctggcatgcagctgttgcagctgcaatatactcagattcacaggaggagagtgctacaactctctgtttttgagactgccagctaacaggatttttgccgagaaagaaaattactcctgtgatgctcttgcgagtgtcaatgtctccagccatat

SEQ ID NO: 11694 - DNA, 2407 bp, Oryza sativa
ccttctccagtgaaatcttttgaggggaaataatcttctcgatctcctcttccttttctcttatagaaactccggtcaatttcctttggaaataggcggattcgagattgcttcggattcgttttcccccgatctttccttctcgtcgccggcagccgtgggccttcgccgccgcctccttgcccctttaaaaggatccccgagctctcctctacccgccgccaccctcgccttcgtctctagtcgtctgtagcgccctagcgccgtgccgcctcgcgccgccgtcgtcgccaccgctccagccgtgcgccgccgtcgctccagtcgtcgccgtcgttcgggaagaccgccgtcgtggtcgccaagtcgccgccgtcctcgtccgccccttcgccgccgccgaagaccgccggagctccgtcgccgccgccaacccgatctccgccgccgcttctttctcgccgccggcgccgtccgttgcccttccgccgttgttttggtcaccggtgagttcgctgcgtcgccctctacccgttggtgccctccgttcgcatcgtcgagccgtcgttcgccggcgagcatgcgcgcccgagccgccgagtcgccgccggtgctgacgtcatcgctgacgtcatcgggatcgtccgccgtgagccggtcgtggaccgtttgatctcggccgtccgttttggatagggttgatctcggccgttcgtttccgtgaaccgctgccgtgcacccggtccaccgcaaaccctagccgctgacgcaataatccttcttttccttttcaaaaataattcattattgcgtcataattcaattaaaatcaatataagtgttttaatccgatttaatctttaaaaattcataactaattcatttgaactcagtttaatgtggttcaagttgcaaaagttgtgtaaaataaagatctacatattaaaattgtccataaattgaattaaatttattgaattctttttaaatgggctttaaatagatttaatcttgtaaaattcataataaattcatttgaagtcagaatgaggccgttcaagtctcacaattcatctaaaattatgatctacatgtttgtttactttttatgtactgtttatttggtttttattagtctttttcttcgttttgcgtgttagcttgtcgtttccgtcgttgcgaaggttcgcgagtgcgccgtaagtattcaagaagattaattgaagaccgattattgcaaggcaagtcacacagatcctaaacacaatcctttgagcatgttgatcctatatttaaattctctatttatttcaactgtgcatttattttcaaatgtcactgggtggtgtgaacctattcctttgttatggcctgtttgcattgattactttattccttgataccttgggtgattataacttgactagttgagctatatatatattggttcagctagatattagatatgattgcttagccatgcttagaaacattagcacacaattgggataactaatgtttcactatcacttatggttatatttaatggtagctcacgatggtcaatcgtgattggttaattaattacttgccaactaaaacttgataatggtgggttgtgagcacatggttttgagagtcgtgctcatgacaattaaggaccggttcacgagctactattgtgaaacattaaccgtgccaaccacaagccagcgtgggcaacggctttaccttttgtatagcatgattcattgcggagcactagactgagaagtggcggagataagcccacgggggtcgctggggagtccatgccttgttttataagggggtgattatgatccaggaatggtgcactgtggtgagttgtgttatgcagagggtattgtcacagcctctattcgggtactttccagtatcgcgacgcatggtagacatgatgttgaggctgtgtcttgtgggtacagtggtacacctctggccagagtaaaactattcgaatagccgtgcccgcggttatgggcgagttgagcaatgtttttcgtgattagtcccacacctctcacaataattatggatgttataactggtaataatttgtttagctcctggtttggaatggtatattcctggtttggagattagatctgtacaaccgggtatggttgttcagaatggttgggcctgtgcagcatgggtgtgctgttcagtgttgattaaaatttctgattaattactccactattttacttctcttaaatgttttgctaaatgctgcttttgcaaatgagcctatattatgccatcctttggtatccttgtgcacttgcatatttgctgtgtggcttgctgagtatgtcatatgctcaccttgcaataatcaattaacctcagttgaagaaaaagg

SEQ ID NO: 11695 - DNA, 989 bp, Oryza sativa
ggtcatacgaattccgaatcgacccattcaagtctcctaatgtttgttataacctaaagaaccctatgcaatctttttatgtactgttattgcttctttataggcttgtagctttgattgtgtgctttgcgtagctttcgtcattctggaggttcccgaagcgtggtccgctatcgtcgccgaaggttcggaaggtcgttctctcttagcaaggcaagtcacatcacccttgagcatattgaatcccagtttataaaattattttattttaaattattgcattaccgctttatttaaattcccgcgttatcactgtttttatttagcacttcctattaatccttgttatagccttatcattgctattgtttattatcaccttgttcaccctaggaaaataaaaccccaactagtgggtaatccattcatggttccactagtatgaatttaggtagatgcttcgctgattaattaggcaacactaggtggttttataactttagactttgggagttctcatatcatttggacattatggaatggttggcttgtgatggaattgaacacacacctcccccttctctacaaaactcccaaaatggttttaggctgggcttaaggtgcatggttttgttagagaaccttggccaccataagtgtcacatcctgattttcgtttcaggatttataaattatttaataaattattaatagaatttatattaagtgttctttaatttacaagtgaagttaaatgtgggaaataaaatttcttaaatttaaagcatggatggatttaatttttgttaaattctccatggttaattatactctctgaaattttctcggatttttcagagctcaattcttaaataatacaaagaacagttcagtaattatttgatcattaatgatctaattataattgttaagagcttttcttgtttaaaaatccttaaattataaattgttgtttaaaaaggaattat

SEQ ID NO: 11696 - DNA, 2965 bp, Oryza sativa
gtatcttcatctacgtccagaaaattccacatgaatttatcgtgcccacaaattaaactatagattaacaagagaggagagagatttaaatcctgaaaatcgtccaaaatcgataacacccaatctcctaccctcctctctcactccagacttgttcccttcgcccttgacccactttcagcctcacaagctcgctccacctgagtacatgatgccctatgttaggtactctaacgatttctccctcaaatttactggacaattgttcacgcatacaagtatcgatccacaggatcgttctgccgccgcctacgccaccacgtatccagttaatcaccttctaacatccacctatgttttttatatacagttaggacaacaccacacggctctccctctctcacatgacagcttggctacttggcccactgattgccgaagtagcgtgggttgggcctccgacgtcttgggccgatgcttggcgccgtttcctgtatcggcacgatcccctcctcgcctccagcatcttgttctgcttctccagcgccttgtccctcctcctggattccttccaccgtgccatcgtcttgttcatcagcggtttgatcggcagtcttcccgtccagttcatgatcgtcaggcttcctgtggttgtggcagtcttgagtcttcagaggaggcctgacaagcccccatgcttggaaatcggcttgcccccaagccggtgcatgagggaaccttgagtgaagatcttgcatatcctcccatgtggcgtcagtagctgctcccatgtggcgtcagtagctgcacttcctgtccaatgagttagtaactgaataatgggacagtttttggtgtgagatacgcgatagtgaagaaactgctggggaacttgaaatttggaaagagcagtaggaagttcagcttgcataggacaagaaaatccccgagcccccttcaattgagaaacatgaagcaccggatggatctgactagctgctggcagaagcaacttgtaagcaacagcgccaacccggtgcagtatctggtaagggccatagtagcgaaacgccaacttgtgattagccctgacagccactgaagactgaacatatggttgtagtttaagataaacccagtctccaacttggaattccctgaagcttctctttttgtcagccatgtgtttcatttgctgttgagctcggttcaaatgatgctgcaagagttgctgcataagcttcctctgttggaaccactgattcagatcaggaatggagcagtcattcagactaatgccaaaatgcccaggacagtacccatatagaacttcaaaaggagttttgttcaacgcagagtggtaggttgtattgtaccagaactctgctaagtaaagccaggatgaccacttggtgggagtagcatgaacaaagcaccccaaataaatttccagacattgtttaaccctctcggtctgacaatcagtttgtgggtgataggccgagctcatatgcaattttgtaccagatctcacaaagagttgctcctagaattggctagtaaaaatcttgtctcgatcagaaatgatgatatgaaacagaccataaagtttgtacacatgtttcataaattcaagtgctacattgctagcagtgaaagggtgagccaatgggaagaaatgagcatattttgaaaacttatcttctatccccaatatgcagttctaatgatttgatttaggtagcccctcaataaaatccaaagaaatagtttgccacgctccagcagttacaggtaagggttcaagcaaacctggatacttggctcgatctggtttggcttgcaaacaaatttgacagttttgcaccctggactgtaccttctttttcattcctgtccaagcaaataaactcttaacccgctggtaagttgctggaaatcctgaatggcctcccattggtgagtcatgaagagcatcaatcaacttatcctgcaattctgttagatcccccacccaaatacgtcccttatatttaatgactccttgttggagagtaaagtgaggtcgagctgtagggcagatagcaagctcaatgagtagctggatggcatgagcatccttgttataactctggatgatttcctgcatccaagttggtacacattcagatacagaatttagctcagctgagtcttctttcctagaaagtgcatctgctgctgagttagtgactcccttcctatagcagatttgatactgtaagcccagcaatttagaatatgctttctgctgccaaggcgtgtgcagcctctgttcattcaagtgtttgagactatagtggtcagttaatataatgaattccacctctgaaaaagcggattccaatccccgatccggaatttcacggccaaatcaagagaatggaaggaaatctgagtggaattgtggttctgataccaggtgttaggtactctaacgatttctccctcaaattaactggacaattgttcacgcatacaagtatcaatccacaggatcgttccgccgccgcctacgccaccgcgtatccagttaatcgccttctaacatccacctatgtttctttatatacagttaggacaacactacacggctctccctctctcacatgacagcttggctacctggcccactgattgctgaagtagcgtgggttgggcctccgacgtcttgggccgatgcttggcgccgtctcctatagctttgttcggcatgatcccctccttgcctccagcatcttgttttgcttctccagcgccttgtccctcctcctggattccttccgccgtgccatcgtcttgttcatcagcggtttgatcggcagtcttcccttccagttcatgatcgtcaggcttcctgtcgttgtggcagtcttgagtcttcagaggaggcctcacaccctactgctccagccatccgagaggg

SEQ ID NO: 11697 - DNA, 1034 bp, Oryza sativa
aggatcccccatttttaaattaaaatttaaatgaagaaattcgcaaatattcatttaaagagcatataaacttcaaatggccataacttggccatttgaactcggaattggactgttcaagtctctaatttttccttaagaagtcaagaacccatttttgtgctttgttcctacttgttatatggagtttattagagtaaaagccttttcttttccgttggtcgtgtaaacgctgcagcttcggaagattcgctcttcgtggaagttgaagccgacgtttgggaaaatgagcaaggcaagtcacatcatccttgaacatattgaatcccagtttataaaattattttgatttaaattattgcattatcgctttatttaaattcccgcgttatccctgttttatctagccatgcctatttacctttgttatgaccttattattgctattgttattattatcttgttcaccctaggaaaataaaaccccaactagtgggtactctattcatggttccactagtatgaatttaggtagatgcttcgccgcttaattaggtaacattaggtggttttacaactctagactttgggatattcatatcacttggatactatggaatggttggcttttgttggaattggacacacacctccccctctattcaaaacccctaaaatggttttaggctgggctcgaggtgcgtggttgggttttgctagtcgtacctcgggtactataaggattaagctcgggcctctgttgcaaagcactaccgtacttccacatgtctagtgggtaaggcttagtttgtcgctcagtctggttataaacaaaagtacacggatggagatggacgaagtcgggggtcgatggacatctctaggacaaatgaaggctacacgagctgcggcccggtagtcgagatgtcatgccacagggccggtgtcctgctgctagggggctcaatcctgcctacctgtcccgggggttccggccataggtggggttgggtcggtactcttgtctatgctag

SEQ ID NO: 11698 - DNA, 1946 bp, Oryza sativa
acatacttcatcaatgccgaaaccaatagaatcccttttaggctagccaaccccaatctaggaatctggaaaaacaccatcaagtcatggccatcaactgtgaaaagttggacggcttggtataaaagggtatcggctagcaagcaaggccactgggaagaaattgggatagcacaagctttagccttgactgctacagatatggctaaggacgaacccttgatgtcggctgccagctaattctggtccaataccttaaacaccttccttttcaaccaagagccgatgacccccacactcttggatatcactatgataactggccttgatataacctcatcggctaatccagtcagcttgaacaccaagaacaaattcgacttcaaaaccaagagcataggtggctggtctggatttgtctcaatgaacatgggtgatgggtctgtaagcctgacggatcacacagctttccttcttatgtggttagaaaaatttctattctgtggtgcaaggtgcggccctactgcaaactggcaacatctagccgaaaaactggttgagaaaaagcaattccccttagggaaatatctcctcggctatctttaccaaaccctaagcaatgcatcagctaagattgcttatgggacagtaatcggcacatgtggtccatggtggctacttcagatctggctcaacttgattaccaaggaagttgtcgatcgaccatctttaacagaagaagacttcccaaggtttgagctgatcacggatgaggatggtgaagaagtcacccaccgccgatgcatgtcctttggagaggcagcatcaaggaacaccggggccaagctatctgctgaactgctcaaggactgcttttgcaacttttatgatggtttcccgaagaacgctagagtctggttcgcatatgctgattcggctagctttcaacttccttcggattttagatttgatgagatcaactctgagaagtttgagaaatccagaaaagtctttactatagccatcaccccctgcatacttctagtcggcatccatcagggcaaaaacatccagatatcttatgagttttatcacccaatgagtgctgcaaagcaacttggattgggacaactgtcgattgggttgtactttgccgacaggatccaaagtaggggagaaattacattggctctgatgatggatcggctactaaacattgaaggaccttcacttggcagtatagagaacatcgaacaagccttgttcgggagcaaatcttttgaccaatggtgggtcgaatggaagaaacacctctttcatcagacaacttcgatgtatatgactgatctattctctgatctgatccctcaagtaagttcttttacctttgtcaattctgtttgatacctgcaagccgatttgtacgtaaccagttttttcttctgtttgcagaccacagagacttctccccctcatcaaagtgagagtggtcgggagatcgattatgcagcaagcctccttccaaacggtggtagattagcttcccctatcatcggcttccatgcccctaagacagcaagccttctccaagggcagatgagagagccaatcccagctgatgctggaaagaaaaggaaaaccaaagcatcggttgcggatccatcggctgcagaaaaagaagtccaggaagcaaaagataaagtgtcacgtcctgataaattcatcccgaaataaaaatcatcctctaaaaagaataatagaattaattaaaattcgaaaagaaattggcaaacactaaaatacgtgcaacaaaaatttgaaaatgggccggagaattttgggtaaaaactccttggtctaaaaagagcccctaaattttagtggaattatcagagcacaaataataattattaagaaataaacaaagctaaaatgattttataaaa

SEQ ID NO: 11699 - DNA, 635 bp, Oryza sativa
ttcatcttcttggggcaggaactcttgatgcacaacagaagatccggtgatctgaagtggctcagtgcgctgtctttggctaccacctggaaatactgggatgttgacaatccttctcttgcagttcgtcatccgattatgctcacttttgagttgcatggctttgtccacaagtttctcaaaatcttcataatcctctaggagtaattgcactgcaagctcatcttttaacccctggagaaacttctcttgtttgtcttcatccgtttccacatcttctggtgcatagtgagccaaacgatagaactcatgcaggtactctgtgacggtcaaatctccttgcttcaggtagcgaaactctcgttttcttagtgtgatcattcctgcgggaacatgtgatctcttgaatacagatgaaaactcgttccaggtgatggtatgtccttctggccgtgatgcttcgtagctatcccaccactctgaagccggtccaaccaactgatgagttgcgaagccaacccgctcctggtcggtgcactgaatcaaccctagcttcttctcgactgtgcgcaaccaatcactggcttccataggatcgacggccatggcaaaggttggaggcccagttttgagaa

SEQ ID NO: 11700 - DNA, 1714 bp, Oryza sativa
ggcgaattcgagctcggtacccttcccaaacatgcatatgagtgacatgagttcgtcattaatggaacaaagtttcacggatcagaatttactactcaggtacttttgcaattattaagagcagaaaataaattatattatctctatgcttttgatttcttccaagtaatacttagcaccttgcgttactcggtccatccaacgaggccccgggtgctaggaatcggcccaaaggcaaccatccattggcaaaccaaatggaaagcataggaagatagaactccataactcgataggtacttttgtactcagattatgtcgcaagcaatcaagataaatattataaaaaatatgatataacatctgtagcccccgactcactactcaatggaagaccaattggtgtagtgaggcagaggaaagggaaaaatatcatataaagaataaaataaatgatgacttagctttgtaatattccccttggtgatggcagaagtggccaatgtgggaacaaagtcgtccatcaataacaatgaagacaccagtcggcggcgacggaggcaggccggcggtgaagtcgtagacgcccaacagcggcggcataataggccagccgtgtaggcggaggcaccactcggcggcgacggaggcaagccggcggtgaagtcgtagacgcccaacagcggcggcataataggccagccgtgtaggcggaggcaccactcggcggcgacggaggcaagccggcggtgaagtcgtagacgcccaacagcagcggcataataggctagccgtgtaggcagaaacaccagtcggcggcggcgaaggccagccggtcggcgaagacctggacgcccatgaacggtggtgtgaccaacccaccgtataggcggggacaccagtcggcggcgacggaggcaggccggcggtgaagacgtagacgcccaacaacggcggcataataggccagccgtgtaggcggaggcaccactcggcggcgacagaggcaagcctgcggtgaagtcgtagacgcccaacagcggcggcataataggccagccgtgtaggcggaggcaccactcggcggcgacggaggcaagccagtggtgaagacgatgtcgctatcggcaacggcagcggcacacaccaaccgtggcagcgaggccgcaagcagtgaacgattgtttgatctcgactgccatccaatgcatgcgaacaaccatcgctccagcatacatgtagattaaatcgacgtaaacacgtgcttgctcctggtggccgagtatattcctgtgtcctgtgccaatctagcagcacgtccatctgcatggaaggaaagagaggagcactcggacacggcaagaggcacccgagtggccgagtaggcgacgatggcggccgtgtcgtgatctcaaccagcatgtgaaaaacaacaaaaattgccaggaaatcaaaacggccggcgattagggattaattaataatcaatctaataaaaattaaattggaacagccaacccaagttgtacggcgtggcttggatacgtcgtgcgcgtcgatcagcttgggtcgcaatgccgcaatcagcagtagccggcggaagccatcaacggccctgcgacctcggagagtcggcagcatgtagatgaccgaccggggcagctgtaaagcctaatgataacagctcggaggcgatcgactacggagacgggga

SEQ ID NO: 11701 - DNA, 1323 bp, Oryza sativa
agtttcgctacttgaagcaagaagatttgaccgtcacagagtacctgcatgagttctatcgtttggctcactatgcaccagaagatgtggaaacggatgaagacaaacaagagaagtttctccaggggttaaaagatgagcttgcagtgcaattactcctagaggattatgaagattttgagaaacttgtggacaaagccatgcaactcaaaagtgagcataatcggatgacgaactgcaagagaaggattgtcaacatcccagtatttccaggtggtagccaaagacagcgcactgagccacttcagatcaccggatcttctgttgtgcatcaagagttcctgccccaagaagatgaacgcaatgcagacaacaacactagcaatactaatgatgatgataccaccaacaaccatggttcatgccccattagtgaccactcgaataaagcgtgcaatgtcagtagcattcaccaagatgtcaacgatagtatcaatgttggaacccagaatgacaaccttagcaattttgacactgagaaagactccaatggtgatagcaactatggtaccactgatgccaatgttagcaaggatttccaaccaccgattccaactccaagtcagaatgatcgtcctcagacggatagctcagcaaagaagacgttgatttgctacaattgcaaagaaccagggcattactcgagggactgcctgcaaccaaggcaaaatcgacctccacattaccgccaatttacacgaagcagacatcccaatcgtattgtggtcactggagcaaatgcagtacctgttaagcctagcgctagtcagaagcaaccataatactcttatatcggtgttcaaatacttttgttttatagttgttacccgtcaatcatgtaataacagagaaacatgagataatgaaggagtttgataagtttatgaaggaaccatgttaagattgcaagtgctgtgagttgtgtacattttgttgctgattagggagacctagggtctcattttcgtaagctcataatctattatgaaccaaataacctagcgattgatggcgaagaaaatcaagtgatcaaccaaagagacatttgtttggaccaaggggttcagatatgtcttctttggatcaaaggcatgcacccgttgtggagaaattggacacgttgctagcatgtgcctcaccctctgccctcattgtgaagaagaccatccaccaggggagtgtcccattcgcaaggtcacatgttttctgtgcgaggtacaaaccaatgtgccaaggattgccaactagtgtgttgttgaccaa

SEQ ID NO: 11702 - DNA, 1429 bp, Oryza sativa
  unsure (1)..(1429): unsure at all n locations
acgccatgaagggagactacggggaaagggaactctcggaaggaaagcaataatgacggtagacaacaatttattccgtaaagcccatttcactgttctgcaacactcttcattggtagctccttacatcgaggagcacttggctctagttcgcgccaggaacatcggtaagtccgatgcatggattacacggcatcacattgatactttccccgcgtggctacgacaacatctcatgggtaacgagtcgatcaaccaacaacttgccttcctggcgaggggaccgtctgggtcgatcgcgacattccagggatatgagatcaatgggtacacattctacacgagagcccaagacatgaagagcacgaaccaaaacagcgctgttcgtgtcgatgccatgggacacgatggaacaactgccacgtattacggtgccatcgaggacatatgggactctcaaggttcctctgttccggtgccaatgggttaggttgactggtggaggcgtaatgattgatgacagtgggatgacaactgttgaccttaacaaggttggatactcggacgaaccttttgtccttgccaatgatgtaacgcaagtctttntcgtgaaggacatgtctagcaaaggaaagaagggcagagggcctgatgagcctaagcgtcaagtggttctcccaggcaaaagaaaaatcgtcggagttgaggacaagactgacgaggattacgatcagttggatgggcaaccccctttcacggtgacgattgaccctagcatcctcctatcaaatgaagacaccccttactcacgcagcgatcacaaggagggaacaatagtgaggagaaagtacgtgcggtcaaccgtcaccgccgatgtaatgccgtaattattgtgtacacgatgtaaactattttggatgtattgattatccatcatgtatatgctagttatatgtgatacttacaatttttaaaagttttaactcacacaggtggcaatttcatatgtatgttaattagagtttttaacatttaatttactagcattcatatgctaattataattgactagaggatttttaaaagttttaaatcacgcaagtggcaattttaaatgttaattagagttttttaacatttaatttactatcattcatatgctaattataattgactggagaatttttaaaagtattaaatttaatatatttttaaaactatcattcatatattagagtttttcacaatttaatttactatctttcatatgctacttatatatatgactattcgaatttttaaaaggtttaaatcatgcatgtagcatttacatatgttaattagagtttttatcatttaatataatataattcctacgctaagtatatatgatgattacaatttttattaattttaaatcatgcagtat

SEQ ID NO: 11703 - DNA, 615 bp, Oryza sativa
ctgcagccccactagccatcttgtcaatcactgagattagacctgagatggtatctttatctttatttccgagggcctcaattgccttctcaagtgcttcttttaggtatttcatttcctctttcttctgcgagtttttagcgaagatataaggcactaatgcgccaagtatagcccccgcagaccctgagaacaattgagactgactgataaaattcatgatagtatcaagagaaaaacaattggccctagcttcggtagcgtaaattttaacctcttgagttgaggtgcttcgcgagtacttttgggttaatgcgaaggttccagctgtagctaatatcttcgaaaatccctttagcgattcaccgagcgaagaaagttcaatctcatgcttttcagcatccaaaccgtcatatctaagtgaaaaattaacatcgtgtaagccagtgttttccatcaacagtccttatatgctttcaccaaaacgtctcatcaggccaccataagcacgatcgcaacaaccgagagcaaagtaaccacgcctactatcagatattctctcatcacccaaacgtctcttcaggccactaaaattatcggcgatatcgcaatacc

SEQ ID NO: 11704 - DNA, 625 bp, Oryza sativa
atgttaagatttcatttgcaaactctttgtcctttctgcaatggccataaatttgctttttcatgttcatagaaaaagaagtcatatctgtgttgattgatttataaaacataattcaaaacagcgtgatctacatgctaaatgtatagttacggccttcttccaaatacaagacattttgttgctcgagttggtaatttgcattctgttgttccctgccgagcaagctctcaatctcctctgcattgtcttcagcttcagcccatgggtgctgctggtatctccttaacatctccagcctctcagcaacctctttcatcgttggccgttcttctccattcatgcttatgcatcgcatcaggaggtatgtgatctcttctagcatttcagcgctcatctcattccttacttggctatctagtagctcttgatggcgaccaactttcattgctgtggtgaagcatgacaccaggctcctgttttcctctggcccgtccaagtacaatgctttcttccttgtcagaagctctagcatgacgacaccaaaactgtaaacatcgctcttatcagtcaactggcatgtcataaggtattcgaggtccaagtacccgcaagctccctgcac

SEQ ID NO: 11705 - DNA, 761 bp, Oryza sativa
  unsure (1)..(761): unsure at all n locations
gccaacctctatgtacggttgaaagagctggccgcgagggttcgcatcggtggtgcggctgtgggcgaaagcgacttagccgttcgcctcgtgtctgccgaactcactgtctctgacatgcattgtgcgctgtattcttccatcggggaggccgagtccctccgctttgtgggcgagatggtgcccgacatgctttgttactcggttctccgtatggatcgcgccggtcggcaagcgtgcctctggaaaggccagacgaggacgctctcttgcaatctggaaggcctcgctcctctcctcaacaggatggcctgngtcctcgaacgactccccgaggagctcgagatgaccatcaagtcatcctcgatggaccttgctcggggggctggncgaactcgtgctagcgagttaccaggcccgttaccccgatttctctccctggatgtgcgctggaggagttccctcccgggaccgaggtcgacgctcgctcgcgggtcggngatgctgccgaccacatcgttaatggcttcgaggggtctgccctctcgctcgcgttcgtctccagctccgacgaggagggcgacgtcatcggtgtggatgacggtggcgacgaggccggctacccttgctgcatcgnatgagcccccgagcccccgcccaatcttactttntttctttttctttcttctaaggccttcatgcctctttttggataaaataactcaatctgctatcagaaacgaaatgatgaaaaaattttg

SEQ ID NO: 11706 - DNA, 502 bp, Oryza sativa
ctccccatcaccccgcacggtagtgcctccctccgatctccctcctcgttccatctgctccccttagactgggtagtagcacgagtagcctccccgtagctagctggcgccgccccgaccgttgtgtgctcgcctccctctgttgtccctcctcggtccatctcctccccttagactcgctgcgtgctcgccgccgctcgctgtgaactcgccgccgtcgccgcctatgctccgtagcgccgctcgacgccgggctcgctcggcgtatctccgcccaatccgacgctagcaacggattcccggagtcgcgtagatgctctagcttgcccgaattgggctcccgtcgcgccgtcgccgtttccccccttctctcgccgccggttgccgccgccgcaatccaccgcagtcgagcagcccccggcgaatacgagtcattggctcgtctcccctagtcccgtgcaacctcccggggtgctcgcttatgcctgtatcgccgtggatc

SEQ ID NO: 11707 - DNA, 514 bp, Oryza sativa
tatgctttaaccttcggatcaatgcttattctatcatattgtattgctagccgattggtttatactacattatattgttattttattacatcatcattagccgattgcatttctatcattatctatattggacatatagccgattgcttaaaccctatcgctattggctggtatcggcatcggctattatttgcatcggctggaactactccatcggcttgtcaaccgatcggctatttgatctacggtttacatatcttgtcagttgcaggatcaaactgactggcatgcccgcacctcatcaacctttggacctgcactggagctaagcagatgtcccaggccagtgtgtgtttttcgcatcaacacatttttggcacgcctggtgggaccacggattttatatccacatgtctgaagaagaagtcaatgccaagatcatggtcacggtggagaatttagcggacgaacagaggcaacagatggagcagtttttaactgattttcaaatgcg

SEQ ID NO: 11708 - DNA, 570 bp, Oryza sativa
ggcaatcctaattgctgcaattaccctccttgaattattgaacacttaaacctccttgttaacgggccttcgggtacgcgcatcggaacaccccccctcaaaatataaaatatccaaccatgggtaaaacttgggttttacaaaagacttggaaaacccgacacctgggtcggtgcttgcgaactaaatgaatttccaaaaaatcggggaccggggaacgtaccgggtgtacggtttcccgctcttgcacttaaggaccgtttccttggaatttcatccgaacataagacaagtgcgaccacatggttggaatgggacacccctggctgagtaactagctaatcgggggagccatgatgccaagagacatgtggattcaacggggtggtgtcggggagaacccccgggtttcctggcacagtatggtctgggacctaatctggtgttggtctgggacccctcttgttggcatatggtgaacctgtgtcggctttcgaaatgccttgtcatgaaagccttaaggtctctagtcgtggccgttctgcacgggctggatgatccaggttagta

SEQ ID NO: 11709 - DNA, 4746 bp, Oryza sativa
caaagagtagtacacaaatatgttgtgtttagttgacttgctttgaacattgacttggaaactgaaatactacgtacgtacttcaggaatcagaattcgtctgcaaaatttagttcttctatttcatgatggttttaggataacatcatatccttgtccttataagaaaaaaataaaattgatagaaaatatctccattccacagataagcagaggaagttcttgtaagtcaacattttttttctcattcttttgtaatgttagttggttttattagtgcttgcttagataaacttggacccaaatgtcacctccccattagtttttcattaaatcgccagatgaagccaaagcaaggccgatgatatatatatccaatgaaacattgtctgttgcataatatttatgacctactcctagatggagttgggaatcaaacaacaattagtgaaagctacatgatatcttccacacaaccatactaatttgagttaagaagtaaactaatatgtccaattcttagtttaggacatcaccgttttgcacaccttaattaattaatgataagcccctggccaattattggccaatgcctagctaaagcctaacactaaagggcagttgcttcacggataaacagtgatgaatgctagtggtgactaaggttattgttgctctgtcaggaccacttatgaaccttgaaaatgaatttaaaatgttatgctttcagtaatatattctagcatgttctcagcatgcaaatcatgcttgtaacaagaatatcttccttcccttgttattaaacaaaacctaaaagttgtcatccatggataagagagaccaagtggtcttgattcttgaaccaatacaagggtaaccccaaccacctaccaatcttcaattctgcccctgaactttctgcacccaaacaggggagctactgggagaaaaggggacaagaggcaaaatgccatgcaactactcaaccaaagctggtcctgatgatgattaccattggtaatgatgtgtttacactgaaagcatatgtgttcaagagagcaaacacatctttttagtaaaaggtaaagcccattggcactcactgagtgggattcctgcaacctttgcttccttaagccaaacacttgggcttgcttttctaccataaacaatgtgaaatcagaggtgaaaagttgtaggcgttggaaggaaggccatcctggaatctattccttccgagaggtagaaagcaagaaaagttaaacagtagtcattggtttcacgcgtcatgtgaccaaccaaattacatatcgtctgaaaagataaaccggcaaatcatattggctatcattttcatttatagtttcattttatcgatgcttgttatttgttcaaggtctaatacgtacttgacccgtgtaagtagtattaattctctctggtgcagagaagcatatatgttgacttcagttgagtgtcctgctggttagaaatgaccaactaggcaactattagcttttttaggctttagcaataattcctgaagtattatgacccatttcagttaaaatagttttttttattcagtgtggtatatattagctttaaaacttttgtcatctcattgaccactttagtcatgtagcactgtgcagacatcacatatgacagcagtggtgactggtgaggaaaaactgagatgctagctaacagtatatgcacaggtcctacatgataacaaccaatagccttcagttataagatggcatatgtcgttgcgtgttgcaagctacaccccttggtgttggataaaaagcaccaagggtgttgcaagaaagtgactagcacaattcacgaaccgctctaacacatgtcaagatggagataatcacaagaagaaccatcaaatggcattcagaaaccacctgcagatgtccaacatctcatccatctacatgatggataattggatatcatccgtgcttgcataattggatccacttgatgtatatattattaaacaaaaacaattcatgtcaaaaagatcttaacaaggcagaatcggcatagtttggctaatctgggacgcttttgggcacccttgaagtgcagttttttttgttgggatggctattcttttctttatgtgtgcttcgcagacgaagaatagggccgggggctccaggttgtggatctcgttcttgattggcctggcccaggatcgctggcaactgtagcgatccaatgtcttgacaggctgcgcaaagcattccggcccatgtgatcgagttggaggatcagtttacatatggaataagtccacattgactcccttaactagtgaccgaatctgattcgtatcattgaaccgtaataccggatatctcgacccccaactattaaaaccggtacaatttaacttccttgacggttttgaagggtggtttcactgatgtggcatctacgtggtagtgttaacctggtctgtggtattggcaggacgcttaggtggcattagaattaagaacatatatgtgagccccatttgtcattcacacaacaaaaaaaaaattgtgaagctcattgacatgcgaggcccacaacgtcatcccctctgtatctttcttcctcctttctctctctctgtttcttttactctccacttcggtagtctccataagcggcgggatctggagcgatggcggtggtggtggatcagttaattaattaataacttattataatcgtgatttcatatcaactaattatttgataatccggggctattaattatggcataaatcatatgggggtgatcgagttggaagatcagtttacatctctctgggcgggtagctatttaagaagttgaggacgggggcgtggtgtactggtgtgcaggcaaggcaggctgcatctcatgggtgatctggcaggtcctgagttcttagaggcccagtgcaaaactaaacacatgggcccttaatatacaacgtaaataatagtcaataaatattaccccttaaattgcataacaacaatatttacataaaaacatcatacatattaccttaaaactttcttcaggcatttctatgtgaaatcattgatgatggtgccaatatcaatttcatccaataatttttttaatgcacaaaattgccaaaccatttagtctttctgttaacaactaaatttggtaattcaagtatcggagatggagatagaaccgaagcggaatccaagatagagatcgttccggaaacagagcgagaatcggctaaagtccaaatcggctgcgatcaggatcggcagagttcgagtcggactaggtagccgattgagccgattccgataatgtgactcggtattcgttatcgggttgagttaatgtgcttcatatggattgccacgcacggattgagtcctgagaaggcaattgtatctattaattaggatattttatgtaatttttttagagataagtttgggcaaaagtctgccacaaagacttatggtattttagaatttgttagaggtaagagtcgtgtccgacaaggacatgttttgtatctcgggtataaatatgacccgaacccatgtaatcaaataacacacgttcaatacaatctcggcgcatcgccaccctttttactttcgtttactttcgacgagttcttgctttcggattgagctgcattggtttcgatcttcaactagaggtaaaacttgttatggcggcttgcgttctcaggattaatgcttccatctttatgatactctaatcttgtttatgtaattcgtcaagttatcatatatcttatataatcttagataatattgttatttaaccttcattcggctaatatctatcgttggaaggcagccgatcaggttaaatatcaatgttgacttagattatataggatatctaccaccctatgaaacatccaatgacttgattgtctagatattgtccttcttttcatacttatagctgcatcaattgagtttgaccttataagtcgtgattagaatctcaatccctagcctgtttttggttgccgattagggtaatatcggggtttcagccgatcttacctgatttaactactttatattttatatgcttgattgacatgttaaatccgccatttctgttaagatcttgttgcatttaggtatattaagctttctgtttgatatattttgtttactttaatatcttaatatagagtggtatcggagtattagccgatatgtgctagatctatctgatcggctatgctatgaatgcttataatctccttgttaatatatatttcgatctaagtgatttatactgtctcggcacggcgaccgatctaccccaatcacttgatttaagtatatatcgacataaggattatataccattaatacctacagccgatcgaatagatttagttctttcttacttattcatgactgtcgatcgacttaaatatgacatcagctcaaaaataaatgacacgtcatcggcgactggccgatcggctatcgtttatagatttaaccgctatttttctgtctttatttcttgttgattgcaggatcaaatcaactggcatgctcacgaacctaaaggcaagatttttttggacctgcaccaaagcgaagcagatcttccaggcctcgtgtttttcgcatcaaacactttcttcgacattttagatctcaatagtttctttaataatttcgacttca

SEQ ID NO: 11710 - DNA, 1612 bp, Oryza sativa
  unsure (1)..(1612): unsure at all n locations
ctgtcgtcggctgagctccggcgagggccgtggaccgtcgatgaggacctcaccctcatcaattacatctctgatcacggcgagggccgctggaacgcactcgcacgcgccgccggtaagcttctatacctcttatactgccagtaaattgtaccgtaaaagttgtctttgtcgaaaacactagctacttagctgtttaattaacttcgattaactcaaattatcaaaatttctcaatccgcaactccgcaaggtatagctaagatatatacacgtaaatttaattacgctttaattaccagcagagaaaaaaagaaagctaggtatgcatgagcagtgggattaataattaattgggttgggagaattaagcagcaaacttaaccaacaacctgtttatagagtaggttagccaggacagaattttcctttccagtgcagcttagccggcgacgtcagtcacgagtccaatcatttcctccactacctgtcttcaaaactatgtgcgcctccgaccacataattaatcactatagccatgcacagttatcacaaattaaccaatctctcacacaactgttgattaattgtaacctagccatcacgccatgtgtctcacaacatgtactactactccaactaatgagtcaatcaattaatcaactgtgagatggatgctgattaatagtggagagagagagattattgatgaaattttaattgtgcatatataggtctgaagaggactgggaagagctgccggctccggtggctgaactatctccggccggatgtgaagcgcggcaacttcaccgcagaggagcagctgctcatcctcgacctccactcccgatggggcanaccggtataatcaaataaattaattagctcactcgtcattgattaatcttatagaatctagtattcatgcatagatcagaaatgttctcagctacttcctctgtatttttaatatatgacggcattaattcttattataacctttgatcattcatcttattaaaaaaattatacaaatcttaaaaatataagtaatagttaaagttcattaccgataaatcaagccacacggccacaacaaaagaaaatatatttgcttaaatttttactgataaatcaaacataatgtaaaaagtgaacaacataatatattagaagacggaggcactatcgttctaatctaattggctgacttcagtgaagctttcattaacttatagtagtcattaactaattaaatcccttcttaagacctgctaattaaccaccatgctcaccatccagcaaacctcgaggcgacacgtgtcctacactgtagagaagaatgaagactagcttagcttagcttagattaattagctgggagcttaatttgacgcctcgtgatgcagattagactcgtgtagacgccgctagcaagctaagctaaaagtaaaggaaggacatgtcacggtcgtacagacttgtgacgtggacgtgacgtggacttggccgctctcaacacatgtcaactcgtccctgccatgtacaaacgcacgtacgtgacgtgacacactaattcacacactttcagaattttaatcagccaaca

SEQ ID NO: 11711 - DNA, 573 bp, Oryza sativa
gctggcggagatcgcccgagaggtggaggaggagcgagaggccgcccttgtcgccaccaccgcgatgattgaggcgcaggactccctccgccttcaacacgggagctgggaggcggagctgaagaacaagctcgacgccgcccaaggggttcttgactccgctgctgcccgagagcggcgggcaacggaagccgaagcggcgtcccggcggcgcgaggaggcccttgaggcccgtgccatggcgctggaagaacacgccggcaccgtggagaagggcttcacggaccgcgaggccgccactgctctccgggagacgacgctggcggcgcacgaggccgcctgcgccgaggaggagtccgcgctccgccttcgcgaggatgcactcgctgagcgggagcgagctctcgaggaggccgaggccacgacgcaacggctggcgaacagcctctccctccgcgaggcggcgcaagaggagcaggcgcgccgcagccttgaatgcgtccgtgccgagagagccgcgctggagcagcgggctgccaactcgaggcacgggagaaagagctggccgcgagg

SEQ ID NO: 11712 - DNA, 927 bp, Oryza sativa
taaggttaacacaaacaatcgtgatataggtttatgatttttttttataggatacagcaggagaggctcctactgtggtttaggtttttatccttatgctcatcatactagacatcctgcctgttgttttaggtgttggtgctaggagtggtgaaattttgattaaacctaaaactaaagacactgtttaaatttgctagcatcatgacttctttaaatgcatcatcttctaaatctgatgttgtgattgcaaaactgcctgttgctactcctgttgctaagtcatctgtttctgtttttgcttctaatcaacgtgagaaatacacctgttcgttttgtggtaaagatggacatcttgtcagtttctgttttagacttgctagaaaacagaaaaaggaacgtgaaattgcttttgcgaaaaagaagtggcaaaaatcaggttctatttcgaggcaggcggtcagaccacagtagaactggcggtcagaccgacgctctactaccgatcagaccggcgatagacctatggttagaccgcaggtgtctcagtgatcagaccgacctcgggaaattttttctaacaggaaacgggttgaattttcttctggttatgctcctgttggttctggtcgtgtgtctcagtactggattcctaaatttttattatctaaccccagtactgaggcttcgacttctgcttgtgtgtaggcatttttggtgaggatggagaacgtgtggattgtggactccggttgtatgcagcacatgaccagtgattctccttcctcaagaaggcgtcaaggagggactcgatcatcttcggtgatgcttctactagttcgataacaactactggttctgtcaaggtaagtgacaagtttacattgaatgatgtcactttggttgagaatttgaaatataatttgc

SEQ ID NO: 11713 - DNA, 646 bp, Oryza sativa
cctattatgccgtcgttgttgggcgtctacgtcttcaccgactggcttgccttccccgccgccgactggtgtttccccctgcacggctggcctttatgcccgccgctgttgggcgtctacgtcttcaccgaccggcttgccttcgccgccgccgactggtgtttccgcctgcacggctggcctattatgccgccgttgttgggcgtctacgtcttcaccgaccggcttgccttcgccgccgccgactggtgtttccgcctgcacggctggcctttatgccgccgttgttgggcgtctacgtcttcaccgaccggcttgccttcgctgccgccgactggtgtttccgcctgcacggctggcctttatgccgctgttgttgggcgtccaccccttcaccgaccgggcttgcctttcccgacgcccgaactgggggttccgccctgcacggctagcctattatgcccgctgttgttggggcgtccaacgctttcaccgaccgggctggccttcgccggcgccgactggggtttccgcctgcacggctagcctattatgccgctgttgctgggcgtccacgtcttcaccgaccggcttgccttcgccgcccccgactgggtttccccctgcacggctggcctattatgcc

SEQ ID NO: 11714 - DNA, 2112 bp, Oryza sativa
agtcatagcaatccatttgggcatgagcctaagtgtaggattatagatatcattcgtcctaggtttcttgcaaattggagcaccagaaatatcttcccaaaacctatttttctcgaacccagaaattcctttctggagatcgattttacaggtatcgtgaaaaccaagaagtgtgcttaggcctttccatgtaagtgtaaactcctcatggaaaaagcaaaaggaaattccatcttccatttctttcaaagtgcacagaaattgcaaagtaagcaaatgagaaccaggctcatataccacagcaaatttctgccaaccaacagctttccaaatagaacgaaattcagtatccatacctatctttttcagcaactccagtgagtactctcgcgtgtgagcatactcccggtcggccagcatgtagtaggcttgtctctcccgatcaccgacaaggtcaaggtcagcgtcgttcaggagttgtcgtggagcttcggcttcttccatcatgatatcggctgatgaacgagtactagactcgtcatgatgacttgatgaagagccggatcccttgaacagacgagacaatcgcctcctcattctgcacaatggagcaaaaacggactaactcggcgggggttaggaatgacaaagatttcacctaccggttagtttcaccaaagcaacttgtatatatgtaactaagtattcgaatttgagggaaactatcaaagcttgaatgaatttgagagcaaactttgtagagggaatgaaaatgtattgaaatggggtggaattccctctctcggccgactggctcttatagggtacccacaacggtcaaaaatgacatgtgggacccactagccgttaccctgccaaaagtggcagggaaccgttacctggccggttcaaccgaacccttggtgggcccaaccggccccactttcggctgttggattccaacggttagtgtggtcatggcacagtgcatttcgtggaaaattttattttggtttgctctgaaaaattcatttgaagaatttcctcaaaattcaaaagtcctaaatgcaattttgaaaatcaaatatgtgatgatgaaaaattcaaatttgttgaaagcaaacatgcggatacataccaatttacctgttggcgaaggtcgcgtcatttaaagtccgacgtgcaagactgtacctccttccaattcagttcatggattttccactcgtctccggaggtgatggagcgggcgtctttggcttctccctccacaccttctttggcttaggtggggatggcggcttcttctgagccagctgctctaacttcttagccggtattggtggttttaccggtagcctccagtaacggttcctaggcatcgttgtttccttctccaggaaattctgcatgaatttcactaggctgtccgtcttgggtggctccacttcgacctcttcaatattctgcgggttcggcccgtactttattctgaccatggagcattgttccgtcctcggttggaacttaaacttcttctccttcccattgatatggaatcggatactccccgttcccacgtcaatattggctcccgcgatgctaaggaacggacgccccaggatgagcggcgtcacctttcccgactccatgttcagcaccacgaaatcaaccgggatgaagaaatcccgtatcttgactggcacatcctccgctatccctgccgggtaacggactaacgagtcagccagttgtaggcgcatcggtgttggtgccaacaccatgaagttgagcttgtcgaaaacgtcctttggcatgacgctaacgctggctccaaggtcgcacaagacctggtcgaattgctgtgccccgatcgagcaggtgatcatgggacaccccgaatatttcttctccgggagcttgtggagtatgatgttgctgtattgtttcgtcagcttgaccacctccgttattgggagcagtctcttgttgttgagtatatcctttaaataacgggcgtatgttggcacctgcatagcgtccaacaatggcacattgatgtggattttctggattacttcaacaaaatgagcaaattgctcgtccactgac

SEQ ID NO: 11715 - DNA, 4168 bp, Oryza sativa
gtgatcaaagaagtgcattttataggagcggagacctctatgctctctacccactgcctaatcatgggttgcacaggagaaactctaatctaatgaaccatggcatatataataatcatctcattatcatgaacaggtctaggatctcctctaggaaacaaagtcatggcaatccatttatgtataagtctaagagttggattatggatgtcattggttctgggtttcaacccattgttttccagataacaccaaaatccacatccatacctgttttccggagtagctcaggatcgtatgctcgggtgtgagcgaacgatcggttcttcaacatctggtaggtttgcttctctcgtctgtcgacgaggtcgaggtcgtcatctgtcaggagctgtgaagcatcgtccgtgtcctccatcgacatgtcggcggacgaacgatcactcgcattatcggatcgggagccagatcccttaagcaagcgagagagccgtctcctcatgactgcacaaaagcaaggatacaaagcgaactcgagcgggggttagtacaagataaaatacccgccggttagctttgtaccaacagcgacttgcaaatgtagcgaataaaggattttaaatataagacgagcttgcaccagcctggaatgaatttgagagcaaaatagaaatgagaaggagtaaaaattgagttggcatgagatgaactccttctaccggccatcccttttttatagtgcacctccaacggctataattgtgacacggacccactaaccattggtgtgcaaaagaagggaggtgactattgcctgttgacggtcgtcatcgatcagttacatccgtcaatattaccggaataaatgaagaactagttatgcttgcaatgcatttagtgtcataataaaataaaaaccactagcacttggttcactaaccctttgcagagaatgagccataaatggagaagaatcggcatcaaaacaagcgaataatcaatcggacgatgtcgagaaacagaattgtgtgtagatgggccagaaactcagaattgacacgatcaatttgggccaaaattcacaagtctacaaagagcagaagcaaaggagcccgccagccgaaaatgggctggtttggcctagcccagggttcggccgaacctccctcacggccgttcgatccaagtggacggcttggatcactccccaatgacggttagagggcaatcctgacaattccaactgccataaccgtcattggcagcctatttaaggcattcactccctccatttcttcacacactccaagcatcgaagctctcactctctctcaagtttagtttagtgttcttaagctagtggagtaggaatagaatagtagtcggagtctggaagtctttggaagagttcgggtatggcctctagtagctttcctttcttcttttgcaagactagtatttaatttagaatattcctctatatacgactctagtattgtaatattttccgaatatatgaataccagctttacaatatgtccgagatattatgattatactgctagcttttctaggagatgcattggtacgggtataatgtttgcatatgcaattactctatgtcatgacgatgatattagagtagtatctgggtagtttagacgtgggtgtctagattactagggtatcattatttgggggttatatgctgcggatgaaaggtgggccgctgatggtgacagctcgctacgggtattcccccctgcgtgtatataatcctaagttaattccctggggagggtactcctccgtatttagccctggttgtatggtccatgacgggctgtcgtaagggaactcggcggtcaggggtggcttctcgaagtaccaggagggcatcagaaagggggtaatagctagttaatcatatatttaggatgtatgtacactatgtatactagaagtataggaatagattcttttctatattctttccacttagcttagagatttaatataggaatgagtagcttgagcttgtgtgtcattctaccctggaattatctttaccccttcttaggcacgactagtacaagtaacatataaatattagtttagttctctctattataatcttcccacgggataaacaaatacgatacccttggaaaactctcaggtgaaatgctacaatggtatatccgtgcgcttgcggataatctctgtaaccataatataccttgactatttctggcgccactgctgggaattatatttctagtaatgtcgttaggaaataccaacaagcatttctggcgccgttgctggggaagatttataagaagagattcctaaaactaatatcttatatttacctctgtatagtcaatatcctttgcaggttaaccttgttgttttcaccctttgttgtgaaaatagggtagtgtataattgtttttgacctgccggaaaacttccaggaaaatccataagtcttcttctgaagcataaaactgcgggttgttcccccgcagaagactcttccgacaaagaagccaaacgtactagcgccaccaactttcaagaccatggctgacaagactcttcgcgagttcgctgctccctcctctaagaatgtggccactgggccgcagctcaatttgggagacatggactttgatctgaagtccagcctcattacgatggcgcaggctagcccattctgtcgcaagccgaacgaggatgctaatgcacacctgcaacaatttctggagatttgcagcacgtacactgtgaagggcgtcagtcctgatatcgtcaggctgaggctgttcccattttccctcctcgggaaagcgaagaagtgattctatgccaatcgtgctgtgataaactcttgggaaaaatgttcgacagcattcttgtcaaagttcttcccgatgggcaagattaatgcccttcgtgggtgaatttcgggcttctagcagatgcggggatgagtccattccggaagcatgggaacgtttgcaggaatacgtggccgtctgtcctcatcatggaatgtacgactggctgatcctgcaaaagttttacaatggactcactcccacgtcccgcaaccacctggatgcggcagctggaggagctttcttctctaagatggtcagaggagccatcgacctcatagagaagatagtctctaacatgggttggagcgaggaacggctccaatcccgtcagcgaggaatgcacactgccaaggagacggaaatactcgctgcaaaactcgacctcctaatgaaacgacttgacgaacacgacaagaagccccaatgcaccgtcaaggccttggactcgcacatcacgtgctaagtctgtggcaacacgggacattctgggaatgactgcccagagacccatgaagaggcgatgtacatgggtaacaacaacaacaacgggtaccacccgcaaggaggtcaggggtggaaccagccccgtccgtatttccaagaaggcaataaccaagctaactactgacgcacttaataaaaagatggttgctaatgacaagatcttagaaaatataaatgtgaaactagatggctttgcttccgcattccaaaaccagctaagtttcaatgaaatgattgaaacccagttggcacaattagctgctctagttcctacaaatgaatctgggaggattccggggcaacccgaaccctccatagaaaatgttaaggcgatcacgacgaggggaggtaagtccacttgcgatccgccataccctaacaatgcaggtactagcagcaacagcagggaaacaccgtctgacgcagcggctgaagaagaaattcagccagaaaagaccgtgccgcagcattactgcgacacgaggttgctgccattcccccagaggatgaggaagccgtcagtggacgagcagttcgctcgtttcattgaggtgatctagaagattcacatcaacgtccgttgttggacgctatgcaagtgccaacatatgcacgttatctcaaagacatcctcaacaacaagtgaccactaccgacgaccgaggtggtcaagctgacagaggaatgcagcaacgcgatcctccacaaactcccggagaagaagaaaagattcgggggtgtcccacaatcacttg

SEQ ID NO: 11716 - DNA, 1403 bp, Oryza sativa
acaatcaagctattggaagcttcatagagtggtagatatcctatataatctaagccaacgtcgatatgtaacataatcggctgctccctagcgatagatattagccgactagaggttagatagcgatattgtcagagattatataagatatatgataactcgacaacttacatgaacaagattagagtatcataaagatgtaagcactaatcccgagaacgcaagccgccataacaagttttacctcttagttgaagatcgaaaccgatgcagctcaacccgaaagcaagaactcgtcgaaacaaaacgaaagtaaaagagtggcgatgcgccgagattgttgttgaacgtgtgttgttgtattacatggtgtcacaccctaaaaatcctaaatgtataaattgttgtttaattggaattattagaatttattttaaaagcctagaagagaagagctaattttaattaataaattccaatataaaatggggccagataaaattttattaaatactttgcttaattctataattcctagatttttctgggatttatttgagctaaggaagtatttttaataaatggaattgcatttcatgaataatttaaattgaaaaaggtttttaaaagtcttcttttggctttgggccatcggcccaaaaccctctctctctccccccagcccaagtcggcccagcccgcagccgcagccgctcgcgcgcgcgcgtccgcccgctgacaggtggggcccacctgtcggacccgtcatctacctccggccgccgccgcccgaaaccctagcgccgcgccgccgttgtctccttctaaattcggccgcgtctttcccgatccggtgaaattgattgaggggaaacaatcttcgggatctcctctaccttttctcttttggaatcatcggctaaaatcgtttggaaatccgtggattcgaggtcgaatcggatcggtctctttcctccgaaccccgatctttccttcgcgtcgccggtcgccgtgggccttcgccaccgccctccaacccctttaaaaggatccccggtgtctccgctacccgtcgccaccctcgccttcgtctctcgccgtcggaagcgccctagcgccgtgtaacctcgtgccgttgtcgtcgccgccgctccagccgtgcgccgccaccgttccggtcgtcatcgtcgctcggggaggtcgccatcgtggtcgccaagttgccgccgtccttgtccgccccttcgccatcgctgtagaccgccggagcaccgccgtcgtcgtcgactcgaagaccgtcgccgcttcttcctcatcgtcgtcgccgtccgttcatcttccgccgacgttttggtcatcggtgagttcgccgcgtcgcgctctacgtcctggtgccctccgtt

SEQ ID NO: 11717 - DNA, 1046 bp, Oryza sativa
catgtactgttcatgcttgtttatgtgctgttttggtgattttgctcttttctgcttagattccgacgtttccggagagtccgttttcgcaggagaagaatttgaagagttccaaggctagcaaggcaagtcacacagatcccaaacaacccttttgagcatgttgatcccgtttaaagctattgtttctattcaactattgcatttattttcgaatgtcattgggtggaattaacctattgtttgttatagcccttttgttcttgattactttattccttgataccttgggttaatataacttgactagttgagctttatatatattggttcagctagatattagatgtgattgcttagccatgcttagaaacattagcacattattgggataacttataattcattattatttaatgatgattttatgttagttcacgatggtcaatcgtgattggttaattaattacttgccaactaaaacttgataatggtgggttgtgagcacatggttttgacagtcgtgctcatgacaattaaggaccggttcacgagtttcggatgtgaaacattaaccgtgccaaccacaagccagcgtgggcaacggctttaccttttgtatagcatggtttattgcggggcaccagactgagaagtggcggagataagcccacaggggtcgctggggagtccatgcgttgtttataagggggtgattatgatccaggaatggtgcgctgcggtggagtgtgttatgcaaggggtattgtcacagctcctttccgaggtaccgtggtggtattgaggcacatggtgacatgatgtggggctgtgtcttgtgggtacagtggtacacctctgatcagaataaaactattcgaatagccgtgcccgcggttatgggcgggtctaacaatgtctttcgtgattagtctcacacctctcatcgtaataaaagatgctataattggtaataatttgattagctcctggtttggaatggtatattcaaagtttggagattgatctgtacagccgggtatggc

SEQ ID NO: 11718 - DNA, 634 bp, Oryza sativa
tttgagggttttttgctctttaaatgaatatttgcgaatttcttcatttaaattttaatttaaaatcggatttattgcgtcagccgaggggaggggcgcgcggaccgggtccacgggagtggggcccatgcggcagcctcacggtccacgatggaccgggtgcacgcggcttacgccggccggcgccgtgggtcccacgcgtcagccgcacacgagggcgcgggcggctgacggccgggccccacatggcagccgcggggcgcgcccgaaggcggcctcgccggcacagccgacgggaggcgacgcgcccgcgccccgatggtcgccggcggcgaccaccagcgcggcggagcggcgcccgagagaggggagggaagggggaagtgaaacggcggtccacggctcaccctgggtcgacggcgacgacggaaacggcgaccggagcggaggaaggcggcggcgcggctcgggtcgacgaggacggcggcgttccggtgatcggcgggcgaaacggaggagtggacgaggtcggcgaggacgcggcgaagccgaaggaggcgatgccgaagcgggaggaggtccggggcgacggcggcggcgaaccggagctcggcagcgacggcggagaaagagg

SEQ ID NO: 11719 - DNA, 1413 bp, Oryza sativa
tatagcatgttttgcttgtgtgctttgtttgtcgcgtagatttcggtcgtttcgtcgacccgcggtttctcgaagaccttgctgaggtctcatcagtgcgagagcaaggcaagtcatgcattataattgatcatattgtacccaatttacaaatatcccgcatttctatcaaatgttgcattcttttacaatgtcatgtgggatgggtcctaccactcagccatttattgtttaccctatgccattaataatttgggtatcaaaatgattagatgttggtttaggaaatgctcagccatgcctagttcaactattacacaaatggggatcacattattacatagactttgactattagcatagctttggattggtgccaccgtaatggtgttagttaattaaaatacactgaatggtgggctgtgggtgcatggtttagctggtcgcacccatggcagttaaggactggttcacaggaaaccctaggagacttaccgtgcttaccacaagcgggagtggataactgcttgatctgaagtatagctcgaccctttcctaggcaccggtggcgagggtgggcgtgatggagttgggtcggccggggtgtctggttgtccagctgccggattcaccgcggcgtaagagggaccgcccattgcctgttggggtgggggtgaaacctttgcgtggtgtggatggttaggagagagttatgcggagggtcttgacacgatttccccctttgcagtatcatggtgatactttggggcatggcgacatgtgtggaatcgtgtcttgtgggtacagttgtacacctctggccagagaaaaactattcgaatagccgtgcccgcggttatgggcgatcaaccagattcaccgtgattagtctcacccctagtttagcttaatgaactggtgtagttcaggtggttggttgggcctgttgcaacgtggtatagcgttggacagtgattggttaatattgcttaattactacaattgttttactgctttcaactgctgcttttaaatgctagctttgtgcaaatgaacccatagcctcctttggttatatcctgcatcatacattctcatccggtatgacttgctgagtacagtgggtagtactcagtcttgctttcttttcccccacaccagagctgaagatcttcctagtgggagctgttctgttgaagttggtttcgtcgatgccgtcaaggattgcctgtggagtggagtcgcccgctgcagaagtcaagaatccaagtttagttcgttttatcttttccgctgcatttgtaatcttttatatttttgtaagacgtggatctgtatgtcaacaattatcgtttgtgtaccctggctggtccttgtcacaccccgaagttttcctcccaagccaaattgtaa

SEQ ID NO: 11720 - DNA, 1607 bp, Oryza sativa
ctcaaattgggcgcaacatcgaagcttacgtagatgatgtagtcgtcaagactaagtagaaggatgatttaatctcggacctagaagaaaccttcgcgagcatccgtgctttcaggatgaaactaaaccctgaaaaatgcaccttcggagtaccgtcagggaagctgcttggttttatggtgtctcatagaggcatacaagccaacccggagaaagtcaccgctatcctcaacatgaaaccgccgagctcccagaaagacgtccagaagctgactggatgcatggcggtgctcagccgattcgtctcacgacttggcgagcgggggatgcccttcttcaagttattaaagaaaacagacaatttccagtggggatctgaagcacagaaggccttcgaagacttcaagaaacttctcaccgagccaccagtcttagcctcaccacacccacaggagccgctgctactatatgtatcagccacctcctaggttgtgagtacagtcttggttgttgagcgtgaggaagaaggccacgtccagaaagtccagtgaccaatctacttcgtcagcgaggtcctagccgactccaagacgaggtatcctcaggttcagaagttgttatacggtatcttgatcaccgttaggaaattatcccattacttccaaggccactcggtcacggtggtcacatcgttcccgctcggcgatatactgcataatcgtgaagcaaatggacggattgccaaatgggccttagaattgatgtctttggacatatccttcaagccccgaacctcaatcaagtcccaagcattagcagattttgtctccgagtgtaccgagtgccaggaggatacccccggagaaaagatggagcactagaccatgcattttgacggatcaaaaaggctttcgggcactggagcgggagtggtcctaatttccccaactggagaaagattaagttatgtgctttggatacatttttcggcatctcacaacgtcgcagagtatgaggcgctccttcatggactacagatcgcaatctccctggggatcaagcgtctaatagttcgtggagattcacaacttgtcgtcaaccaagttatgaaagagtggtcctgcctcgacgacaacatgacggcataccgacaggaggtacgcaaactggaaaacaagttcgacggactcgagcttagtcacgttctccgacacaacaatgaagctgccaacagactagccaactttggatccaagcgcgaggtggccccctccgatgtattcgtcgaacacctttatgagccgactgtacctcagaaagaaacgactcaagttgcggacactcaagacatagccatgattgaagccgactggagagagcccctcatacgatttttaacctcccaagagctccctcaagataaagataaagccaagcggatttcaaggcgtagcaggctttatattattcatgaagccgagctatacaagaaaagcccttcaggaattctacagcgctgtgtatctctagagaaagggagacaactgctgaaagacatacattctggcatatgcggaaaccatgccgccgcacgcaccattgtcggc

SEQ ID NO: 11721 - DNA, 743 bp, Oryza sativa
ttgttgtataacaataggttcctatgggggtaatgaacgcagttttttcctcatcctccctagccatgcgaatctgatggtaaccagagtatgcatctagaaaacacaaaaggtcgcaccccgcagtggagtcgacaatctgatctatgcgaggcagggggtaaggatccttaggacatgccttgttaaggtcggtgtagtcgatgcacatccgaagcttgccgttcgccttgggaacgaccaccgggttcgccagccactccggatggatgacctcacggatgaatccggcctccagaagtcgcgccacctcctcgcggatgaaggcttgacgttccggggcctgccgtcgcactttctgccggaccggccttgcgcccgaccgcatggcgagacggtgctcaatcacctccctggggaccccgggcatatccgccggtctccatgcgaagacgtcagcatttgcccgcaggaaggagacgagcgcgtcttcctatttgccgtccagaagaccaccgatccgtgtggtcttggacgggccgtcgcccagggcgacctccttgaccgggacctcatcgcatgtgatcatctgctgcctcggggtggcgggggcggaggcgccaagcctctcatcgccaccctcgggcttggacgcgacgacgagatggtctgcgcgctgctccatgcaagcaagcgcgactttgaggtcaccatggacagagatgggtaccgagctcggattc

SEQ ID NO: 11722 - DNA, 800 bp, Oryza sativa
gaaaactggcaccaagatatgtgggaccattccagatcatcgccaggcgaggagaagttgcatatcagctacagttaccagagaatatcgcggatgtgcacccagtcttccatgtgtctaagctaaagaaatgtttacgagtgccggaagagcaagctccgctggaagagtcacattagcaaggatctcacatatccagaacacccgatccggatattggatgaagccggcaagaggactaacagcaaagtgtggcgtatgtacaaggtacaatggagcaatcccactgaggatgaagccacctgggaaaccgaagaattcttgaggacggagtacccgcatctattcgaaaactggtaagaaatctcgggacgagatttatttaaggggggtaggtttgtaacaccctgaaaatttgaccgacaaaatcaaaactataaaaatacggattttcaaaaactttttaaactaattgcatcatgctgatcttattcgtctattttatctggatttgatctcgaagattattaatcgtgagtaaagaatagttaattaggaataaaccttaaaaacaaattggtgaaataaatacaaattaaaataaagattaggtggggatagaaataaataaaatattatcgcaaccatatttggatcaattaaatttaaatacgatggaataagaattaaccctaattaaaactcaaataaattatataggaataaaatatgagtaatattaatctagggtgattcattagttaagataacacggagtattgagtaaaatgcatatatgc

SEQ ID NO: 11723 - DNA, 866 bp, Oryza sativa
ttcgccatcgcccctctccacgccatgttcccggtgccggcggccgcgggcagcttgtggcgagaaaacgacggctgcgtggcgtggctcgacgggcagccggaccgatcagtcgtgtacgtgagcttaggcagcttcgccgtcatctcgctggagcagttcacgaagttcctccacgggctcgtcgccgccggctacccattcctttgggtgctccggccggacatggtcggggcgagtcagagcgccggcgccctccgcgaagccgtcgcggcggcggagaagaacaacaaggcgcgcgtcgtggggtgggcgccgcagcgggacgtgctgcgccaccgcgccgtggggtgcttcctgacgcacgccgggtggaactcgacgctggaggccgccggcgagggcgtgccgacggtgtgctggccgttcttcgccgaccagcagatcaacagccggttcgtcggcgccgtgtgggggacggggctggacatgaaggacgtgtgcgacgccgccgtcgtggagaggatggtgagggaggcgatggagtccggcgagatcagggcgtcggcgcaggcgctggcgcgcgaggtgaggcaggacgtcgccgatggcggctcgtcggcggcggagttcgagcggctcgtcgggttcatcaaggagctcagcaatcagcatgatggacagttcatacaagcttaactcgagctattcaatctccgagtgatgatattttaaagaaaaacactttcccaactatagtattgttgttgtggcactgacatgccaccgtgtgcagtcaattggtcatagttccctcttttctctaacaaaatttaacaaatcaattctttcattgtttgcgtttc

SEQ ID NO: 11724 - DNA, 1035 bp, Oryza sativa
agggtgtttatctgtccacgaggtactatatgtaggttcagctgagctatctcctccctaagctcagggatcatcccttccattctcagatgattgcaatggctcttacgactcagagcgtcggccacaacgtttgctttgcctgggtgatagtgaacttctagatcatagtccttgattaattctaaccatcgcctttgcctcaagttgagatctgactgggtgaagatatactttagactcttgtggtcagtgtagatatcgcaatggtttccaatcagataatgtctccaaatctttagcgcatgaaccacagctgcgagttctaggtcacgggtagggtagttttcctcatgtggttgcaattgtcgcgacgcataggccacaacttttccgtcctgcatcagtactcctcctagtccttgccttgacgcatcacaatatataacgaagtctttcctgatgtcgggaagaactaaaataggcgccgaggtcagcttttctttgagctgctcaaagctttcctgacactgttctgaccacacaaacttcttttccttcttgagtagttgtgtcattggtcgggctatcatagagaacccttcaatgaaccgtcggtagtatccagccaagcctagaaaactccgaatttcagtcacagatttgggtgctttccattctgtgacagcttccactttagcaggatccactgctactccaccggccgagattacgtggcctagaaaagcgacttcttttaaccagacctcacacttgctgaattttgcatataacttatgcttccgatgtttctcgagtaccaatcgcaagtgttccgcatgttcttcctcatctttggagtagattagaatatcatcgatgaataccaccacaaatttgtccaagtagtccatgaacactttgttcataagattcataaagtatgccggagcgttggttaaccccaacgacattacggtgaactcatataatccatagcgtgttgagaacgcagttttgggtatgtccccggtt

SEQ ID NO: 11725 - DNA, 700 bp, Oryza sativa
aaaagaaacgctgggtttcaccaatatggggacttcttcaacctccttggctatgtaagtttttttaaaaatttagtataagagactaatatattcattttaaagatacacaataatcgagcacactgctgggaatatgtatgaactacacggtttgtgcatgcatgagtgcaataatagttaaaattttatgatagtcggtcttcattttgaaaaattatagcatatgctttatgaaacccgccttaacttggctcatggctcaaaattctcattcactaaaattgcacacaatagctcatcacatcaaacttgttgcaggcatggcagctatggaaggatggaagttggcatgaacttgtagatccatcattagtaagtgaaggtcaaatgatggaaataaagaaatgtatgaaagttgcacttttatgtgttcaagagaatgcggttgatcgtcccaccatgtccgcagttgttaagatgctttcaagcgagttgaaaattctacctgagcccaaacaaccagcattctttaatgtaagggtgaaacatggagagctgtctaatactgcacctagtagcataaacgatgtaaccataacaattgtgaacggcaggtaatgccaatatatatagggactttaattaaaatggtaaaaacccacaggactatataccttgtacagaatgtaattattaa

SEQ ID NO: 11726 - DNA, 2418 bp, Oryza sativa
gccatagaaacccccagaacccaggaaattaaaatagaacaaataaagtcagaagaaccaagagaagaaatccagaagtttgataaggtattaagtgaggaagagcaatgggaagtaaatgagaaattattactagagagttatgaagaagaaaacaacctgatagaggaaatagagaatatagaagaagaagataatgcagaacaatataatgattttatagactcattggatgaggtaggtttgcataatctagataatgcaatggaagctatggaagtagatttgggaacaggaaaaaggaaaagatacggagagagttctgtaaaaaatgaaggagaaagagaaagaccagccagggcagcaggaagatggcctccagaaaaagaagaatattcatatcattatatcccaggacagtataggcacatgggcactaaaagaagagattttgagaaaccaataaaatttcaaaatcaaaatagtgatggggctatactaaatctagcagcacatgatcccatagactggccaaatatcattagtatttggaaggggttaatagttcaaaaatacatacaaaatcagcataatatagggaataaggtggaggatatgataacttatttagaaacatttttgggtgaatctgctaaagtcctatgggaacaatgggttgaaaagaatcctaataactacgaagagctaaaaagagcaggaagtaatcctcacaactttgcaaatatagtatctaatattatcatagctgaagacccagaattaggatatacaaccctgcaaaatgaaagattaaaagaaatagaaaaattaactttaacaagctggaaaggtataaaggaattttctcaacattatctatataatgcaacaactgctaagcaaggatacaataagggaatagttgagcgatattttaataaactacctgacccattaggtagtatgatttttgaggaatataaaaaggaaactgaaggagctgaaattaatatttcccaagccataaccttcgtgttcaaacaattaagaaaaatatgcacaggaatacaagcccaaaggtcaatgaaacattctgattataatttttgcaataaaataatacaaatacctttatcatatggagaagataggcctagaaataaaagaaaccatagatatcaaagtagaaatagcaataatataaagacaaagaaaaggtacttcttaagaagatcagataatagagcaccattcttacataaacgaaatgtaagaagatataacccaaagaaaacttatgataagacatgcagatgtttcatatgtaattcaccagatcatttaagtagaacttgcccaaataaagatcaaaaaagatattctagtaaatatgaagaacaatagagagttttaattatagatagcataaatgaaaatatattagtatgtgacgatgaaataaaagatgacgaatcaatatattatatcatagaaacagatgaaattgaaaacaccaatgaagagtatgaatcaaccgatgaagagttaaatttaattgacgaactagccagtttaaaaatagaaatgatggatcagttaaattgtgaacatgattggattagaggaaaaggagattataacattaaatgtgctttttgcatctattacccaagccaagataatagagtaacctgtagtatatgcttaaaacaagcttgtgctgaatgtataaaagcaaataaacaaaaatggagaaaagagatagaattagaatcagatgaaaggatattatctagtagagtacgagttttagaaaacagaataaataaactagaagtagaactagagaacctaaaaattaactatgatattaaggcattaccagaaaataaggatatacaaaataccgaatttaaagagcaagtgataacattaaaagacagtaatactgctaaaataattcaactaaaagatgccataactaattttggaaataaatatatagtaaaattgcctttcaaagaaattttgggaataagaataccggtaaaagtaaaactatcacccaaggtatcatataaaattctagcactagtagacactgggtgtacaaaaaatattattcatgataagtactttataaaatgtccagagatagttcatacaattgatgataataaggcagaagtctctacagacatgtccggaataaagaaaattcataatcagttagctcataatgttgaagtatacattaatggaactaaatatataatagatgagattacaataagaaacttatccatgataagtgatgacatgataattggcctaaggtttttacaacaatcggtacaaaccacagtaatacatgagcagggaattacttttattccatatcaaaacaatgtaccatat

SEQ ID NO: 11727 - DNA, 8365 bp, Oryza sativa
aattcctgcagcccatgaacttagtgagaatatagacatctattatatatcaaattccaatatagagtgcataggattacaagcatttgcaccaaattggtatagggatattaagtctaaaaaggatatagaaaaaattgttcaaagattagaggatattcaaattataggagaaattcctatgaaatattgggagaaaaacgctatcgagtgtaaaattaatatattaaacccagaatatattattaagaccagcccaatagaagcaactccgaaagatatagaagaatttaagatgcatatagaagaactgctgaaactaggagcaataagagagagtagaagtccacataggtctgcagcttttatagtaagaaatcatgcggaagaagttagaggtaaatctaggatggtcataaattataaaaggctaaatgataatactatagaagatgcctataatatcccaaataagcaagaatggattaataggatacaaggtagcaaatatttctcgaaatttgacttaaaagctgggttttggcaagtaaaaatggcagaagagtctatagaatggactgcattcacctgtccccagggacactatgaatggctagtgatgccactaggattaaaaaatgcacctgccctatttcaaagaaaaatgcaaaacatttttaacgataatcaagaatttgtgttagtatatatagatgacttgttaatattttcaaaaacttataaggatcatattgctcacctagaattattttttagaaaggttgagcaaaatggtttaatcctatcaaaaaagaagatggaaatatgcaaagaaaaagttaacttccttggacatgaaataggagaaggcaaaattcatttgcaagaacatattgctaagaaaattttacaatttcctgatgctatgaatgacaaaaagaaattacagcaattcctaggacttgtaaattatgctagaaatcacatcaacaatttagcaaagctagcaggacctttatacgctaaattaagaaaaaatggtcagaaatattttaattctgaagacattaaattagtaagattaataaaagaaaaagtgaaagaactaaaacctctagaattaccattagaagaaagttactttatcattgaaaccgatgcatcacaacaaggttggggtgctatattaaagcaaagacctactaaattttccgctaaatcagaagaaaaaatatgtaggtatgcttctggaagttataaattaaaaactgtcaataatacagatagagagatcatggcaattatcaatgcaattaatgcctttaggttatacctagggtttaaagaattcacggttagaaccgattgtgaagccatctgtagatactataaccagcttaatagcaagaaaagctcaactagaagatggattttatttgaagacattattacaggaaatggttatagagttatatttgaacatattaaggggaaagataatagtttacctgacatgctttctcgtttacccatatttcaggtatgaaaagatcaatgaattacgccggagtcgagtgcttcacatttggagatgacaacaaactcagaatattcccaccaaattcatataaatttaagccaaaggaccatataatcctagatgaagttcaagagtgcatcttggacaatttctggtaccaatacaataataaaagggaagaaaaagggtatatgttatcaatattgaatagcctctctgaatattttcacctaataaatgggtcattaatgcctgccaatgaagatcatgaagtaatccaacagaagcctatatatgtagtatttgatggaagctccctggggtctacatttcttttgaagaaattgtggctcaaaaaatagatgctaaattaatgggaggaatatcttggaagaaatataaggatattgatgaagcattaagccaagctagaaaaatattaggaataaattattatctagagcctgctgcaaaagaatatattcaaaaatgcaaaaaagctaaaggaaagaagacttcagaaatacccattaagatgactataaaagaagaagggttttttaaaaaacccacatacaaggaatgcttaacaaaaggagtggatccattagatggggaatatattgattggaagataatagaaaaatttgaagaagcctccccacaattaaagaaggaattgaaggaagaaatacttaaagaattaaaacaagaaatggatcagaaattcgagcaaataaaaaaggcagtagatgagaaattagaagtttctttttctgatttggacacaatggatcttggtggccatgggcaaccagatgaataaattaatataagctaaatatgtttttcaatatatattgataatagaatatcaacaatttgggcgtggaagaagaataaaagaaattcagaagattacccaagaaagaatccagaagaattcagaagattacccaagaaagaatccagaaggacaccctataaagtataaggggacaatatagggtgcggtgaatgacatatccctgtgaagaataaaactttcggtggaaaggcctcgactttagccagctcccgtgaagatatagtagcgaagagataagcaggaggcacaggcgacgccatccctggcctctataaaaggagacgttggcattcactccgaagacacacaaccacgaagacaccattcagagcaaagcttccaagcgcgctctcaccctctattccacctttcttagtagtagttcctctagcctaccttgcataatatatattgaagcagtgagttgtaatataaaggtttgtaaggtgagaaaaacttgtttgtatctaccttcggggttcccgaaagggaaaaccgtatgtaagcctatttgcttaatatgaagtaattttctttaagtttccccgtttgtttgctctagataagcgtttatgctagggaccctataggagaaacctctcggttgttctcgtttttagcctgcatcttgcatatgcgtctggagaaccagtatccgtagagaagtgttcccctcgggtggaactgcctggggagacggtaaacgcttagctagttcaaatatgactagggatacctgaagttggttgcttaaataggcagataagtgaggcatacggctagtaccgagtaggactttaaaatttctaaatcaagcgccggctgtttttggattcgccaccctgcaaagatcctaaaaatttaaagaaaattttcgagtgaacagtaacctgtgaacagtatttctgtactcataatagtgaattcagcactaagaatagtagtgaatagtaatgaattcagcacatatatatttctgaataataaagttaataataatgtgctatatatatatatatgtgtgtgtgtgtatatatatgtatatatatatatgtgtatatatatgtatatatatatatatatgtatatatatatatatagacacacacatgtgcatgcataggcagccaatcggcaaaatggatcgtgggggccgggccgggattagctgatgccggcttctacctgtattaattctgccaggtgaagtgacacactcatacgtgctgtttcttccttgtcgggccccatatgattaatttggatgacttcacatatacgggaatttaactatttgccacaattatccaaatacccttcagctctttttttccctcttagatagtggcttcttaactatttaccacttttacccacgtgacataccaacgtggtaactcaggtgaaaaaacgatgtagggcccacttgtcattttctcctctcactgacctctctcccccccaactgtccagccggcgatgccggcgaagaggactagggcggcgccggagtggaggtcgacaaccgctacggccctctctccaacacgtgcccaatcgaccttcatggcgccgttcaagttctgcagcgatggccgaccgttgatgcgggacaacggatctatcggagtgctcgccgatagtgacccacgtgagcttcggtcagctctccgccgccttctcctctggcctgacgcccccagtcgctccgtctctatatatatatctatccacgtcggcatcgggaccctcggctcccccgcacgcgcgccctttttcctcaccgtcagtggcagatgccgctgtggagaagagcgttgggactcctgctgtgtgacacgagggcaacgagcacgcggtgttccacttcggccgacgaggacccacttcgcgcgccgaggagagtgccgccgcggtcgtcgaactccacttcggccacccccaacgccggcgtctgatagctggaggagagagatgagtgaaggggagagaattacaagtgggaccacaccgttttttcatatgtgttgccacattggcatgccacgtgagcaaaagtgacaaatagttaagaagccaccatctaagaggggcagaaaaataggagcaaatataagaagggtatttggatatgccaaacctaaagtggcaaatagttaaattccccacatatactgcctccatcctaaaataagtgtagccgtgggtattcatgtccaacgtttgaccgtctgtcttatttgaaaaatttatgaattttttttaaaaaaattatcacacataaagtactatttatattttatcatctaataacaatgaaaatactattaataaagaattctgggatgagttgtcacacgtaaagtctttacatctaacaaccaatgtctcatataagggccgacaaatattttccgtccccctcatcactccatccgctgctgagaattataatctggttcactcgataggagacatttggatcttaagcgaatttcgccttgtctggcaaggtttagtgtttggtaccagaatgatccaaacgcaccctatttgcgtgatttctgctttctcacgtactccctccattttttttctttttaaaaaaggagaacttttagaacgtgtttagactcgttttcaaaaattaaaaggtatacttattatacacgtatttcctcgaaacgactgtctgatttaggggtgcaagaaggtttacccgcgaacccatttaatcacaaaaatagtacgtaacccgccggtttgactagcgggttaactatgaatttgacttataaatgggtttatagattgattcacttgtatatttagatgtggcaagacaggccgtgacacgaaaacccataaattattatttatttaaaactcgtggatcggcccgcttgcacctctagtctgattgccctccacaccgttagcccctgtctactgtgccttcaattcacacggcacgacaactaattcgatcgttactctctttcctgtcgctacttttggaagtgagctcactgctcacacctctatagaggtttgtcttcagcacactagaaaaagaaaaaaaaaacaaggtaatgccttggtgagggtggttgctgacttgcctgtcagctgctatgctttagccaaatcgagaaaacggagttaaacacgacaaatgcgtgatcgagaatacgaccatgcgttatacaggggacatacataggcagtgacgcaactgcacggtattaagtcatgttcggcacaactcgtagatgtcagatgcacgttagatttgcagtttatatgttaaaattatgttggtttaaaatttcaaattttatctaatatagaaacaaaataatttatctaaatgttatgaacgtaatagttgtcatccctaccccaatctaacttgtgcattcaagtcctccacgattttaggccagcacggttctcatccaacagctgataaaaccatcaccgcacgaaacatatgggtgcatttgatagggcttcaaattctatgattctgattctaattcaccctaaatcgtataaaaaagagaatcagaatcaattcagttagctgcttggcaacaaatgttagcactatattactcttgtgataacaaggccagagattaacataaatatcatcggatcttcgttccataatataagtgattttgattagatgagaaaatctcttatattttgggacggagaaaaaagttaatgtaatgctaatatttattagaactacttaaaataaaatcttggtaactttggtggagcctatgggtctgtttgggggagcttctagctgttgcagctttttctaaaatcagattttggcttaaattatgagaaaatatagttgtagaatccagaaaatgaaatataagctagaagtggaaaaatccaaacagtccctatgtctttggtttgcgcgattctcatgtggagcgaggtttctgcttgtgccgatccttgaggagctagcgcgttgcgtttttattcgtttggctgggaattccaccgatttttcgataatcatacctcggtagttcggaaaaatttttgggtttgattgtcacatagatatacggacacatatttaaaatattaaacatagtctaataataaaataaatcataaattccatcagaaaactgcgagacgaatttattaaacctaattaatccgtcattagcaaatgtttagtgtagcatcacattgtcaaataatggtgcaattaggcttaaagattcgtctcgcagtttacccgtaatctgtgtaattatttttttacctacatttaatgttttatgcatgtgtcaaatattcgatgtgaaaacgtaatttattttttgttctggtattaaacagggcctcagattctagcagctcgtaaagccagagaggtctccttggccctcccaactcccaagttccccactccgccgcagcttctgtgccggccggacccccgttgtgccccgatttccgcggccgtcccgcccccgagcggcgctgccatctcgcattgccgccgccgccgccggtatggccacgggtgctgaggccgccgcggcgttatctcctccgggcgccgccggtgccgccgtcatgggagtcttcaagtacaacttcggtgcgtgcactctctccctctcccttctccgatccaagtctgaggttgatttcggggggtgggggatctaagtgcggcctcgttgttgcagcggcgcagttcctatccagggtcacccccttcctctacaacagctggttcgtgcgccagctcagcgccgacgactgcgcggtgcgggatcccctcccctcttcttgctcgctcgctcgctcgcttgattttatttctgtgcccagatgaagaactgaattgtgcgtttactcaccgtagtaaagcaaatgtggcgattttgttggaacccaagttgttgatttttgtagcaagctattgcatgattttattgtagggggttttaatagtgtgatttgggtttattttgaagttttacttggttgaactaaaagagaactgctctgggaatctagtccaccagcaaccgactgtgagaatccagtagatatgaacaaatcaacgttttgataatgctgtgtttcttatgtgcttcactttgttcaaatatctaatagaagcttaaactcctttatatgtcatctatctggcaggcatacgcgttacagcttcctctcttcatcaactgcgtcctatttttaagccgggaggggtttcggcgtgcatgcttgcgtaatgattctgacaggtattacaataactttatatggactttctgaagcaatttaggagctataagccatatttataatttctgaagaaataactaagcagtaagtctttttgtttagactagtcatagcatggatttatttattttaagcgagaaaatcaatctttaaaatgaccaacgtgctatagaactatagatactggaaagtgataaaaccccggtcacaatttcttgacctaacgcaccatatactctggctatagcttgttagttttaaaaagaaccatgtgaaaaatttgtgctctagtttcacttgtgcatacagaatagtaaattcaaagagaaatgaaccctttataatttggtagagtaattcaagaaagagaagaaataaagaaaagaaagaaatgtacctttattaggcacagttgatttctcataaagagttaattgtaggaagaaaggtaaaaggaagaacgattgcaattgatgccacaattgccttataaaccaaggtagacaaatttgaatttattagatgaacaactatgtgtttcatggacacacgatccatgatttgataaagcccaacacttatggggaatggtcatatgatttccatactctcataacagcacttctttattgttactgtgtgct

SEQ ID NO: 11728 - DNA, 601 bp, Oryza sativa
agggtacaatagaacaccacacacccaaaggaagtaaaacaaactagtgcattagcagcacagccctagtaaagagatcacgaagcctagcagctcctggctaggcaccaaagagcaccctcattagcgatggcttggaggacatcaaccaagcatggggtggcaccattaaaaacacaattgttcctgtgcttccaaatttcccaagcaaccaagatgattaacgtaggattctgataggattgcaggattgagaaaacgtaggaataggaaaaacgtaggattctgataggaatgtaagtgtaaaacagaggattgcaaaacttaggaaaaacacaggaatgaccgtttgattgaaccacaggaaaaacgcaggaattggatgagagagatagactcaaagaaagttaccaagaggttgaagctcttgctaaatttcctccaaaatctctataggattgtccattccataggaattttaaaggattggatatgattcaatcctttgtttcaaagggcttcataggagattttcctataggattgaaatcctccaaaattcctatgtttttcctccaattcaaaggggccctaaagagtt

SEQ ID NO: 11729 - DNA, 539 bp, Oryza sativa
ctcttagcaaggcagagaaggaaagtatgtttgaatgcttggagagcataaaggtaccgtctggatactccacgaatatcaagcgaataataagcacgaaggagaagaagttcacaaacctaaagtctcatgactgtcacgtgttgatgacacaactgctaccagttgtaataaggggtatccttccaaacaatgtccgggcaacaataacaaagatatgtgcattcatgaacgcaatttcacagaaggtcatcgatccggatagattagaaacccttcagaatgaagtggtgcaatgtctcgtcagttttgagttgatatttccaccttcctttttcaatataatgatgcatctgctttgtcaccttgtgaaagagatccgtattctcgggcctatgtacctacacaacatgtttcattttgagaggtacatgggcgttcttgaagaagaaatttcgtaaccgtgctcgtccagaggcaagcatcgccaagggttatggaacagaggaggtcatcaaattttgcatagaatttatcga

SEQ ID NO: 11730 - DNA, 809 bp, Oryza sativa
ttggcatggctggggatgcaggagtgcacgctgggaaaggagatgatggtgaggaactactgccaacatcaaatgccccttgtccttccagggcagtagccaacagatagtcagatacagatcgagtgttggcgatagatggagcaagtctggttggggattacggttggaggagttggtgggctttgaacagaggcggaacggcgtgctccacaccgaggccagcttcgaacgccagcgaccaagggctgcagatcgagctcggcgatggaaggccctggattgacgccgactgcatgcggccatctcggatggggctctggcggaagggggaaccaccacgtcgcctgcaggggcacgatgcggtggcgtgcggcggggagtcgcgaggaggcgcaccagcgaatgaggtggtccggcagtggaccgcggcgggaattcgtacggctgagaggagggaggatgcgcacggagcgaggagggggcggctggtccggcggtggactgcgtcggccgcggggaatcaggcggggcaggtgaggcggcggggattcctcgtgctgctgagagagggaggatgcacacagagcgaggaggagggtggctggtccaacggcggcaacggggaatcgagcggagcgagtgatcgaggcggcggggattcgtgcggctgagatgagaagaggagggaggatgtgaagaggagcgatggggcggggattggagcggcggagtcgcgcgctcgggggcggagtaatcggtgggattagcacaacgatcatgatgacatgagacgacggatcagatta

SEQ ID NO: 11731 - DNA, 1254 bp, Oryza sativa
gagcacggtaacgaacattcttctccaaaacgcccatgtacttctagaaaaaaaacatgttgtgtagtaacacaggccgagaataccgatctctttgacagggtgccaaagcagatgcatcattatattgaaaaatgaaggtggaaatattaactcaaagctgacaagacattgcaccacatcattttgaagggcttccaatctatccggatcgatgaccttctgcgaaattgcgttcatgaaagcacattgctttgttattgttgcccggacattgtctggaaggataccccgaattataactggtagcagttgtgtcatccacacgtgacagtcatgagactttaggtttgtgaacttcttctccttcgtgcttattattcgctttatattcgtggaggacgtccaagaattcccaatagggtaactcccaaaatatatagttcttcgctatcaataggctggctgccaggcccctttccaaacactactttaagatctttcaccatagcaaacactgttttcccactgcgatgtttaggcttcgtacggtggtctgccttatgttcaaagtgattgcctttcttccgtacagggtggtttgcagcaaggaatcgacgatgacccatgtacgcaaccttcctacagtgcttaagatacgtactttctgtttcatccatacagtgagtgcaagtcttgtaccccttattagactgcccggatacgttgctaagtataggccaatcgttgatggttacgaacagcagcgctcgtaggttaaactcctcctgtttgtcctcgtcccacacggggacaccttctttcttccacaacagtttcagatcttcgaccagtggtcttaggtacacatcgatgtcgttaccaggttgcttggggccttgaataataatcagcatcattatgtacttcctcttcatgtatagctagggggaggttctagatacacatcgtaacgggccaagtgctatggccgctgctcatctctccaaaaggattaatgccatccgtacttaaaccaaaccgtatgttacgtgcgtccttaccaaagtctttaaatgttctgtcgatgtttcgccactgcgaaccatcagcggggtgtgacacagtatcccgtcctgttgatgttcctcagcgtgccaatgcatcattctagcacttccccttgctcctgaaataacgccttagccgtagtattatagggaaataccacatcaccttaggaggaattctctt

SEQ ID NO: 11732 - DNA, 5416 bp, Oryza sativa
tgatcaattgtgcaacaagagaggttatccttactgatgaacaaggaatgaatacaaggataatagttaaatccaatctatctatggaacaacatatgacagacatttgtatgcttaaaccaaaagaagaagtcccagtggtgcaagaatatttcgatgtatttcctgaagaactaagttcattacctccagatcggggaatagaatttattatagaattacttcctggaatggcacctatatcaaaaagaccctataggatgccaattaatgaattggaagaattgaagaaacagatagctaagctgcaagaaaaaggctttattcgaccaagttcttcagcttggggagctcttgtattattcgtaaagaagaaagatggaagtttaagaatgtgtgtagactaccgggctttaaatgaagtagctattaaaaacaaatatcccttaccaagaatcgatgatctatttgatcaattaaaaggagcaagtgtattttctaaaatagatcttcgatcagcatatcatcagttgaaaattaggcaagaagcatttggattaaccaatgcccctgcctatttcatgaatcttatgaacaagatatttatggaatatctggatcaatttgtggttgtatttattgatgacattctgatatattccaaaaataaggaagaacataaacaacacctacgaatggtattggagaaattaaggcaacatcagttatatgccaaattcaataaatgtgaattttggctagacaaagttgcatttctaagacattataactaaggaaggagttgccgtagatccggagaagattaaagcggtaatggtatggagaacaccaacctcagtacctgaaataaggagtttcttaggacttgctggatattatcggagatttattaaagatttctccgctattgcaaaacctatgaccagattacttaaaaaggacaggaaattcgaatggacaccagaatgtcagagtaattttcaaagattgaaacataagcttactactacgccagtattaatcttgccagacatccaaaaagattttgagatctattgtgatgcctctcgacaaggattaggatgtgttcttatgcaagaaggtaaaatagtagcttatgcgtcaagacaactaagaccccatgaagataattacccaattcatgatttggagttagcagcagttgtacatgcgttgaagatttggcgacattacttaattgggaatcattgcaagatttataccgatcataagagtttgaaatatatttttactcagatggatcttaatcttcggcaaagaagatggttagaattaattaaggactacaatttggaaattctataccatccaggaaaagccaacgtagttgctgatgccttaagccgaaaagctaattacaatctacaacaagaaataatatcagaacaattgcaagcagaaatgcttaaactaaatctgggtattattaagtttgaagaattaaacactttggagttaaaacctaccttaatggatcaaataaaagaacatcagaaggacattctgaaatacaaacttttaaggaacgaaaggtacaaggaaaggctgcagatattaccgaagacctggaaggaatattttggtacggagatagaattgtcgtaccacaatcaggaaacttgaggaaggtaatactaaaggaagcacatgattcagcctactctttacacccaggtagtacaaaaatgtaccatgatttgaaagacttatactggtggccaaatatgaaacgacatattgcagaatatgttgcactatgtcatgtttgtcaacaagttaaagcagaacaccaaaagcctacaggattattacaacccttacaaatacctgaatggaaatgggatgaaataggaatggattttattactggattacctaaaacttctactggatatgactctatatgggtaatcattgatagacttacaaagactgctcgattcattcctgtgaaaacaacttatactggagcacaacttgctgaactctatatgacaaggatagtatgtttacacatagtgccaaaaagaattatttctgatcgtggtaccaatttacttcacatttttggcagaaattacattatgaattaggaagttatctggatttcagtacagcatttcatccgcaaatcggaggacagacggaaagactaaatcagacattagaagatatgttaacagcctgtggtctagattttgctgctagttgggacaaatgtctaccttatgcagatttttcatataacaataattatcaagccagtttaaaaatgtcaccacatgaagccttatatggaagaaaatgccgaacaccattgatatggacataaaccggagaaagatgtatattcggaacggaccttttaaaagaagctgaagaaaaagttcgactgattagagacagacttaaagtagctcaatctcgacaaaagagttatgcagattctagacggagagagttaacttttaatactggtgattatgtttatctaaaggtttcacctttacgagggataaaaagatttaaagtcaaaggaaaattagctcctcgttatattggaccatatcaaataattgctaaacatggagaagtagcctatcaattggctttaccagattatctatctgatgtacatcctacattccatgtttcacaattaaagaaatgtttacgtattccagaagaagaaatatcagtaagtactgttgaactgaatcaggatttaacttatccagaataccctatcagaattttagaagaagcacagagaacaactcgtactaaggcaataagaatgtttaaagttcaatggaatcatcatacagaggatgaggcaacttgggaacgggaagattatttacaattggtattcccgtatcttttcgaagactcctaagcaaatctcgggacgagatttctttaaggggggtaggtttgtaacatcctcaaattttaaactaaaatttgactgcatcatgctgacttttgattaatttagtgtgtttcaaaaatttatttggttcctaattggttcaagtattacttctttagaaccctactaatttacccaaattattccctttattccaaaccctagtgaatttgagcaaattctctcaaatttcaaactatagataatttccttagcttatcctaatattagtgaggacttgctatacttcaaaccctagtgaaacccttccaaattcatagattaaattcattattttctacggaaatattcaaaaattctgaaattgattgttcattgcacataaggtgttcggtagaatgcctagcccaactagagcagcccaatcccctccaatcttgtacaaagtctagaattgatcctaggggaccacaacccacttaaaaccgtggctttctttgcctcttcctccccttcacgcgcgtggcccgggcatccgacttagtcgcgcgccgtgtcgccgcgcgtcggcctcggagccgcttgcgcgtgcccgacctccttggcgcgccgtcgcccgtccgacgccatcaacccactgccactgcaccaatcgcaacgaggacaaagccaggacgacgaccgccgcacgaaatcgccgctcgacgccgtgcgctcctgtccaagccgccgccgagtgtgatttcgtttctatacggggtgaatcgcgccaattcttgccgcacggttggattgaagatagacggtggtatcccctctcacaattcaaaccattcacccccgagccggccgttttcaccctcgccgccattgcgcgtcgcgcctggattggcgccctcacgtcgccagccgattccaaccgcggtcaagtcaatccttcgccggtaagtatttgaacgtggcctcccgccactcaaatcgatcttacccgccctctcacagcctctgctgccctagctctatccaaatcccgagctcatccatggcgatgacggtgtccgagctcatccgctcctcctagccctataaataggaccccaatcccttccttgtccatcatccatcatcaacaatcaaagccctacaaccccgaagctctgcttcgccaatccaccccatcaaccaccatcgcccgtcggacgaacacttttgtgcgatcgactccacgcctctccatccatcctccgccctaaatatcccttagaacaccttatatcaaccatgttctagcatagtaagccctaaccgaagctctgcgtcgagttttacctcgccgcaccaagctgagcaccgccgcccccgcgttgctctgttcttcgccgccgcgaagtttttctggccgcaatccgtcgtttcaaccgatctcggtgagttcttccatttcaaccatctgcatactacctggattccattttagcaatccctttgcactgtcatgccaccccctgagctgccgatgtgagcacggccaccgccaatggaggcgctcgttggcaactatactcagtgccttgccaaaggtcggcaagctgccggaatccctctaggcacctcgtagatgctctagaacccctcccctaaccatgtctaactctcaacacctcgatcgccatctcggccaaaccgtgccaccgctcgccgtcaccggagatccctagcaccctcccctcgtcggctgcaaccactttccccctccatcgccgccgcaatcgccaaccctagcactgccggcctgatttggggaacggctggaggttgaagaagagaagagagagagagagactgacaggtgggacccacacacagtgccatttcacatttaatcgattttaactttagaagcccatatcttttaaaatatagatccaattccagtgaaacgtggaccaatattcttctaaaatcattcctatcttttgagcccctttttcctatttttgcattttattttattttctctatttttcttatttttggattttatttaaactccttttgaatttgaattttatatgtctaaccctaggtcttgaggattcttctgacacactagataatatcaataaagagggggaaatcactccccgtgattccctctccctttccccccacttttccctctctctctccctcggattcgtttggaaacactcccgcaaacttcgtcggcgcatcaatggcgggcggatcttccgcggccgattccccctcatccgttcgttctctcccccttccaacactatttaaacgctccccgtgcctgcctgcaccgtttccggcactcgccgctctctctccccgtcggaatcgagctcgcgcccgcgttatctctcttcgacgtcgcgccgagcttcggtccgccggcgtcgtcgcccggaccctctttcgtttcggcgt

SEQ ID NO: 11733 - DNA, 2440 bp, Oryza sativa
cttccaaagcatacggctttctagatgtatatgacgatctctagacagatggatcttatatgaatcgtatgatgaagtaccacatgagtggatatataggaaaggaatccaaatctgccgaatcgctcatgttatgatcttctacatcctaggtctccgcgttccgtcatctggcttatgttcttcatgtagcattcagatcgaatgactctatgaaattacgtcgatacttctacatattatgggtaacgtaggagacatccctattttcccccgggggtcttaattaccactgcttagctttcaattcgcctctgaccatcaaattaaatgtgaataacccgtcctcctctctttgaaacaaggggcgcttccggttctgtgcgtgcttcaaacaattttgtcttctccatattaccatatctctagagtcaataattttctatgaggaactactgaactcaatcacttgctgccgttactcaacagttttctgttgaggtctatcccgtagaggtagtcaaattggatcagtgatcgatttctaggtttcgtcgtaaacctaattggttacttccaattacgtaaatcaatagttcaaaccgcactcaaaggtagggcatttcccattgatataggaacttttgtaccagaaacaatagtatctccaattatagcccctctgggatgtaaaatatatcccttctcaccatccccatagtgtatgagacaaatgtacgcatttcgattagggtcgtattctatggttacgattctaccagatatgtctttttgattccgtcgaaaatcgattttacggtataggcgcttatgacctccccctctatgccttgcggtaatgattcctctggaattacgacctttaccacaacggtgccgtccatggatcaaattatttcgtggattggatttcacttgcctatctatggttcccttgcgtgtgctcgggataggtgttttgtataaatgtttcgccgtattattaagtattctcctttagtttttttctctatctagaagtggaatagaataacccggttgaagggtaatgatcatacgtctgtaatgcattgtatgtcctagaatagggcccattcttctaccctttccgggtagtcgatggctattcacagctactaccttaacaccaaagaagagttcgacccaatgctttatttctgtcttagtgaatcccgattcgacattaaaagtatattgattctttcccaataaacgaagacttttttctgtaaatactgcgtatttgattccatccataaatcgactttccctcctatgctctgagttccagtatcgataagaattcgagttcttattgttcttatgttatggtatgaatataccataccaattcgttatgtatggatgatggatgagattccatggatagagagccagttccaatagacttatggaacgttccggttcgcgtgcatccagcaggaattgaacccgcaaatttaccaattatgagttgggcgctttaaccattcagccatggatgcttaacagggatcatcgtacatcgtaaataaccaattttcatatagaaagacatatcatagaaaaatgaaatcgaaaatattcggagatggcaaatattcggagatgactatgaaaacacctctctggatcctcgaattgaaagagagattgagagggatccagaatcctaattctcgctatttggaatggatccaattctattgagtctgactcatagtgatcatttctctttagcaaagaatgaccttggttatcaaaggattgaacaaccgggatccgtttacttatgatccctagttgacattgataacaaggatctaatgaattatgagtttaatagatcctctttagcagaaagacgtatattccttgctcatcacttattcccaaacctcgtatggggctaatcgttttcatttaccatctcagggaaaatccttttcgttccgcttagccctatcgggtattttagtgataggttctataggaactggacgatcctatttggtcaaatacctaatgaaaaattcctattttcctttcattaaggtacgagggcttcttattccacaagaaaagaacgaaagcaccttttcattctttcatatactgggggtttttacttggaaaagacaatgttccatactaaaggattcgggtccataaccacgagttccagtgcactagatcttgtagcacttagcaacgaggccctatgaatagacatatagaatttttggtcgggaaattcgaatgaatcattgagtgaaaaaggagcaaagaatgacaaaagacgagactctactagtcttcactcttgtggtttcctcggtttctgttttcttattcgggatcttgcttttcatggttctcatctctgcaactcgcgatt

SEQ ID NO: 11734 - DNA, 570 bp, Oryza sativa
tccgcctgcacggctggcctttatgccgccgttgttgggcgtctacgtcttcaccgaccggcttgccttcgccgctgctgactggtgtttccgcctgcacggctggcctttatgccgccgttgttgggcgtctacgtcttcaccgaccggccgcctcgtccgccgccgactggtgcttccgcctgcacggctggcctattatgccgccgttgttgggcgtctacgtcttcaccgaccggcttgccttcgccgctgctgactggtgtttccgcctgcacggttggcctttatgccgccgttgttgggcgtctacgtcttcaccgaccggcttgccttcgccgctgtcgactggtgtttccgcctgcacggctggcctattatgccgccgttgttgggcgtctacgtcgtcaccgaccggcttgccttcgccgctgccgactggtgtttccgcctgcacggctggcctttatgccgccgttgttgggcgtctacgtcttcaccgaccggcttgccttcgccgctgctgactggtgtttccgcctgcacggctggcctttatgccgccgttgt

SEQ ID NO: 11735 - DNA, 621 bp, Oryza sativa
ataggccagccgtgtaggcggaggcaccactcggcggcgacggaggcaggtcggcggtgaagtcgtagacgcccaacagcagcggcataataggctagccgtgtaggcggaggcaccaatcggcggcgacgaaggcaggccggcggtgaagtcgtagacgcccaacagcggcggcataatatgccagccgtgtaggcggaggcaccaatcggcggcgacggaggcaggccggcggtgaagtcgtagacgcccaacagcggcggcataataggccagccgtgtaggcggaggcaccaatcggcggcgacggaggcaggccggcggtgaagtcgtagacgcccaacagcggcggcataataggccagccgtgtaggcggaggcaccaatcggcggcgacggaggcaggccggcggtgaagtcgttgttgttatcagcaatggcggtggcgaagacaagccggcagagtggactcgcggccgatcgaccggaaagctgagacgcctcgagtccatgaccagcatcaatcgcctcaatagtgccgcgtaattatatgcgaacaacaacaaaaaatagcaagagattaatctgggataaaaataaatacgataaataatgataaaa

SEQ ID NO: 11736 - DNA, 917 bp, Oryza sativa
atccaacgagcccccgggtgctaggaatcggcccaaaggcaaccatccattggcaaaccaaacggaaagcataggaagatagaactccataactcgataggtacttttgtactcagattatgtcgcaagcaatcaagataaatattataaaaaatatgatataacatctgtagcccccgactcactactcaatggaagaccaattggtgtagtgaggcagaggaaaaggaaaaatatcatataaagaataaaataaatgatgacttagctttgtaatattccccttggtgatggcagaagtggccaatgtgggaacaaagtcgtccatcaataacaatgaagacaccagtcggcggcgacgaaggcggtcgacggtgaaagcgaagacgcccaacagcggcggcataataggccagccgtgtaggcggaggcaccagtcggcggcgacggaggcaggccggcggtgaagatgacgatgcccatcaacggtggtgtgaccaaccgaccgtataggcggggacaccagtcggcggcgacggaggcaggccggtggtgaagtcgtggacgcccaacagcggcggcataataggccagccgtgtaggcggaggcaccagtcggcggcgacggaggcaggccggcggtgaagatgacgatgcccatcaacggtggtgtgaccaaccgaccgtataggcggggacaccagtcggcggcgacggaggcaggccggtggtgaagtcgtagacgcccaacagcggcggcataataggccagccgtgtaggcggaggcatggacgcccatgaacggtggtgtgaccaaccaaccgtataggcgaggacaccagtcggcggcgacggaggcaggccggcggtgaagtcgtagacgcccaacagcggcggcataataggccagccgtgt

SEQ ID NO: 11737 - DNA, 703 bp, Oryza sativa
tacgacttcaccgccggcttgcctccgtcgccgccgattggtgcctccgcctacacggctggcctattatgccgccgctgttgggcgtctacgacttcaccgccggcttgcctccgtcgccgccgagtggtgcctccgcctacacggctggcctattatgccaccgctgttgggcgtctacgacttcaccgccggcctgcctccgtcgccgccgactggtgtcctcgcctatacggttggttggtcacaccaccgttcatgggtgtctacgtcttcaccgaccggccgcctcgtccgccgccgactggtgtttccgcctgcacggctggcctattatgccgccgttgttgggcgtctacgtcttcaccgaccggccgcctcgtccgccgccgactggtgtttccgcctgcacggctggcctattatgccgccgttgttgggcgtctacgtcttcaccgaccggcttgccttcgccgcctccgactggtgtttccgcctgcacggctggcctattatgctgccgttggtgggcgtctacgtcttcaccgaccggccaccgcatccgccgctgactggtgtcaccgcctgcacggctggcctgttataacgccaactgatgctatcttcttcacggctgactacatcgctgtcactactaataggcatcagtatcttcaacacaagctgcctacgtttgccatgg

SEQ ID NO: 11738 - DNA, 1070 bp, Oryza sativa
ccgtataggcgaggacaccagtcggcggcgacggaggcaggccggcggtgaagtcgtagaggcccgtgaacggtggtgtgaccaaccaaccgtataggcgaggacaccagtcggcggcgacggaggcaggccggcggtgaagtcgtagacgcccaacagcggtggcataataggccagccgtgtaggcggaggcaccactcggcggcgacggaggcaagccggcggtgaagtcgtagacgcccaacaacggcggcataaaggccagccgtgccggcggaaacaccagtcggcggcggcgaaggtaagccggtcggtgaagacgtagacgcccaacaacggcggcataataggccagccgtgcaggcggaagcaccagtcggcggcggacgaggcggccggtcggtgaagacgtagacgcccaacaacggcggcataataggccagccgtgcaggcggaagcaccagtcggcggcggacgaggcggccggtcggtgaagacatagacgcccaacaacggcggcataaaggccagccgtgcaggcggaaacaccagtcggcggcggcgaaggcaagctggtcggtgaagacgtagacgcccaataacggcggcataaaggccagccgtgcaggcggaaacaccagtcggcagcggcgaaggcaagccggtcagtgaagacgtagacgcccaacaacggcggcataataggccagccgtgcaggcggaagcaccagtctgcggcggacgaggcggccggtcggtgaagacgtagacgcccaacaacggcggcataaaggccagccgtgcaggcggaaacaccagtcggcagcggcgaaggcaagccggtcggtgaagacgtagacgtccaacaacggcggcataataggccagctgtgcaggcggaagcaccagtcggtggcggacgaggtggccggtcggtgaagacgtagacgcccaacaacggcggcataaaggccagccgtgcaggcggaaacaccagtcagcagcggcgaaggcaagccggtcggtgaagacgtagacgcccaacaacggcggcataaaggccagccg

SEQ ID NO: 11739 - DNA, 665 bp, Oryza sativa
cgtgcaggcggaaacaccagtcgacagcggcgaaggcaagccggtcggtgaagacgtagacgcccaacaacggcggcataaaggccaaccgtgcaggcggaaacaccagtcagcagcggcgaaggcaagccggtcggtgaagacgtagacgcccaacaacggcggcataataggccagccgtgcaggcggaagcaccagtcggcggcggacgaggcggccggtcggtgaagacgtagacgcccaacaacggcggcataaaggccagccgtgcaggcggaaacaccagtcagcagcggcgaaggcaagccggtcggtgaagacgtagacgcccaacaacggcggcataaaggccagccgtgcaggcggaaacaccagtcggcagcggcgaaggcaagccggtcggtgacgacgtagacgcccaacaacggcggcataataggccagccgtgcaggcggaaacaccagtcggcggcggtcgaggcgagccggtggtgatgttctgactgatccattcctggagcgtaagagataagcttaaagccatgaatcccttttatgcatatctggatctggatcctgcagaacaaacatataggatgagtagtatctgatataaatataatactcgagaaaaaatcaagtattttaaaatatttataaatat

SEQ ID NO: 11740 - DNA, 6095 bp, Oryza sativa
gtcggtgactttccccacgaccctctcttttcttagctctcgtctcggaatgacgtagtaacatgttgttcatcatgtagtaacacaatgttttacttacagtaacaaaattaaaatttactcataatatacttatgatggatctacttttggtaagtactttttttttgaacatcatggtgcaaacggtttttaaaaatagtacatggtgtgagagatattacccttcaaagatttgtttttaagatttaactctccacaagtagtaatactaaattaaaagttttactactgcctgttttgcgttactgcaatcacatcatgtcattactacaagatgtagtaacgattataattttcatgtaatatagtgtcttactgcaattacttgataacgttactgcaagactataagttttgcagtaataaagcgtctaactacatattttgagtagtgttactgcataaacacgtggtaacgtgtaattgtcgtgcagtaacactgttacttttgtgcaaactttttgtgcagtaacaagtgtatgattagcatctgagacttttaacccatatatttttgtttcaattgctgaattactgcaattcaccacaatattacggtcaaaagtgcaataacgtcatatacatgcagtaacgctatattggagggaggaaaccaattttcttgagaagagggaggaatgtaacatacccgaattctaggattaaggaatttccatcaagactagctgaaagggaagttcttcaattttgtaaaccaaaaatttccattttaaacaaaggtgaagttgatccaactcttgcataaataaaatttgagaacaaattaaaactttttcatctttaacataggacttggatgcaacccaagtgaaagcatgcatactctcatagacatgtttgacttgagtccttcatatgcatttggatttggattgcatttggattttcgatttgcatttcataataggtttcatgaatattaactaagatctagataaacaactaaaccattagggcctagtgctagctagaggaagttaaaatagaaaccatacaccttaaaatatatcaacaaggccaatgtcaagccccacaaaactattttggtcatccatctgaagactagtcatgaacatggaagtgaccaaatagattatatcatatagggtatattctatcttaatcatcactataagcattctcttaatttaatactaaagtaaacttatgcataataggtaaggagcttatgacctgtgtaatgtaaattgtaattctaacatatcaacatcacctaggttaatgagagtccaaatataacttttataaacatttacatgcatttaggaaagggaagcatatataagacataagtcttgcgaattatctaaaataattcgtgcaagataaaatcatgggaaaattcatgtaggctctaatcaacacatgcaactcactgtaattttggtatgatttaataactaaatttggtacctcaaataaatcagtcaaactaataaaaactagattaactgtagttcttaatcggctaaaaccatactttgtctaaaagtgcattttactgcataaaagtgtataagtaaaataatttattcaaatactaggtcatttataatgaataaaaataatttttccagaatttatcttctctgtttaggtctcctaaaaattcgaactagtttccaaagaacccatattcctctaatttctgtgagtaatctatccataatttttgagtgcaaccaaagaaaatggaaactaggtacatacacctacctccagtaaaatcaacactagttaatctgatcaacacattaagtattgaagctacaaatttagaggacaaaataattccggaaattcgtccaaaaaccaagctcacccatgtttctgcctacacatctctcttccacctagtttacttcgacctgggcccccttgtcagtccctccggcttgctcttcctctgtgcaacttccctagccgaccgataaacactgagagggagagatcgagggccgaccggctctggacgccgcgcgacgcgtggccacgacgtgtcgacgccctaaaaacgccgagctccatctctgcctctcccagacgcgtcgccactcttcacccaccatcccagtgccgatccaaccgagggaggaagctccagctctccctctccacctctctttcgtcgccggccgccaagaagagggacatcgccaaccgtcgtcgagccctcttcatctctaactcatactcgttccattctcatatcaccatgccgaacaactttggttttgatcccattccatttcatcttctacagcagcgggaacgccgccatgtcatggtcgctctagggcgcgctctgtgcaccgccgcagcgacatcatcgcagttcccgcttatctggaccaagccgggccaagctgtcgcgccagcgtcttcgcctcgacctcctctccatttccccttaagaatcttgaaggatggtgctatgagtgtggagatcgtccaccgtcttcttcacctccggtcgccgtcgccattgtcgattccgcatcgtccggtgagccattgtccgattcttcgcgtatacaccatccctggggcctcactaacctcatggacacacatgcatgatagttcttggagctgattgagccatcgccgttcacccggaggttcttgccgccgtcatcagcctagctaccccagccatgtctagcatctcggtgagcacccttcagcctatagaacatacatgcacgcacccaattaaccaatacatgattgtagaagcacatgcatcaccacccgaaaacatcctcctttcgaactcgccgccggcgttactccgatgtccactgaccaagaaaagtacaggaatggaatcgcaatagcatgatcttcattttgtcttttggttgcaccctcaaacgagccatcgtttgtcgccggtgagctcgagatcgagctcagccatggctgttctgcctctctgcgtgagaaaagaagtcagggaccttgtttcgagaatttaaacaactatggaggttatcgaaaatgtttgcaaatcctgcatgtcgattgtacattaacaaattaaaattgtgttaaacttgttagacaaactcctattatttgcattatcaccttaaccccacatatatccatatccctcattcctaaccttaggaacaatatgactacaccactttatatatgaattttggagtcactaggttactataatgcttagccatgcttagaatggtcttccttgtcattatgggctcattacaaatatgaaaaattgatttagaaataatctggacagaactttaatacttgtgattttgataaataaaatgatggaaaacatggattttaggtttgggcctcaagtggtgcacatatggtgattagttgtgtaccgataggaggagagtgtgcccaaaccgacctaaggacttcactcaatgtcagttcatttcgtatacagtgcaaccaaatgtgctagtatgggatagcccaagcttagtaaattatttatggtttagccttacattctggtaggccggtgtgtatgagttcggataactcagaggaacttcctatttaccccgacatggtagtttaggtgactaagtctgtccaatacaacggtattgtgccacgtgggtgggttcccgttgtgtccgccaccacggcgttaagtttaaggcgtgggcccgccacttaacggttctaggtcatataacgtgtatggcttaggatggagtaacacgtatcgtgctggtgtaaggctaaatcatgaattttggaaaagctttgttgcgggtaataaatcgggtacttatgtatcgcgtgccatgctcttgcatgattattatttcgcatcatgtgggtaaagtgtacaaactctgcagagttaaaactaatcgattagctgtgctcgcggtcatgagcggcgtgtggatatatattgagtatagacttgtgttaattcttctaaatgctgaaatttaccttcaaattgtgatgagatttgagaatgatctccttgctgccatggaaggcaatgaggtgcatatttatacatgattaatgcctaccttgatgcccaatatgtcaagtactagcttgctgaaatttatttgaaagtaaacctgatttagaaatgttttatgcaaataaaacttgctttatgctaaaaagaaccatattatgccttccttgattatatgccttgcaagtagggtgttaggcttgtcttggtgcttgccagtacattatttctaataatgtactgactcttgctattgaattaaccttttgcttgcaggttttagatttagtctttgagtgatgcgggtaatcgactgcttcttctaggacttgaacttaatggggtaaacccctagtcggtgtgcttgtggattgggtagacaagcttccgctgttctatatatttatttggccggtcggccaatgtaactaaagtagatgtagtttataatcgctttcatcttatttgtgtttgctatgtataatcatgcttgagatgaaagtgtgaatctagtgcacatcctgggaactagattcacatgagtatgagttgagaatatttgagatgttgtagatctttagctatttttgtcaagtctcctgaatgtgtaacacatctggtcgccgcctacgagtggtttgacgggcacatctcaggctgaagttgactggcaagctaaaggcctagcaatgtctccaatattcttctctcgaggcgtcggatgtttcattatgtttgtttgatgacttgaattattcacttcatccctcaaatataatgaaagttccggaaagcctacgacaaggaaaaacggttcttgaggaggggagtacgtagatgcattttgaagtttaatcctgcacatgcagtaacacgataacatcatggtggaaacggttttaaaaaataatacatatcttatgactattgcttttcaaagattgacattttgaactttagccctccacatgcagtaatagaatgtgtaatttacagtaacaggggtttatacatgcagtaacatggttttaccaaatgtataaaattattcaaaacactcctacatcaatcagaccttgctcaaagccacctacaaacttacctatggcccacctattcgaacttcatctcgtaaaaatgacatagtaacactgcatttatcatacagtaacatatctacttggaagtggtaacatgcacctattatgtagtaacgcttctacttttgtgtagtaacaagtatacggttagcatgtgaggctttaacccatatatttttgtttcaattcctagtttaggtagtaatactattcaagaaaatgcaagacactttgttactgcaaagcttattgtgtttactagactcttatggtaacgttgtgatagaactgtagtaacgtacagtagtaacaagtaatgctattgtattactacttgtgaagagtcaaatcccaaaaagaaaagcttttaagaacaatatctctgatgtcatgtatggttttttaaaattgtttgcaccatgatgctagaaaaaaaaatgcttatcaaaagtagatccatcatgactatattttaactatatttgagcgttgttactgcatgtaaaacacagtgttactacacggtgaccgtcgcgttactgcacagtttcgcgaaacgagagctaagaagagatgggtggtgaggagagttagtaggtgggtttgactgagctttgaccggcgggagggagctttgaccggcgtttgaccgatgtgggaggtggtttttgggccttggaaaggagggggaggtgggtgtggcccttgagagcgaggggggtatagaatagttgttctataccccagatgtacaatagtcttaccctatatatattacatatatattacgcaaatatatatatggaatacatatatatatatatatatgcatatgtataaatacatatacatgcatgtatagtacaattcatttgctcact

SEQ ID NO: 11741 - DNA, 6319 bp, Oryza sativa
tccaccgctgcctcgacctctccactgccgacctctctgccgctcaccctctctgccgaccttcccgacgccggcctgcaccaccgccgccgcactcactctctcgaccgccgccatccatctccaccgccatctccaccgtcgccgtctcgacctctccgccgccatctccgccgccctctctgccgccatctccaccctctacaccgccctctccatctccgcctcgacctctccaccgccctcctcgccaccgccctctccactgctgccgcctcactcactctctcgaccgccgccgggacctcctcttagtcgccacgccaggaccatcatcgccgccaccgggatctcctctccgccacctcctcctctcgactgggacctccacagtgcgccggccgggactcgtcgtcgccgtgcgccgcctcctctgctcgtcgtctcctctccaggtacccctctctctctgatgccgatgaatggaatggtggagttaatggatgaatgaatgatgcaatggaatggatgagattttgttcaatggaatgaattgaaaatgcatatgtataattgtgctcttttcttgtcattccatacagattgtgcactgtatactgctttatatgttgttttgttcccttttgctagaactattgaattttggggataatgtttaccattttttttagctgaaaatgatggattaatagattggcaacagtgtggttagataggtagggtagctagctagaaatagtttgtctagctagctagttaggggtaatgttcccttttcctataaataaagcatatacagggtttgaattttagttcaaatggatgaattgatagattggctgtagatttaatgtagttctgaggttatcaaaccatcacagaatacaaaatgcatggggaatttttggtggattggtcagtgtagtccatggacggaaccgacctagacaccaaaattctccatgcattttgttttctgtcattctttgataattaaggaactttattaggtttagggtttgaaatttagttcaaatgaaagaattgatagattggccgcagattacctacacttgttgatttatatacccttgttgtctatgaataggtgaattgcatgaattgttgtttatatacatgatttatatacccttgctgtctatgaataggtgaattgcatgaattgttgtttatatacatgatttatatacccttgctgctgctgccacataaattattgtgggctgttttattatctacacttgcctctgcttgataaattaatggtgggctgtgatgaatgctcaagaacagaaatacctctaaacttgatctttttttaatgcataagaacagattatctacacttgttctttttttctgcataagaacagattatctacacttgttgatttatatacccttgttgtctatgaataggtcaattgtatgaattgttgtttatatacatgatttatatacccttgctgctgctgccacaatgattgtgggctgtttattatctagacttgcttgaattgaatggatgaattgctgtttacatgaagttagtagtactgtctccttttttatctacacccctgctactgctgttattgtgggctacttgttaatacacctgttccttgttttatgttgttgctgcccctgtggagtatctttgcccctgcttctgctgcccaatgtgttccttgttaaatggccagtgatgaattgctcaataagaacagattatctacacttgttcatttttttgccccaccacttgttcacttgttccttattaaatggccagtgtagagtggttatatacctctacacttgttctttttttatgcataagaacagattttgtgcacttgctctctttttatgcataagaacagattttctgcacttgttcatttttttatctacaataatatatgcatgatttatataccactgctgttgttgcccctgtacttcttgttaaatggccaaggatgaattgcttaataacattctatctatacctgttcttttctttatggataagaacagattatctacacttgttgatttatatacccttgctgtctatgtgaatttccctctgctgttgctgtttatgtgaatttccaccctgctgttgctgtttatgtgaatcgccccctgctgttgctgcccctgtggcatatatacccctactgctgttatatggccctgctactgctcttattgctgctattatatggccatgctgttgctactgctctaatttcctggacttgctcttttctttatggataagaacagatgaactacacttgttctattttatggataagaacagatgaactacacttgttctattttctttgggttgctttttcctcctagtagctgatttcctctttttatcccttcatgcaaatgattgtaatttatgcatatttctcagcaaaactgaggccatatctttcatagtataccccgtattacattggatctaatgctatttagtctaatggtaggaaatttataatctttttcgcgaaagttaaaccatgtcaacgcccggcgcaaacccgccctccccaacacctgcgaggatccaggaagaagcaaacccagccacagaggcagttgccgaaggtcatcccgcgacaacggcggtccaacaacccgaaattcatggtaatctataggataaattttcaccacatgaccacataaattttagctagcaccccttagcaaatattgccttctgtttgtgctgcagaattgccgcaggaacaacatacgtcgatgtcgggcgggacaagtgcaagtaggtctagtagaaatccgcggtcacaaaatatatggccgaccacagtgcaagttataagagaggttgacgctagtggtaggcccacggcgcccaggactgtcattggaagatggtctaactgctgcgggctagcggcacgtgagaacttcgggatcctccataaagatatcgggaaggtcacagaagccgagaaagagcgagcttggacggcaatggagaaatggttcacatttccagccgaagcaaaggataggctcaagcggaaggcattccaaaagatgggcaaagcttggaagaattggaagtcgaagctcttcaccgagtttgtcaacccgcccggcaatcatacgccgttcgatgaataccctcaaataaccgaagcggtgtgggaggaattctgctctctcaagaccacccaagagtttagggaatcaagcgaggcacatcgcctactgcaacagcggaatgagcacccgcatcggctgggcaccgcagggtacatcggcaaggaggcaatatgggcacaagaagatgcagccgctgcagcagcgaatgtccctgccccgttttcagccatccctgaacaaagagctcgcaactgggcgcgggcaaggggtaaggtcaacccggacggctctgtcacatttgagaacaaaagtgatgccgtcgtctatcaggaactggtgagttcactacttaacctaactaatttccgttcgtataaagtacaagttcgtataaacgactatcttcttttctagttgggcttggttgctgaacaagcttcacaaagcgaggttgagtccgcgccgaagaggcgcgaagatgacatcctcacaaaggcgctcggaaccaaaaaacatcctggccgaactcggggaattggtagcgatgtgccctggaagcatggactccctcagtatagatcccaatacaggaaacgaaaagtctccaaggaagagagggacgctcgtttgaaggccgaacttaaggttgaggtcattcaagaactagaagctagcatgaatgcaagggtggaagaaagggttaacaaggtcctcgccgacatgaatataccccgagtcacaacacctgctgtgcaaccaactcctcgtgtacaacacgacgcgagtccatcacagcataggagtagttgtgcatccacagaggtgccggcccctggtctcccgatcgcaccactagctgcagtggaccacatcgaggtaattgttgttatccgatccatatctaataaaagacatgtacacattccaatattaaattcaaactttcaccttatgcagggtgcagcacagtgtgtcctactagcgagagtccacccaactttcgctcctgaagtcgctgagggcatggctttcaagccctcggttacagacaaggtccacggcgcagacctgctagctgggtatgccaaggtgtccatcgatacagtaaaggacacctggtcaggctatccgctgcccgtgcccccaaatgatgaaatcatgactttgggcgatgcgcgcaagacgttcatacaatggcccaaagaagacatagttgtgaagatgactcctcgtccaagtcgaccgacggagcttacacctcccaagtctaagctatcaattgaggctccccgtggaccggcattgtcagtacctcattctcccggtggagctgatatggacttggcagatatagctcaaagcttggctccaataaagaccacaagaaaggccgatagctccccaccacttgtcaagggccagaagcgtgaacgcggcaaggggaaggtcggggagttggcgccggagccaaaaaggggcaaggctgcgacgtcggtgccggtgagcaaatcggggaaggtcgtgagggcgccagcccaatttgagctaggcatgccattggtggaggacaatgtgttagctgtgatgggtattgcttgccgagagctacataagcaatacatggagctaagcaatgccaagcggaaaatgagggagtcatccatagttggacatcacgaccaccagccgttcctatcgtcgcctgcctatataactataggttttgatgacctcttcgaccttttcaggatccggaagttggacactggtcttctaaaatgctactccttgtaagtgcataccttctatacttgtgatatgactggactatatctcctaattaaattagttctaatacgtaaatattttaaggttgtgttggatcgagagtcgtcgccatggtaatcaggttgggttccttgatccatccatggtgaatgaggttaatttacgacagagcttcactgaggtggttgactatgtcaaccggtgtttatgggcccatcaagacaaggagtacatcatgtgcgcacacaaccaagagtaagaggacaatacccttcgtgtatattgtttttgaagttaaggttcttagtactaacgctacataaccactgcgcaggcgacattggattctcctagtcatcgtacctaagtggagtagggttacctaccttaactccaataagtccaaagattatgatttcagtgaaatcaccaaggccttaaatatggcttggggcccatatgtggaaaagggtggtaggcacaaggagggcaagaacgaactttatcatgacaccaagtttgcatgcgcaaaacagatcggagaccaatgtggtttccacgtgtgccacaacatgtcaacacttctaagagaggtgaaagatttcgaccctgaggttgttgctaatggcgaataagctcatttcaatatctacattgctattcaaaacgtgctaattaacctcttatttattaaacagaaaggtagagctggcttcaagatctcacccatcaacccccccccccccccccgctatcagaggcgaagtgtgcgcctttattcttgcagaaataatgaacaagaaaggacgttttcatgccaaatagactcatgaacttggctagataatttattgtgatgtaaaaaagatgtttttataatttctggcgatgtaaaaaattatgtttttatagagtgcaatgtaatttactttcatatgtgcaatatttatggtactttactaaattgtcatcacatttgatcaactacgatttatgttgtactattcatctgttttctccttttttttcccttattgacaggttgtggaggtcgagtacattatggctttaatccatttggtaagtatatatgcggttctatgagcaacgaccgaaattgtggctttcaaggggtgtgaatttgctgtgcaaaattgtggcatttgaactgcatatatgtgttgttggggatctgtgatgtttgagatggatctgtgatgttatattgggggggtgatgtatctgtgactagaatatatctgtaatgtatctgtgtttcagagggcatggctagccaatcctgaggctagccaatatttagcat

SEQ ID NO: 11742 - DNA, 657 bp, Oryza sativa
cgtatgcgagtatgcccacttcctatcaacccaaatctacaccacacgagagctcggtatacgtatatataaaccattcaaaatttcattgcgtatcgatttgctgtttattaatttcatatattcatatgtcattatttttcgaatgatagtgtattcacatgagggacaatctcccacacaaggattatatcacggctgttcaagaacaactgatgagattcatcaacgaagaagtccttaatcccgagggtgaattctactacaacggatcgacaattcataacgtcggtccttcttcttttgacataatgccggcgtcaaagtcgtagctagctagtgagcaaatgaattgtactatacatgcatgtatatgtttatagatgtacacatttactttagtgtaaatatatattttggtaatatatatgcacataaaatgttaagtgctttaaattatacatgtgtaatatatgtatttatacatatgcatatgcatatatatatatatatatatatatatatatatatatatatatatatatatatatatatatatatatatatatatatatatatatatgtattccatatatatatatgtgcgtaatatatatagcgtaagactattgtacatatagaataactattctatac

SEQ ID NO: 11743 - DNA, 800 bp, Oryza sativa
aacttgtctagtgaaacacttcagtggttgtcacagggtcctgaatggagtgccaccacctggcaaggatatgacataaatggatacacctttcacacagtaaagcaagacagcaaatgcacagtgcagaacagtgggttacgcatcgaggctgctagtgacggtggtcgtcgtgatcaatactatggtaaagttgagcaaatattggagctagattacttgaagttcaaagtcccgttgtttcattgtcgatgggtcgatctttgcaatgtaaaagttgacaatgaaggtttcaccactgtcaacttggctaacaacgcgtacaaggatgaaccgttcgttctcgccaaacaagttgttcaagtgttctacatagttgacccatgtaacaagaaactacatgttgttcgtgaagggaaaaggagaattgttggattggacaacattgcagacgaggatgattacaaccagcacgtccacggcataggtcaagaaatacctctagaagaggaggaagaagaagatgaagttcaatatgcacgtgtcgaccatgaggaaggattatttttgtaatttatgtacgtagtttatgtctacatgtctgttatctgtatgactctaatatgtacgcaatgatcaatagtatattgcttatgaaatagtcaaataaaataattaagtataaaaaaatatgtagtgtatgtgaaaatatgttaaggaaaataaaagaactaagtgaaataaaataaaataaaattgctctaggcaaactcacctgtgacgggctctatctgtagggc

SEQ ID NO: 11744 - DNA, 1095 bp, Oryza sativa
gatactcccctcggggtgtgaacggttccgtacataacccttaaggatccccaggtacctttcgcaaggatacatctgcgtcatgaatgctggaccacagcactttgtttgcctcacaaggtgcaccggaagatgttccattatgtcaaagaaagttggaggaaagtacatctcaagatgacatagggttctcacaagttctgcctgtagttcatctagtccctcgggatcaatgatcttctgcccgattgcatggaagaaggaacacaaccgctggatcgtgtgtcgcaccttaggaggcaaaatattccttattgcaacgggcaacagctgtgtgataagaacgtggcaatcatgcgacttcattccaaccaacttaagatcttgcagtgaaacgagcctactgattcttgatgagtaaccagatggaacctttataccactcaaacatgttagcaaatcaatcttctcttctttcgagagagtgtagcaggctggaggaaggtaaaccctgccggattccgtggttatgggatgtagctccgaccgaacacccatatcttccagatctcgtcgggtgttgagaccatcctttgtagtacctgggttaagcagtattcccattaaactctcgcatacattcttctcgacatgcatcaaatctatgcagtggcgaacttcaagatccttccagtatggtagtctccaaaatattgacttttttttccacatgctcctctcttttgtcttttgtttttccacatgctcctctgttttttccttcgatgtgctcttctcttttcgctttccaactttcctcttttttccaaactcgttggttattcccatcactaagttgtgcacctctgtccctgttagctctgtcgggggtccggctgtatctctgtgtccattgaaattctttctcatattcctatacgggtgacaccttgggagaaatctcctgtgacccatgtagaccgtcttgtgtgaagcttcaaccattttcttcttgtttcctccatacactccgaacacgcccatttccctttcacagtttggccagaaaggttgccaagggacggataatcgttg

SEQ ID NO: 11745 - DNA, 7874 bp, Oryza sativa
atgtagctcctccacttgtgctctgttcttccatttcagataacaaagtttcaggaaacgcttggattggagtgcgcaccaaataaacgaggatgattgtgcattatttgatcctacacatggcgcatggcagtttcaaagattaagcacatcacatttgaaattttcctccaattcagtagagcatcatatgcctaattgcctagcaaattgcttcacttccttgcaaggctgaagccctggtgaggcctgctcttggacctgctcctgctgcccctatggctgccgctcccattatccctcccccggttcttcaccgacgagccggggctctggctcagccgccgcgacgacggcgtcggccgcctgcgcgagctccaccctccgttcccgagcgccgccttggcgacgctgtccttggccgcctcccgcgcgcgctgcggcctcacgggctgcttgttcaggtactcgagccgcgacaggaggcccgacgccgacttgcggagcgcgtcgtcgccgatgtttgtctgcaccgggttgccgacgaggttgagagccctcagcgagctgtagttggcgacgagctgccccagcgccttcgtcgtggtgatcttgttgaagctcaggtccaccaccgccagcttcagcagccggtgcagcccctccacgtcgctgatcttgttcccggcgaggtacagctccctgatcgccccacagttcgacagccctgaacgaatcgaaaccacaaattgttcacttcttttgattcaattcacacgaatagtataattaactgcagggtacactgtcatgtctcatgtgatactagctcgcatggtgcatggaaacaagctaagcagtgcgtaggatggaccagagcggaccgatgtggcatccagtcacgctcgcgcacagcggtttcttttcttttctagggacgagcaaacctgcgggacatccactcgattcccaaggttctgaagaagttggccgaaaggagcatggtacacggtcacgagtatcgtctatcagaatgtacgaattgtactatccgaaaggtaagaatgtgatatgcctagattggatatctgatgggtgtcagcatgcggcgccctgtgtatgtactcgtttctgcttatcaatctggagtcgccggtaaataaggtgaagcacatgaaccttgtatcgatcccttcagtgtcacagtgtgtgtgccagcattagtttcagagcatgacatgacgcatcgttactgtgcactactaaagtctgtaccatggaccatcctagtacttagcccggcccaatgtctatcgactgccaccgatccagaagtgcacacgagcattgcacaatgaacaagatccacgcaaagcctggctttcaccagtagcaataaacttactgaaagaaacagctgtgatatctgacgaaatgcttaccgtgaccaatccgtgaaatcttgttgtagctgaggttgagcacgcgcaacctcgtcagttcgcgcagcccctcgatgacagatatcttgttcctcgacagatcgagtgagtgcaatcccttaggcaatgatccagatgatatttgaactgcagaacgaatggattgatcagccaagaacgagaaacatgaagattaaattgccgcacgtaaaatgaaaaaaaaaattagcacataattaattaagttttaattattataaacttgataaatgaatatatttgatattttaaagcaacttctacataaaaaattttcgaacggattgtaccgtttagtagtttgaaaagtatgctaacgaaaatcgatataaaatatgtatcttaacgagaaaagaacgtgataatttaccgatgaggttgccggacagattgactgcccggaggctggagaacggcgagatcaccgggatgacagtgagccccatccccgatatgtgcgccacggacgaggacgtggtgagcgtttgtatgatgctgttcgccttgatggcctcgccggccatgcgccgccgcgcttgggcggggaacttgccgccgaacgacgagggctccccgatctccgtgcaatgcgggcgagccgtgtcgtcgtcatcgtcgtcgtgctccacgatgcattcctcgttggctttgaacgggttgtccacgaggctgttcacccacgcgctgacccggtccagcgacgtggcctccgacgagaacgccatccattggttcgggatgggctcgtggcctacggcgatccccttgttcttgacgtcggccgtggcggcgcccgcgtcgagcgtgtcggacgcgtacccgtcgtgccgctgctccgccgacggcaccgctgctggtacggtcgccgccggccggtgcaggttccggtggcttcgcaggagcagcctccaccacagcttccggctccgggacgggagcacctggctggacgaacacttcttcagcatgacgtggtcggcgctgcacgtcgtcttcacggacgcggctgggctgtcgtcgggcgcgccgactggggtggctgtggctgagccaccggcaggcaaggccatgaggtcgccgtaggagagcgacttcgccggaagttcgaacgctttcgagccacgcctcgccgtctcgatgttggagcacgagcgttccagcctcgatgccatggccggcaccatgaggccaaccccgggctcgctagcgtccggtgctgcggcggcgctgctagcatccttgtcggcggcgtcgctattgtagccggaagagtctgcgtcgccgccggcgacgaggtcgacgtcagatgtgtccctcttcaccgagacccatgtcatcgtccttgtcgcggccttcacaagccaactcagcggcgttgaaagcggcaacctttgtgtcacatgccaggacaatgtcaccaccgcctttcacgatgtcgacggtgtccgtcccctccatgaactccaacggtttcaccttctggaactcattgccaccagacttcttgccgtaaccaatcttgctcgtaacctgccatgttcagagctgataagaacaaaaacttaaaccaaaattcatcaaagaactgggtctcctaagaatataatccaccaacctttgataacttcctcttgccggcgagaagagcagagaagcagctgatcttggacatcttccccagccacagcactactaattctcttttacacctgagaaatctcacctatttcccttgtaaaattaacagaaaaactactcccgaaagaagcagccttgtaattcttagccgttgtctatgggagagcccttcttccagaggagaaaagcggcgaaaggaagggtgcctgcatcctcctgcggccgcacgacggtcggggcgccgcgcggcggtgcggcggagaaggccagatcgatcgagcggcaggctgggtagtgtactgtgcacaaaacacgggggaaagtgcaaacgcgctcgcgtgggcgtgggcgtgggcgtgggcgtggcggaggcagaaataggcagcggacgcgagaatcacagccctcgactcggatggtcatatcccttggcatttttatacggtatatcagcggcgtacgagagttggtgctggaaaagcgcggacgccagcctacttggccaacaactacccgcgagggcggtgggtgccgtgtgccacgcgcgggcgcgcgacgacgagacgagggtggcgcctggcgcgcgcggggcagcttccgacgtcaccgcggcccgaaacagcctcgcgccgctggagaagttgctcgggtttttttttggggcgggcgctttcgagtggcgacctcgggtcggtcgggtcttgcacgtacgcctgctttacgtcgtaccgtgatacaattgtgttgtattttgggtttgactttgggagagggatcggagacggagttctttttggccccgagcgtgtctgcgtgtaatttaactctactttggccgcgcttcggtcacggaggatgacgttttgcgtgggtgttcgcctgttcggtgttgtctggttcagtttacacgttgttcggcgcggtaggcctacataatcgacccccacccatgtcgaaattcacccctcgccacgggccagggtaggcctgacgccctgaacctgattaaattatcggtccagctgcaaacagggatactcatgcaccacacgagggaaagtatataaaaaaattcataaaatttgataagataaattatgataatacaagacaccgtataaacgtgcaaatctaaattcgatttacacaggaagaaaaaaataacaaatttatgcttcactgacttatttcattatttttctttctctagttatagatctaatatagtcttgcatgtttgtgcatacacttataattattatatttttttattctctctataattagttaagtcatgtataaatgatttgtaccatggtaactaggtatataaaatacttatcccacacgacatgctaatgacaaaaagataagtcaatgatgcctacgtcgatttcatctggggacttggcagattcgagcctcacaaaagcgaatggttcaccgtttcgtccgtctcgatcccgcgcgcgtgtgtaggccggcgtgctccggcacgtacgcgcgcggccgccacctcccccagctgggacagccgctagcatccgaccagagaatacgctgcatttggcttgtattttacgccgattcgtcagcctaatccgtgcaccgcactattatctgctctagttaaatctttcattggccgtcctcgtacgtgcagtgttactcccgtccctttcgttcgctcatcttactggatcttactgtttgttaattacactgtgaggtactcgccgagcgagttgagacttcttctccgagtttgacgagagcattgtataatatcattggatatgcagagatctaagagatgcaccctggtccctgcgccggttttgacaatgtcatgtatttgaagaacggtgcacgcctgcacggccactttgcataattgcatttgttcctggatgccgttttcattgcatctcggtggagataaaattgacagcatgtattgtacttatcagtaactgtttcttctactacatttgaacaatcggttggacatctaaaaggtgatgcctgtactgaggaataagttgcataagcagcaaatacgtactcgctgctaatagatatgactggttcgattcgctgactttcatgtcattcccccaagaggagagatttatcaactacaactttacatctcgtgccgctgccaccaccgttgaaaattgaatgtatgcaaaatggaaggcaagaaaaccacaatcaagagtcgccatcgatcatggcccgcccgctttgatttgagtggtttcttcgattcaacgatttctacggctagtcctttcactggtaataaaagccacaaacccagggaatataatctttttcagggagtcgtgttattatcgaacgctctcgtctgaagattgtgaggcgggtaacaagtcttcgcgtacgatttcaaggttctgatttctcgctatctcgttcagtcgtttaattgcgatgcgcacgatgcgggcagtttgcttgcgagttgcgagtaatgaataacaagtgcacgggcgcgagtggattgtctgtcatcttctaaagatttcaacctcgtccggtcaaattggggcacattccattatgatttggtttgtctttgatcggtcgcatgcactgtcgtcacgtgccttaatttctttagtacgagtacactgtacacgcatatttatttttgaatgtatcggcccctccaaagtagaccaagggcatcaggtgcctgccttatactgttcaaacaaaattcaacctacagttcgagcaactgaagtttcaaccacgtgcacaactcacaaaccaactctcacgatcacatcgaatggaggcaaaagaagcaaatatttcctcggctattccgctgatataaacgagtgtgcaacactgtagtagctggataatttgcctttgctagtttggctccacctgcagcatccttcgtcttgcttggaaacgggcaaacctggtgctcccgtctgcgtcaactcgctcgcgcgccacgtttttttcttcagaatgtcgcggcgggcaagtggggggcaagtgcgggcggacgggatcgcgcgggaatgcgcgaccgcgagacggcgccatgactttcccggtcgagtttgctacagctagctgatagtaacacagcgctttcatcagcatggatggagcaagtcgcatccatccgtagttttctctgaaaattctgtctgttatgcggaagcatcaggaaatcgaacgcatgctgaagagacgacgagatcatagcgcaacaaggcgcgcggcttccaatggggactagagatggaacatggaagacgatgaccggaaactgccgaggacggcggactactggacggaggaaagggcggcgccgtatctggtcaggtggctcagatgagatttctccggtgaggatagaggagtactggagcagtggtcggggaaaggagaatggagaaaataagtttcagcctactgggcttgatggctcgttggtgctacaggcctattaggccataaactgcaacccagctcactttggacccagctacagacgttccaacttggaataagttcactatttgaccctcaaaagtgatcgaaatctaatccatgaccctaaaccacaaaaccggatatctcgacctccgaactcttaaaaccggtgcaatttgactccatagacggttttgaagggcggtttcgttgacgtggcgcctacgtggcagtattgactcggtcttctttccacgcggtgttaacgtggcgcttaagtggcattagaaataaaaaatatgtatgggacccatttgtcattctcacacaaaaattaattgtggggcccacatgtcatcctctctctctttctcttcccttcacaagcgacggcggtcaagggaggccggcagtcgacattcaggcaagcatcggcggcaggcaggtggcactagggtggcgacaacggcggtcggggcggcggcggaaccagatcttcctcctccctctctctccctcatatctttctcccccgtttctcttcacgggagcaacgacaacggatgggggtcgggtttgcgccagcggcggtgcccactgggacctactaggagactgccacgaagcacgtcgcagagcggcggcggtggtagctgcgacagcaacgtggcagggggcagcggagcttgagagagtagggcgtgaccactcctcgtcgccgcaccacgtggagaaggaaggacagggagagagatggggtcgctaccgccggcgccggcaacgacgctgcgggaggggcggaggaggctgtggatgggattggaggaggcgtcggccaccgccgccgccgaagatccggcccctgctccggtgtagacctccgtttttataacaagaatcactcgtgtcactagtaccatttccctggattaagtagtgtggtactcacgattacatagctgaaatatcaagtgcgcatacaaggattgtctagcgcgaattattacatcataggcccgctggcatagactggaacataggaccgaatggtccataatacatgcaaaagcagaaatagataaggcagcggaattcaggcagcggccatgccattgccacaggcaacgaccgtaactaagacctacgaagcgccgtcatcctccgcatcctcctgaagataagcatagggatcctcctcgacttcattgccatccactgattaaaatttgtaatagcaagagtgagtaccaaccgtactccgca

SEQ ID NO: 11746 - DNA, 1844 bp, Oryza sativa
agagttgtaggtactgtctaattctgtggattcacaggatggttcagttagtatatgtggccattatttcccttgtgtgttcctgcaggcagatgagaggagaggagttgcacaggctgaatgtggaacagctgcaggagctagagaagagcctcgagtccggtctaggctctgttctcaagaccaaggtacgcgcagcaacatgagactgtccattggacgtacgtagttgcaatgttgcacaccgtgatctttgatcatgttcttcttcagagcaagaaaattctggatgagatcgatggactggaacgaaaggtaagagcatgatattttggccaatctccagcttcagtacacagctacagagcgaaactgaaatgcagctgaaattaattatcttctgttagatcttgatttctctttctcatcacaaaactgctccatttgtgtgatcaaacagaggatgcaattgatagaggagaatttaaggctgaaggagcaagtaagtacccttaattttatctgccctgtcgaaactcgacagaggctcggagatgtgaaccattttccattatctaaaaagaaaactttctctctatgcttgctctgctcgttcatttgattaaacgacgatctgaagctgcaggtgtccaggatgtcaagaatggaggagatgcagcctgggcctgattcagaaatcgtgtacgaggaagggcagtcgtctgaatctgtcaccaatgcttcttacccgcgacctccacccgacaacgactacagctctgatacatctctcaggctcgggtgagttctcccatactttcagttccaactcctacctgaatttatgtgtcaagaaacaacagaggttagttcgatgatgaacattcaggttcagatgatgagttgtttactgattgattttgcatgtggcaggttgtcactcttcagctccaagtgatggctggaaactaaaactgagaggaaacagctggatggcatgcctgcatcgccaaatgatcagtgcatgcactgcaagactgcaacaaataacacagttttagattgccagatgatgatgtgtgtgtgctgagagtcactggctattatcgtacacataataacaatagaacgaacaagttcttctgttcttggatgttacctgaattctactcccatacatgttgtcaatggctctgtaatcgagtgtctgcaattccagctgaaagcaaccgattacagggaaataagctattttttcttaaagttctagctagcttggtacagttcataagccgtagaaaaacaaaggcaaataggacaatatatcaaaagtcatttttaggtaaagcttttatatctccattcttaccggtttgaaagcaaagtctgcaaaataagactacgatgaatgtcaccaagggaggaaaatccacaagcgaagcatatcgcatctaactttcaggctaatctgcatgcattatacaaagagcgatttttttgggaactaatgaattgacatgcatcgtccattaaaatagaggcctgcatgctttgggcgggcaagatatgttccattgcgtcatatggattggactaaaagtgagatgtcagctttagaatcttgagctggaaacgcattatctgacagttgaatgtgcaaaggttggagcaaactcatctcgtccaccgggaagacgataaaatgcgtccagatctcgctcatgtacataaaaatttcagattgcgaaattatccccagggttaaaagttagcactagtaaagtacttttagtttagggcaatgatgcacaagcctttagcgtgcactggatcggaaaatcagt

SEQ ID NO: 11747 - DNA, 24021 bp, Oryza sativa
ccactcctccccgcgccgttccgacctctcgctcccgccgccgccgcggcctccgccgcaccgcgccgcgccaccgccggagaggggggccgctcgtcgctcaccggggcgttctgttcctaagcatcggcgccgccagcgccgccgccgtcgcctgcaggacggggtgcgccttctcccgccgccgcttccccttcctcgggtaaccttctctttcctctttgctcttagattttgtgtggaacccgcgaaattgctaggcacgtccgaacatgcggctgctaaaaaattgaatcgctgaagtatggtacaagagtgtagtttatccatgttatgacattgatggatgtgtgaactttggaggttaacattgctacgcttttatctagtttgaattctatcttcttgtagtgatatctgaatgcaaaatttctcagggtaagaggtctcagctctgctcggatggagtccgcttccaccaccgtgccatccattgttgtgtatgtgactgttccaaacagggaagcaggtagtactttactgtgtttttgttcttgttatattgtgtgcgcatttcatttgtggaacttgctaggcaatatatttcatttcctccaagataaagcagttagagttgagattgatcttgcactatttgtcttgtgagcatcatgtttctcctttcaatattgttgtttagcgtttatttttttgttaattaattttagcatctatttctgccttttgtttaagcagtctttaaaagcatcatgtttcacatctactgcagggaagaagctgtcacagagcatcatcagtgagaaactagctgcttgtgtcaatatagtgcctggtttgtcactttgctcatcacttccgtttctctgacactatatgcctatgaacccagatcatatgtcagtgttattggccctctgtattccatagaaaacatctttattaccttcaaaaaatttaatggaaacactgaaaaggtttagtagaggtggcagtgtaaacgaattagatcaagaaaatccatcatatgtgggaacaaacccttttaaagctttgcttaccttactttggactgaaacaagaactctgttgaatcacgaaatataatggtgctttggttgtccaatgattgttgcgctgcccttccttatgctgttaggcaacaggtgctgtgccaagattcgcaattagcttgtttcatattatcgtttatactgaattatactgaagttctgtacatttttcaggcattgaatctgtttattggtgggagggaaaggtgcgttgtggaaatttacctatagactgaatagattattaatagttctcatctttgtaattcagtggtttatcattccttcggatgatgtatttcctgctccttagcagacctaggatttagtgatcaataatctgccttcttgcaggtgcaaactgatgctgaagagttactcataatcaagactagagaatctcttctagatgccttgactgaacatgtcaaagctaaccatgaatacgagtaagcttcattcagtttattgatcttgctgtacaatctgtctgtttactatagtttacttgtaacttttctccctgaaatcttaatgtaatttggttggcctattctttcggccggcccgggagaaaaatgttcctgtcagatttactggtaacttgttcatgcagtgttcctgaagttatcgctcttcccataactggtggtaacaccaagtacctggagtggatcaagaacagcaccaaggcaaactgatctggcattcaccctgttgtatacgcgcgctgcagacccgcagctcaaaaatatccaacaacatgaagtaactgatcggatgttctctgtttggcctatgtatcacagtgacatttgctgcaaggaatatatgtgtggttgccatcttgtgagttctgatgagtaacttgggtctataattctgctcacataaaaaatcgattcagtactcatacttgtgaattgctgcccttgatttggtattctcatatgaagtttttctagcgatgcaaatgatgaagatctttaagatcgatgtaaacataccaattcacactggtaaaaccctgagtacgtacgtaatcacctagatatagccctattggcacatacagatgagacaggcgcccgtgaccaagttttgatgtcacgtataccttattgcacagatcggaaagctacaagcccacaagaggacaccgtgatttcagaaagggaaaagaagagaatacatagactgcacaagccgttctcgtgcatttgctagcagcagcttggctctagatgagatagcggtagatcatcttaattaatcttaattcttaattagttgcaggactccttggcgaagccgacgcgggagttggcgacgtcgaagacgacccggatgttctgctgctgcaggttggcgatgacgttgacgacggagttgacgttctgcggcgcctcggccatggcgaggcaggccagcggcgtggcgctgctgtggatgagcgtgttctccatcggcagcgccaggtccacgccgccgtccatgtgcaccgtcaccgcgggggctccgccggcggccacctcgtcggtgttgaagcacgtgtcgaacgcgcccagcgacgtgtacccgctcggcgccgctacctgccgccggaactcctcccgcagcgccgcgtacaccggcgccgtccaccgcgtgatcaccgtgccggagtccaccaccgtgccggcgccggtggcggcgtcgaacgcgaacgatcccgcggggaccttcacccacgcgtgccccacgctgagccccgtcacgttcacgtagtagagagacgacctgtgcgggttcctcagcatcggcgtgtaccggacgctcctcggctgcccgccgccggcgcccagccggagcgagccggagaagtagtatgacctgtagctcgggaggcagtaggagaagacgccattgtacaagctcccggcctgggagagcagcgccatggggccacgcccgaggccgagcagcccttgccttggcatgttcgtcgtcggccccgtcaccgagctcacgcacccgaacgtgtagttcgggatggcgtccttgcccagcctcagcgtgtcgctggcgagcgccgcctggaacgacgcgtcggcgaacggcttggagaaggcgcacgtcggcagcgtcgccggcggcggcgccgcgtcgccgccgccctgcggcgccgggcacgcctggccctggaacagcgggcaccacgacgaggagcacgggagggaggcgtaggaggaggagttggccggggcgaagaggctgctgctcgggcacgtgccgcacggcgagcagtgcgcccacgtcgcgtcggcgctggtgtcgagcgccagcagcagctgctgcgacggcgagccgaggccggcccggacgacgtaggacgggggggcctggccggaggcgacgggggcggaggagacgccggcggtggctgccttggaggagaggaagaggaggcgggcgtcgtcgtcgcgggcgagcgcgatgatggactcgagcggggacggcgacgaggggtgcacgttgtggtacacggagagctcggcggcggcggcggcgacggtggcggccaggaggaggaggaggagagggatggtggtggtggccgccatggcaatggagctctcctggctaagctagcttgcttgctaagagagtgtcactgaggggagtgaggattgtgactgagcgagctgggtttatatagggtttctggctgttgatcctgtagtctttggcgccgatcgattgaatggtttgagcttaattacggcggcacggacaacatgacgggctaatagcgcacattcaaatcattaagtactactctagtactctgtccaaaagaaaaataaaatctctaacataagtagtatctaggttcgtagttagaattggacttgtttttgtttttagagacgaatgggtattttaaaaattttgaaatatatttattttttgacaatgaactttcgtaaatagtttctgtaaaaacagattatttattggcttgaaaaaacgtgctcacgaaaaagagagataccataagctaataagttcatcattattaaggtctcctttgattcaaaaaaaattcataaaaattttagaggatttcatccctgtagaaatttttcctatatagccatttgaatcaaatgagtgaaatcttttggaatcctataaaattcctatagaatgtctaatgccacgtaaattttggaggaaatctaacacgaggttctacctcatggaaatcgtcctttgagtttttatctctcctctaattcctgcgttttttctgcggtccaatcaaacggtcattactgtgtttttcttatgttttgcaatcatctattttactcttacattcatatcaaatttttgtgttttttctattattacattttctcaatcatgcgatttaaaggggccttaagcttttaggaccatttatatattaatttgagttaatagtatcgccgatgatttttacagaacacgttaatttgaaaaagaaataagtctttaggattaacttgcttatactcttatagacatatagttgtttcttaagtttaattgtttttcgaaggttatagtttaattaaccgtttgaccaagcacatacggacaccatcttggcatcttttgactaacctaacacatgctcaaagaatgtgaactttggtcgttggtattatgccctcacaactccaccgccgtacagttcgatgctttactatttacctcaatcatcatctcatggtggtagtaaataaattatgataaggtcttgatttttgaacaatgttctgcttctcccttggagtagaaagattatttgggataagaatctctcactagacaaaaattgtcacaagaacaatgattaattatggagaagcaaaatactggcttatcacatgcaaaattgtagtggagtgagatgcacagaaccaaattgacccttttaattacttagttaagctgagacagcgaggaagacagattaaggaagttaaacacgcctaggagtgcgaccaaaagtcacaaagatgggcaagaatattgtaccacatcctgtcaaagtttttgtccggccactgcaggtaaaacctgacgaaatccttgattcctgacacgtcctgagacagcttcttcacgggtcaacaaggacaaggatcatcacaccctgtcgacgaatcaccaggtgtgtcttagcttagttatcaaccaatcaacaaccgttgagtgtctgttaataattactgttaatttgcattattctctgggtcattggctgtgaccggcgatcaggttaacttgtttaattattaacttggatgtgtacaaataacatcaacgtagatgctcgcatcctggtattttctgcagtctgcagaaacatgtgatccgaatgatttgttcaaggaccacgatccattggtgagtaacgcatgcttgtacgtgttgataaccacacttcctatagaggggtatcttagaaagatatttaaggctttttttaggaggagcttttagcttttttatccatattttttatagctgtattagttacataattaaaaggataactttgtataattcagaaaatttataagaaattagaagttggttttccaatttcttcatattctcgtccgctgcttctcaagatataaaacgtaacctacatgcctattcctcctacaaagtaacatatgcatgtctgccatgtccgactctctgactctcatcctgtagtatatgtaattgagatgcacttgatagtgtaatagtagtcggcgtgtggtttcaactctgaggttttatgttcaatccctagccctctcacaatttcacatccctccaaatctcttttttttttctctctttcagtacatgtatttgcttcctcacaattaatctccttttattttctttcagtacatgtatttgcttcctcactattaactagctagggaaatattgatgtggactatggatattttctcggtgaatctattgtgctgtgacgcctacagatccaaatgtgtacaaatccccgttcctccacgcgtgattccgcggcctcctttctttgggggttggattctactgctcgtctgttccttcttcacgagcagccagcggcatcacgtcccatcccttccatccagctcggcatgcattgcgtgcgcacgtaaaaagtgtactacgcagccgcgagcggatggcccgtgcattgctgtactcagcgcgcagatggctaagtaaccttcttctcaatataaatgcatctgcgatagaacttgagatatcctacgattacgaatctgcatatagttatttgtccagatttgtatttgtagaactataaatctaaatctaaatagttgcttgatcagatttatagtcgtaagatataacacatctcgcactaggtatatttatattgtaacaaaggaagtattgacttgctaattgatgagaatctaaaaatacacttagcttttttttctttacttttttttttagattttacaactcaagtatcttagaggcttccatcgtttgtcctataacttattagccgctgccacctaaaaattaatcttagagttcattttgattttctttttcattgtagttgtagtttatttttcaaagttgactttaaatttattaagaatatatatatatatatatatatatatatatatatatatatatatatatatatatatatatatatatatatatatatatatatattaaatttgtttggtgctccatggtgcccgggcaccattgttgaaattgagtatatacccaattcaaatgagtatgaaactttttcaattacttaggtattaacattaactactttactaactagttcaaagcatgtttgtactgaatttgaacttgtttttgttagattttgattctaggtatatagcatccatacatataattagttaggtatgtaatcatggattgtgaaataaagttaaatttgagttgttttgttgataggtatagatatgaatcgaattattataactaggtatatactcacaatttgaaaattttgaaaaatttgagtgattttgtacattagataccatggtgccctatatatatatatatatatatatatatatatatatatatatatatatataaaactacccataattttttttggcgaatcagtggtaactagcatttatgtgagaactgcttaggagaaattaaaattctagaacaagcagttgtccgaaaactctcctatcgtcctggcagaagagagcacagctgacaaacgcaaattgtaccttcaaaagtgccttgcaagcaggcaacatcaacaagccagccagccaaacgaacaaaccagcagtcaacggtgcaggacgctactgaaattcagcacgaagatcgtcgtccatccgtggcaagcatcgttcccggccatggctatgtacaaggtttagccacttatcagcaaattaattagcaggagaagcaaggataaggaacatagacagatcttcctacatctattaatgcatctatctcgtgatcgaattgtcggtgagagtaagcccaaaaccctcccctgtttcctcctaacacaaacagaacaaatctatactccatatattaatctaacacatatctgctaatcttcgggaggccaactgtacgtcagtttgctactccattttatattacaagttatttcaggtttgtcctatgttaaatatcaactatatttgtagaaaaaaaagtagaatatctatagtaccaaattatctcatcaattataaacctataattgaataacattttttaagtaagtttgtttcttgctgaaaatgcttatacaatttttaaaattttagttaatttgaaagacgtttgatttagaacaaatttaaatgacttgtaatacgaaacagagggagtacagttggttccctatgcttccaaagggagcaggttcacgggcaccttgttccttgcgggttgcggcgaattagcgatgcacgcagagttgcagacaaagctcgccttggatcgttctaatccacggctaataatgcagttttgttctacgtgcgagcctcgcttgcatgcgtccatgcggtcgcagggatcagatccaatcccgtgcaaaagctcatgggaggatgcagttttatccagatgtagtacagctcatctgaatttcctgccacttcatctgcagtgcaaatgggttctgaacccataggttatgatgctttgagcttgcggcaaatgggttggaaaagccaatcgttttcttcttttttttttcattcaggaactctcaaattcaatcaatcctagctttttttttttttgaaataagcaaaaaggaatgcctgatatgactatatggagcatggagcagttttgtacgtacaagatttgcacaaggcacaatcctggttcgtgctcagatttgaacacaagatttatatttgtttccgtgtctctgacaggtcaaaatgcttcactggcgttggcaccagccaaatgatcatacataaaattccatgatgcgaatacaatcgtatatctacaaatgcaatcaaaccctgacgttttcacaagccctacaatattaagcggcactgataaacagccaagtggacagacaccacgacagaatagaatgatggagaaatgggaaactcatacaacagggtgttcgtcctacagacggccgatggatttcagcgaagtgaggtcttgccggcgagatggagcaacgcctgcttgtggtaggcggcgcggagctttttgtacttctgaacaaaggttgggaggtcaatgtccttctccaggaacttctggtgcagctcctccgactcctcgtccaactttgccatcgattctgagcaagcaccgaagcaattcatgaaaatgtcagcggttgcggttgggtgtttgaaaaattaaattacatggttggacttcaaacaatgacagaagcataaatcaaggtttcacgaaatggaactaacatagacgccactatgacgctagtaccagtcctagcctgatcattggccggttacagaagggtagtgcattcatagcaaacaatagatacatacaaaacatgcccatgattcggtgcactaattcacataatgtattcaactacaaataataaagcacagactcttattaaaatacacagcaaaaatgatgcagatgcagctgttcagaacccttactttggagcttgtcgagcagtgcagcaggagaatatgacctcataatctcatccttttgcctttccaactcagccaacctatcttgagcagcagctagttctgtagttcttataatggtgcactgcacaataataaatgcgatttgaatctcaggaaaaaaaattgaaacgcagacaaaatccattattatagcattaactgtatttaaagttcgtttaacaatgaacatcatggctacagtagcttatagtttctgagatggaggtcacagtactaaacctgattcctgagctccaagatccgttgctctttttccaaattttctcctgtaagttcagaagatccaaccatatttgatttagaaacagtagtaactaacaagttgtttatatctttttcatagttaagacaatccaataaaaaagcattgcatgccgataacagaaacacgaataactcacttgcaagttgcactgtctcctttctaagctcatcgcgtaactgaacattaagaaagaacaagaagtgagcaaattgacaagaggtctagcattcagacaagtcaactatctaaggttaaaagcagcaccgaatataaattaaagaataatcacccacattaatgcccaaatcacaggagatgtgccacagcccaaagcctcaaatatgaggccagaaaaagaaaaagaaaaataattggagcatatagtttggagtttcctgtgtatctttaactactggaggaaatacagaaacatctaagtacagccaccaatacaaatttcaaacacctgtgtactcagcaacaaaacttacgttgttctgggttttaacttgatcgagtgaattgaagaaagcattatatgcctctttgtctttcaacagcctctgcaactcatcaacactgcagaaaaaaggacagtattatatacagcagttttgcattccaaacaagcatgctcacaaggaatagtgtgaaaaacacatgtagtaaaggtggcgattataaaaagcaacccaaccatacataatcacttcttttagcatttatatacatcccttctgaattgcacaaattgtcgtgccctctgaaaagctagggattcttcattcattaccaattgatagaatatagaatatcagccatgatatcattattgcaattaaaaattcattactctaatattattagttagattctagtgactctcttttagtactaatataaacactagaatatgtaaaataccatggtaaaaagtaacaaggctgttgcaattttaacccacagtatagataagataaggcataatacaatgaaacttcgtatacaggaagctacaagcaacttatcaaaaaaaggttagctgctgaccttttgtcctttaaccgagcaattatccctgcagcctcagctggagatggttgagcacgcgatgaagactgggaattatcagaagctctttgatgtggaccaacattggaagagcttggtgtggatggatgtgaagatgaaccaactacagactgagggtaccaaggttgcgtagggttgtcctggaaatttggatcaggttgctgctgctgcgagttgctgctggcaagcattcagcagaaacaaagacagtaagccagaggagctcgtttttcaggaaagcttaaggcaataagtgaatcatattaaatagccacgttaatttacttatgctaaaaattaaattcagcgtaactgaagacccaaccataagaaataacagagtagctgagtggtggacactgttcggatgataaaataaacttttggaacaaaagcaaagcaattttttgagcatcaatatctgaaggctttttagtatagaaagaaactaaggattacgaatcacatcaagcctgctggctggcactgatcaacaaatacaatactttctaccaaataaaagaggaagctcagtttatagaatacaaatgctatgcgaggaaaggttaggaacagacataagaagaacaaacgaaaaaagtattgctttcagtaaaaataacatacccaaaaagaggaaatctccagctcattgtactagagcaatctgcataaaaagaaatagcaggttacatatgttccaacagttggtggtaatcaataagctgtacatgcatatagattctaacggaaaataactagtagatggtaatcgctaacgccaatgccagactaattgttggttgcatcagaaaaataaaaggaagaagaatggatcaaatctagaacaaattgaaatcaaacccctcaacgcagagttcctattgactattgtcaaaaaacgatatacttgtgataagtctcatgttcggtaggacgcgttttctactccaaaattactgcctgcgtaatcaaatcaaaatgccaagcatttggatggcaaaatgttctgtaggctacggcttgcttctactctcaaattgcctagataccgtagagcggttaatccatcactgaagattaccatgagctgctgataactaactaacttgggtgtgactttcaagaagtcatcagaacaacagcataaaaacgtgtcccccactcccccccaaaaaattccttgtaaaacctgtcttgcaaaactaattcctctacctgaatcacaatcgccgaacggattcgacaactttaacgggatcgtgaaacaaaccacagcaccggttttggatcgagggcagacacaaacctgccgagatcagcctcgaaaccgagttgccggtgcgggcggcgctcagggacggccggcgagggtcgcggaggcctggtctcaccgccgcgaggtggcggggaggggagcgcgtcgcgttcgcgttgcttcgggtgggagcaagcgaagcagcgatggacggtggccggcttgtcgaaggagaataagcaattgggatttgggggagaagaagaagagagagaggaggcgagaggcgacgcggagtcggacgcggactgggccgtggggagaggataggtgggctttctgttgggccgtgtaacctctgcgacttgggttttgtttgtgtttgcatcactgggccccggataggagaatgtgtagggagaagtggtccaaaacgtcgagaacggtagcatttgttcgaaacgattttcggtcagtcgaacaattgatcatattagcaatttattacttcctctgttacaaaatatttgacgccattgactttttatcatatgtttgaccgttcgtcttattcaaaaaatttaagtaattattaattcttttcctatcatttgattcattgttaaatatatttttatgtaggcatataattttacatatctcacagaagtttttgaataagacgaacggttaaacatgtgctaaaaagtcaacggtgtcaaacatttcgaaacggagggagtattacgatagaaatatggtgtttaaaagtgaatagaaaaaacaaaatttctatttgactaaaaaaatcaagaacatatatattatttatacgaaaaatgatgcttgatcggtagagaatttcagcgaatgttttcattattaagaaagtgtcgtccaatcatcactagatgtgtgtttatgacatgtttatcagggatttagctcaatctgatctcacgagcatagtctagatcgagtggagttgtgaagcagctcggagatcgttcaatcatggtgatctcgaagaagttgagttgtgggaaatcgttcgatcaaggtgatgttggagttgacggcacaatcaaatatcgagatcaaggctgagggggaagtgggaagtgagtcgtagtgcccggtgagggagacagcgtaggtacgtaattagagctagctagtaagctaagtacggcgccgtcgattaaacaccataaaaccacggcggcacacgtacgaccgatcaatattcgatcgatttaccttcatcttgtaaggacacgataggagcatcaattcctccggagacaatctcagatcgaaggggcgatcgttaacgaaagcgcgagattaattttatcagctctctagtgtgattctctctggtatatgctgagtatcattcgtaagtcgcaacccaccgtaagctatgcaatcttataactatactaattttagtgttgatccatgttaatcatacaggaaccacctatatatttatcgacaaattttcttttaaaaatttgatagatataattatagtacaatcgcaatgtaattacactgtaacttgcatgtaactacagtataacttgtatataactttcacgtaattttgaatcattagatctattacaagatttgttctagtgacgaacaaaaagatcacagtacacacgtatatgaaaggatttgttcccacgacctcgattttaccgaaataacatgttacggagagatttttgaaagttacatacaagttatattatagttacagtgtaattacatacaagttacagtataattacactgcgattgtactgtaattacatctgttaaatttttggaagaaaatttgtcgacaaatatatagcaaaattgaatcatatatatccttccttccttatatagtgtggttgcatctccacatttttcttttatttttcaccggtccattgactgtaacagtaaccgcgtcgccctagcacgatacggcaccaccttagactgtggtcttgacatgtgggccgacatggcacggtccgatataggtgatgtggcgtgttaggttaagccacccatttggcctgctatataacaggtgggtgcttggttaccaggtcacaatttaccacccctaaaattaggtgagtttaattttattagcagttgtttggttgtggtcgcagttagtagcgagagtatctttcaataaattggatctcacgcgttattagtaacataaaacgtgtatcaagatcatgttagccttgctaacatgtgattaagaatttaatcatttcaacttaaataaacgtgacgataatatttattgataaacggtgacctgaacgaaccacctactcctaaatttgtttgcaacactccaccaacccgtcttccaggctccaacacggcaacacctcatcacaccgcctagctactgcatcgtccacgcatcaatccatcggtcagtacgttgtccctcctgacctccctgttcctcgattccttcctccatcctcccgagaaaaaccacccaaaacagtttcttcggcgagagctcaaaataggatactcctacccctagctactctacaaaagctcatcaatttctgaacgatagcaggaggctttgccgtcatagaaagaaatggacggacgatggaccgactgatgccaacgtacccctcttccacccccccttcccctcctctctcctctctcatggctatgtttagggcatttgaccggatgtcagaagtcctctctcctctctcatggctatgtttagggcatttgaccggatgtcagaagtcctctctcctctctcatggctatgtttagggcatttgaccggatgtcagaaggagttttcggacacgaataaaaaaactaattttataactcgcctggaaaccgcgagacgaatcttttaagcctaattaatctgtcattaccacttgtgggttactgtagcacttatggctaattatggactaattaaactcaaaagattcatctcacgaattcctccctaactgtgcaattagttttttcatttatctatatttaatactttatgcatgtgtccaaagattcgatgtgatgtttttagaaaaaaaatttgggaaactaaacgggcctaatagttccaaagttttctttttccaaacttctaactttccatcacatcaaacctttcatacacacacaactactgttctatcacatcgtaccaatttcaaccaaacttccaaacttcagtgtgaactaaacacagcctaagagttgattcttttaatccctccatcctaaaataaatttaattttctacatatatcaatactccctccgtcctagaatataaggggctattgagttcctaaaaacatcacatcaaatctttagacacatgtatgtagcattaaatatagataaaaagaaaaactaattgcacagtttgcatgtaaatctcgagacgaatcttttaagactaattagtccatgattaggcataaaagtgctacagtaacccacgtgtactaatgacggcttaattaggctcaaaagattcgtctcgcggtctccagacgagttacgaaattagtatttttattcgtgtccgaaaaccacttccaacatccggtcaaacatccaatgtgacacctaaaaatttttatttcaccaaccaaacaggtcctaagaaattttagggctggacacggttattaagaaagtaggtagaagtaagtggttgagggttgtgattggttggaaagagaatgttggtgcagaagttgttatattttgagacaaatcctgatggctaaaaattgttatattttgggacggagggagtataaagcttaaaacagaataccatatttattaaatcctaatacagtcattttccagtactttatctgcttccgatatattttttaattttcatgaattttgatgtaatgattattaaaaataaacttattttaagataaatgaatgaaacttactcctaaattttattataggacgaagggagttacttttattcttcagtagctcattttgtagattacggagttttcggtagcttatattttttaggaccgaacatttcagaagaaactcactactacaggattgattatcctggacaccaccccattttatttccatgcggtccgtaagtcagactgcacggaaaaatggtgggagcgtcgcccgcacacgaaaatcaatttttgtgtgcaggtgacttaacaggcccacacgtgaaaataaccctattttcgcgtgcgggcctcctaatccacccgcacagaaaaatagtcgtccctcccatcctattcaaaattttcctctctctccccgcggccccttctctcctctctctcccttatcttctcaccttccttctcctccactcattttcctccctctttctctcaccttcttcttcagttgcctccttctccacaacccacaggcgggacggcggtgagctcggcggcggcgggcggacgtggggaggcggcggctggcgtagacgggatgggcaggccccagctcctcccctcccctccccagcagcaactccggcgcgcgggcgggcgatgacgggcgaggagccgcggctcctcccctccccggcggagacgggagcgcgcgggcggtggatccggcggacgggagggcgatgaccggcggccgcggctcctcccctccccagtggcgacgggagcggcgggcggtggatccggtgggcgggagggcgggcgaacgcacgggcgaggcccgcggctgtccctgcccggatccgacggcagcgttcctctcctgcccttccccgctcgagggcgacgacgacgaggcgggagcggcggcggcgaccacaatgacgacgatgacgacgacgaggagggagggctctcctctccctactttcgcgaggcgacgaccgggcgggtgcggcgaggcggcggcggcgagggccgacggcaaccggcccccacacgcccggatccggcggcggcggccgtccctcacggcggtgagggtcggcggcgggcgcgacgatgtcgacgacgagttgcggcggccggttcgcttgcaggccggcgggcgggcgacgatttttctttttttttggttttttttattccgtgtgggtggtatagtatgaccgcacgggataatcgattatcccaagcggtccttccgtccgcacgcgaaaatactgattttcacagacagcggtgtgcaggcgggtcaaatgaccgcacggaaaaatggatatccccgtatggcaaaatgagttacgtagtagtgactgtagctgtcaaaggatctgtttaatttgaggagcctctgacagctacgatttcttctaggttctcactcgttactttttagaatttggagaattctgtaatatatctctaggccctttaacaactgtcaactaaaatgttgtagtcgaggaatatacaaaagtacaactaaaatccagaagccagaagctatttattttcagctcatctcatcttttgtttttcagaatctacaaacatgccataggctgtgtttagttcatccccaactaccccaaactttcaagtttccatcacatcacatcacattcaaaacttttctacacacataaattttcaacttttcccaaacttccaactttttttagaaactaaacacatcctatggagtgggacaactgcagtttcttctaaaatactccccttttctaaaatataagtatttttagtacagtgataacccaaacattttaaactttaaccattaatagaaaaaagatcaatcatgaaaaaaaatgatgttactggatttatcatcaaacagactatcatagtatgtaactctttttatttaaatcatcttacttttatagatattgttggcaaagtagcatctcgaaaaccgtgtcagggtccaaaaatgcttatattttgaggtggatggagtaacaagtttcccaaacaattaagcttttcgtccagattctaagaagttgaagtcagagtctaaaaaacaaactagaagtataaggtgtgaaacctagttttttagattatcagaagatgactatcaaatgctccctccgtcaaaaaaaaaaagcaacctagagccacatctccttctagtagtacaacgaatctgaacaaccctcctagatccacatctcctcctaaattgtctttttttttggacgaatcagggagtactccatatgtcaaaaaagaattcaactctacggatgaatctgaacatatagattttcttttaatagaaagagtataattactccatctgtaaaaaaaaaaaccactaacttagttaaacctatttgatgtgattgattttttttaacgaagtgaggagggtgtttgggaaacagagacttattccaagtctctgtcacatcgaatgtttggatactaatttagagtattaaacatactgtaattataaaacccattccataaccttggactaattcgcgagacgaatcttttgagtctaattacgccatgatttgacaatgtgatgctacagtaaacttttcataattatggattaattaggcttaaaaaattcgtctcgcatattagctcttatttatgaaattagttttttttattagtctatatttaatactctaaattagcgtcaaacatccgatatgacatggactaaaaagttttagcctcacctaaacaccccttaattcttaaaattttaagctcttcgaaatagttccgaaggctcttgaacccagaactatgtgacttttcaaaatgtcaaaagttgcaggggcaatggcgtggagggagggtacactagtccctgcgtccccaggggatgtttagatatacagttgtaaagttttagcgtgtcacatcggatattgtattatggtgttgtatgggttgttcgggctctaataaagaaactaattacataatccgtcaataaaccgcgagatgaatttattaaacctaattaatccatcattagcaaatgtttactgtagtatcacattatcaaatcatagagcaattaggcttaaaattttcgtttcacaaattagtcgtaatatgtacaattaaatttttttctaaacctatatttaaaactttatagagatgttcaaacgttcgatatgatatggtgaaaatttttaagttgagatctagacggggcctgagtcctaaccacctcgtggcggacacctgcctccgtccctgtggctccaccacttgaaagcctttgccataaaaagtaggagtcgtcctactcctacccctacccctacccctgctgcagtgctataggctagccctacctccctgctcctgtttcctctctttctctctcgcctccttcgcttcgcttccattggtggtggtctccattgctcccttcctccctgcctttttcttccataagtagtagtagtagcgggagtggccgccgccgcagccatagatctgcggcgccgcgtatctcgcggctggtttggctggtgcggttagcggctagggttttggttgtttcgtctgatcgatcctccccgattttgcggcggcggtggtgaattggtgtgtgatctgatatggctggcggcggcggtggcgggggaaggggggagggggaggggagggcggcgacggggaagagggagaggatagcaatacggaggatcgacaacctggcggcgaggcaggtgaccttctcgaagcggaggagggggctgttcaagaaggccgaggagctctccatcctctgcgacgccgaggtcgggctcgtcgtcttctccgccaccggcaagctcttccaattcgccagcaccaggtatgcatgtatatacagttatacacacaccaacacatatatgcttctctcttcctcgccggcgtctccttcgctcgctcgcagttatttctgtttaatttgcttgcaattaaatctcgatctgggtgatgatctctctgtcggttcttggaatatcgtactattgttagggctctttgtcgatcgatcagggtttcttttttcttctgaaatttccctaattgatttgccggtaagttacgttcttcatttggcgtgtttaattagtataaaatttatcataataaacataaaattctagtttatcgtgcttctaattgagttgttcagttgaggagttgagattgaggtcatggctttccaatttcggattttcggtcagctcttttttcttggatatactccatatacacaacagtgatagatgtgtatattttttctcatcatcggctctttcaatcttaaaacagttttgtctttggtttatatagaattcgctagtgtgtgtactgtgtaaaattctttcaatcctacaacagttttgtctttgtcttttgctttctctgattctacaaaatgcttttgattgttcggcgctttgattcattttcttctagatgagtaatgtaatatgttcttctagggaatgttctttaattcccaggaaaaaaatgtcccagcttcttaaatagagctctctgtatatgatgttattaattatagctccatagtgcgcttaatttgaaatattgtttagcacttatgtcgtgttctcttctatctttcactcgacccattttttataatgaaaatggttaatttacaccgataggcacacggctatatatatataagcatatatagttttttttttcactcttgaagtcagcaatcttattcagttaatttaagaccgtatggaagagactcggcagagaggggtgttttctctcttttggactggatgaccagagataaatagcagattttcttgggaaaaaaaaactaaagtaggacaggttttgcatgcatgtgtgaaagcactcgtggaaaacttaccctgttctcgcatgatttgatgtgtagttgttatacatatagataaccatatctacattattgcttctggttggatcttctcataaaactgcatctttctccatctttttctacaagctcagtggacttccaagtatcttctctgctaatttcttgacactgccgttctttccacgtttgttacattattgcttttgacatcactattttaattaattagatcttgtagacaacaccctggacgcttatcaggaaacagactatatatcgttcaaagttttttgttgaaattttaacttgtaaaaaccatctggttttagttaatctcatcgatattattttcttcattaaagcaggaataagaaggcatgtagtttgtacatgcatatatatactgaaattcattattacagctttcagagatcagcagcagatttgtcatgacaattacatattcttcatgcgtgagtgatatatatatatatatatatatatatatatatatatatatatatatatatatatatatatatatatatattcaattctgttgcttttgtcacgaatagttgttagttttaaccgagcgtgcttaaactgaccattatttttaagcaacttcaaaataaaaaggtttaagtccaactcattcataaattatttttttattacaaatctaatggtataactttgatgctaaatactaactagatttcttaaaaatattgttggtcaaacatagctaggcaactcaatgaaaactaacaactatttaattcaaattatttttaatggatatggtatatatcggtatacagtctaattaatttgtcaactgaacttgggttactgatggttctaaccattgtgtatacatatatgcaaacaaatttagtcctaattatatgtcgtaacatgagggtacgtactgtgttgatcgttttgtgttatgaactaatcacatggaaagaagtgcatatatatatctaatgtcaagagtgttgttaactgataccccacatatatataccagaatgtttacagtgttaattaacacatggcaaaatcaagcaaaaatacaaccaatctaaacttgttaattgttcaatctttgtattcggggtaactaattaagctagagctgtcaaacgaaacgacctctgatagtagcacacatatatgggattctccaaagtgataggtttgcgactgttaattgtttgttttttttttctccacaagcgacgacagaaaactagctagtcgatctattcttttcatgtacatcacttacactatttgccagtgcatgacatgatctatcagcatgcatggatatagagtgtgcataccaattggcctggtagctagaaaaagattgaccaatccaatcaaatggatccctgagcttacgtaccgctatcagagtttgtccaaatatattttcaattataatatataaaaatataagtagatatttaattttattaaagtactttttaaaactaatctatgttccagtgtttttttaagctaaatatttaaaattgttaaagttctagtcaaacatgataattatggaattagaaggagtacgtacataagagcaagtataataaaactcaagatcgtgcttataagactcaagtgttgtcttttaacagtgttatgttgcatttggtgatgagtgtggggtaagtgaggagagagagaacgaacaatctctcagtataaaaagcagcctctacataatttaaaaagtgcaaatactagtgtgatagtaaacaaataaataacattagagtttgtgtattatggatgagatatattgtactacctttgtctctaaatacaaaagattttgcttatgtagatatatatatgggcaaaatctcttaagatgaaggtagtacacatgttttatatatatatatacacctcctgatcgaatcgatgaggagatatgagggataaaattaaaggcggtagacatctctattattaaacttggctagcactactactagtctacatgtataaacatgaaaccattaatcacacacacagagagataaaagaaaaaaaacaagaaaacaacagaaatgactgcttaaatggagcatatatagaaaaaacataatataattattggaagatagatagatgcaaagaatattttctaaaagattggacctcaagttaaaagttctctaatatccctatgattcgagccaaccataaggaatttcataggaatttggaatgactattccttcgttccgattagacatatatatagggttttctcaactttataaaatttatttaaatttcctttgtttgaaaagagccataagatatagtactagttcatcatgtcataatacataacaagaaccataagatatagtcatgtgtcttcgtcttctagacttctactattcctgctgcctgtgccatgtcatgcatgcatggtccatgcatgaaatattgatggccacagaacaagctacgcgtggcttacctcttcacagaagcaattgtattttcttcttctcgttctctgaaacaatcaatatggtagttcagaacattcatatccttccaatatggtagttcagaagcaattgtattttgaagggcctagaagaactacctaacaatatttggtactactagcatcttgatgaaaacgtttggattcaacattacaaaccttagctagctctacaaacatccaactctgtctaactttgttttctatatatacattgatgaagcatggaacagattattgaccggtacaactcgcattccaagacacttcagagagcagaaccttctcaactcgacttacaagtaagctgaaaatactttcacttgtattacaaaagagaaatgcaacagctatatgtgatgttgatgatcgatataccctctcatatcactcaactttctagaaagaattagtgtggaccttaattaattagtcagttcttaagaaactgttgctagtggtacttctctgaacatttc

SEQ ID NO: 11748 - DNA, 4045 bp, Oryza sativa
cggtagagccacaaaaacacacgattgacagaacagcacccgccgtggcccccagagcagagcagcggcaccgcttcccagcgaatcggcgatagcgagccggcatcgtccgatggtgctttcggccggcggaacacgcgaccaacacagcgtgcaggtaggcaggcagatggtgaatttctttatccacgcaccacgcaccggcacacatgtccgggagacatcatcccgcacacgcatattctcgcctccgcgcgccccgtgcaacgtgctgcatcccagaaaagcagctccagcctcccggatgaaaagctcctcctccccttactactcacttaggctcgtttgaatagcatgattaagaaaaacaagagacatgaaaaacagaagtacaagtatacagaaaattacaaaacgtaggaaaaatatataaatgaccgtttgatcggaccgcaagaaaaatacaggaattagatgagaaaggtaaactcaaaaggaaatttttcaagagattgtagctcttggtaagtttcctctaaaatctatatacgatgaaccagtaagttttctctaaaatctatgtacaatgaaccattccataggagtttcataggatttggaaaacctcaatcttttgaatcaaatgattattaggaaaattcatataggatttaaatcctacgaaattccttcgtaggatttttgattcaaatgggccattgctgataccgtaaagtagtagtaaagctaccgtcaagaatccagcactgcaactagctaagctagtagtagtagctgacgagcaagcaagcaacaaccggacagcggtagtgctgctgctgctagactgctagtgcattggaccggatatgtattactcccagaggagaaagtgatgtttcctttgtttcagctctatcccacaggagaaagtggtcactggaccctcactacttcgccattgatgctcgcccaaccgggagatggctttattatagagtaatcatcgacaaaaaaggccgtcaaccaccggagatgatggcgggaatatgcttcctgccgtggagttcagttcagtcacaactcacataggactacagcctacaggagcgagctgagctgcacttacattgctactactagtatcaatgtatcatgtatacttcctggccgtattggagcgtgccagatcgcatgaactcacacaaccaattcgccgtggtcctcgtctgtgcccagcagcagtgcccaaaaacaacattggtgtgcacttatctcgcgatttgcaagttgaccaaatgaccatcacaactcactagtttgttcgagcacactgacatcgtttttacaccggtggtctgggcatgcggttcccgtggtttcagaccacaactgaattcccgatcttcccagaaaatactgtaactgaccggtgaccggtcagcggtcacagactatgttctggttttatcacaaaagccggatcaatatgatcatcacacagaaaatgagatgtcaaaaccaaacaaaacaaaatatgccatgtgaagacaagtagacaaatcgctcaaacagaatgcggtgaagatatgggaagacagatcggcgagatcttatcatagttgcactttcacagtacacaagtgagtggagcatcagtccctctaggagaaggcagacaaacaagcacatgttgccatgaatgcctcaatcttaaggattggtattaggcatgcaaaaaatttcggggttttattgagtcctttagttgcctctcctaccccgaccgcggaaaccacgcccgccacctcggccaccacctcgtcctcctcccctacctccaccgcccttgaagtggccaccacccttcttgccattggacttattgccaatcttcatgtcctccgggagaggaagtatgctgtcaacgcacttacggaagctgaaatcatcagaggatccatcaactcgtcgaacgaagaaacagcggctctgaaacaccgggtggttgcggatctcaaatgcttcaattcctgctccaattttcctatcggactcagcatggcctttcttcagcaggtcttccaacaccatatgctcatactgcaaaagttaagcgattcagcaaactcaagtgtgacagtagcaatgacaatgcaaaaagtaaagtgacatctggatagtttgaaccagacaaagtacagtacacaagcacataggcatctggaagtcaccacaattgattactgtgaaactatagtcacttccagcaatgagcttatttttctcaagggcaactagagatgagcttattgtggtaacataaacatcccactgacaaatagttttatcttccaattccaaacaacgatgaagtaaaagatgcaaggctcaagtatgcgattattttgatcacatgtagatgaagaatcatagtgtatttctttgtaactcatatatgtgtcagacagttcaatttatgtgcaacatatcataattgcagccttaatccaatacaattttcttataagagtgattagcaaaccacctagagaccttgttcatgtatgacagaaaacaaagtgatctcttttacctctactgttgcatacttgctaaaaacaggtaggaataaaccaacaattttctttgatagagaaaaaaattgctacttatggtctaactcaattttaacagaaaatgttgcgaaacaccaaaggaccatttggaggtcgcaagctaaccagatttaaattgcaagtcataacataacacttcaagttaaacaaacatgcctgaagccccaaatagagtctgttctccttgtggtacaaccatccttaagtaaagaacccagtcccagttcgtcaaacactacatggaagaactcatatggagtcccaacatatgaaggcagtgcagctgaaagagtattaaacgtcatatgctattccgtaaatgaaacttaccatgagaacctaaaagaaaagctaagtgaaagaattatactgtttaagcactaaatcactggtactactgaactcaacccaacatgtccattcacaaagatcattggtttagaagtaaaatcattggtctagaagtacctaatatacatacgaaatgcctaaagcaacctctccaagcttaataacatccttgaccatgacagatcaacccaatgaaactgggggctctacggagtattcaacgccatatgctattctgtaaatgaaacttgcccatgagaacctaaagaaatgctaggtgaaagaaggataatgtttaagtgccaatcactggtgctaacgaactcaacccaacaaagatcattggtttagaagtacctaccatacatacgaaatgcataaagcagcctctccaagcttaaaaacatccttgacagtgacagatcaactcaacgaatctgggggctctatggagtttcatgcaaacttggctaaatacaaggcgaacactcagattatcatgtcgaattatttagccgattggatcaccggtttcaaaggcaaagtactacctaatacgggcaccattatacaccactaaagctaattaaataacctaccagcttatcactacagctacaaggataaaacttttatcataccaaagtttagctacaacaacacacatcgtgacttcgcgagtcatcaataaagcaagaaactttttttcgcggccaaaaacagcgagaggccggccacgattgacaaccgaatcgcaaccctcaccttgttgatctcgagctgcggcgcccacgagtggagcagggcgaagaagtagtcgaacatctcgacgcccgtggcgaactccttgggtcccagcttcaccggcttcgcctcctcttccttcgcgccctcctcttcctcccccttcgcctcatcctccgctcccttcgcctccccctccccctccaccttctgcttcttggccgcagctccctccgccgcctcctcgccagcagcgccggcggcggagtcatccccctcctccctctccctcttctgactcggattcgccg

SEQ ID NO: 11749 - DNA, 14460 bp, Oryza sativa
  unsure (1)..(14460): unsure at all n locations
atatccttgatttgtcttaaattttactatgtttcataaaaccatataacagaaactagttgtcaaatgtgtgttttggaaactgcgttgatggtacaaaatgctactcattttatgacacgagggagtatacccagcaacaactgctaccatatttaccatacacagttgggacaataacaatacactcaagaacagggaactcacagtatcagcaaggtgcattggacagaacattttaatacatggaggtggttccttttttgtttggcatgtgctcaatggtggaagcattctcctatcatacagtcgtgcaaatgcatcactgcataaacatcaagttgtaaagtaatgttattcaggtttagaaagcttagaatggatcaatgtataagagtaagttaggtcaccttccaccaacaaggagctgatggggacgaacagtgctgatatcacaagacttcagtgccaatggctgtctgggaatatcagctaaagatttctttgctccccatcgtagatctagctgccacacagaaaacaaaaatagaaccaagcatgcaacttagcaactataccagtcaattttatagcccgtgtttaccttaatactctatttagttaattatccttacaattccaggattcacaaaaacaaaaggtacagtgcagttaccaagcctagaaggtaaaagtgggagccacaacatgatcatcataaggctgaaatgattgtacaatcatagtccaacaaaaggcagcattatgggttcatccacatggtaataggaaatggtgtacagatcaatccttaaaaagtaaatctcaattgcatgctggctcaagagttcacgaaacaataatgagacaccatttatattttttggtaaatattttcttctagtcattaaggacctccacgtaattatttatagtgctaaagattacaggtagactgcaatatggaatcatacaaggctactgagttgggctcttattagattattcctagtggtaaccaataaatctgtaacagaataacatttaaacgaaataacaaaaatactcccaaaggtaaaatttatcatgatatgaggttattaaggaccaaacaatttatcaacctagacaaagttgcaatgttagacgttattagttgaaccaaattttgtcaaagggtggatgactcacaagcacattacggcattcctgattagtagatcttgcacgaggacaggaactgcactcccgaaaatcatgctgtcttagagttccatcctcacttgcactccagactatattagggttaccaatttcaacctgcatatagcaaacaatacaaaaaattaaataattgaagaccaggcagaggcttataataattgggtagaaatctcaatccacaagaaactagagcacatctatatttgtgtaaagacttaagtgcagagcatcattttctccttctaaatcaagatgatacaatgcaaatataaacttctttcatgctcacttaagtgcagaacatcattcacaaattacaaaagacctatgtcaagatgatgcaatgcaaagataacacttctttcatgctctagagattcaaattccaaaggtcatctcaacatggaatcttacagctaatttcttgatcctccttgagtggcattggtaaactgctgatggttccatagaaatttctacaggcctttttccacttaaacgggacaaattaaaaacacgaacctgcaaaagaatcagcaactctctcagaaaaaggatcctaaaaataactggtaccagaatagcagacagatgagaacaacttctataaagatcatacctctgcatctcctgctcctgagactattacttcatcagatgtttcagggacaaattttgtgcaaaatatgtttgctgaatgacccgtatcaatgtcatgcaacaactctcgattagcataactccagatgccgatctgcaggtagatgttcatacagcacttaactcaatcaagcataaaagtgtctgattttactaatccaagcatatgccaaagaaaagagaaagccagccacagaggttactaactacaaactcgtgtcgcctgctgagcaacaccccttttgcaacaaaattgtctaatacagttcatataataattccctatagttacagcttaacaaatagtttaacttgatagaaataaaggaagacaaatcattgcaaacctcttatgtttgacaaacaactaaagagttcatgtgctaccatattctttgagccgaaaaggtctactagatgatgattaccatagcaatttagccatataaaggtggcacgacagggcattcagaagccagagagagagagagagagagagagagagagagagaaggggtgcaaatatctcaaaacaatgtttaacatagtgttggggagaattagagttcaagtgctaactactgaagataacatgacacaagaataaagaatctagcaaagtcagacccaaccatacttaattttagaaacttactctagtgtcatctgaacctgatagcagaagtgagccctttgaattccatgcaatagcattgacacaacctaggtgaccctgttatatagcatggagaaaacagagacggtcaatgtaaaaaaagcaagagaactctagcactttttcttttgaacagctatacaatttccaatacaggaacaacaagagggccaagtgccaaatgtccttgtgtgaaaatcagtagaacaagaagaaaaaagtagtcgtgtacctccatttccttctccaaagcaagcctttgtactagagaagaatggaattgcactctcttattaatgtcctggaaaagaagtcgttactagcttctaaacattttagctacaggcctacaacacatatagtgataccatgatcaacatatgcatcacgcatcacaaaatgcaagaccaaagaagaaacattattaatgcaagaggccaagtgccaaaagctgggttgaaggtcctcaacttctccaccgggtcgcctccatgtttttcacctctgttcacccctattatacatcgactcactggcaggtcattcaccttagaacttctcatctatcctaaattctcaaccaacggaagaagcaatcaagtgcactcatagcagatgcagattacaacaactcgagcaattgatagcccaaaccccttcccctgacgctacggatttaattcgcgcaacaagctaccaaaacaacagaaggctcaaacagccacggatattacccccaatccataaacccttgaaactctcaaacgggtcgaggaacatagctccaaaaaaacgcgaacctagagctccagcctccagccctcgcgaacataccacaaaacacctcgccacgcgttcctactcgaccgattcgtccgcccccgcgaacccctccaccgcacagagcaccccccaacgaatcgacccccaattcgccccgtaccaaaaagctatccacaaatgcaacgaaccctagcacgcgataggggagggggagaggcgtcccgggccatcccgagggtgaggagggggggggggtgcttacagcggtgccgtggagacttcgggcttgcaggaggtcggtgacgccgccgtccgagaagcgccaccgcgccttctccgccgccgcgtggtccatctccatctccgtcgaccggcgatctagcaggggaagaaggccagacctcgcagcctcttcgccgccgccggctgcgcgcgcgcccccgatcgccgtgggcggttttggggacgcttctggaagctttttgcgcctttcagcttccaaggtacggaatgggggtggaggtgtgcggggtcagtgttccagagagagagagatggagagaggggaaggagggagccagggaggtgttgcttttgcctcgctggcgtgggggtgtggggcccactgacgcgtggagcgagaggatggatagacgtggcctgtcaggtggggccagactatcgcacggtcgcaccagtgctaatccttctttttcattgtgaaattagccagccgaggaatggcttttcgccaaattcttttgaaattctttaggattttctcaagatatgggaatttaaaacaattttaacatgggatttaacctgttttgacgaatttcgttgtgcctctcttttctgatttctgaatttttatgtgattaatccagacgattgtttctagagtttcctggtatttttctaatcatagaatttattatagtaaaacgcacttgaatcctactttttttttctttatgcgtttctaatgaatccttagtatctcaactttaaaccatcggttattagcttattattattagtttttcatcttttaaaactgcttcatatttcatatttcatatttatattttattctgatcccaagccgggatggtgtttttgcattttagttagcaatttaaaattaatcatagggtgcgtgagagaagaggaaaaatgagacaaggtaggtatactaggctgtaataatttctttgtgcttttgtttattatttattaatcatatattgatgccatcaccatttttgtccatgtgtactccacgtagggacatcacatagtcgaaaatcaccttggtttgggttcagaaacgaaatgtaaaaggtgaccaatagtgaaccatgtcatagttaaggggcggaaatcggatcaaggtcataattataagagaccaaatatagtctttccttaattgattacagtagtaaggttctgatatcaattgtaattattaaaacctgtctggctctgctgcaaattataatccaaaactgatttgaattttagaagtaaacttaaaggttttctacatcccttctattgcttctgttttcatgataactaatccagacttcgtggtacttccagaggtagcgacagccgacagaactacaaaaaaggcagaaggcaacctggtaaaagaaacggtgacgacctctagaagggagaagaatggcttggctcaatcaaaagcattagaccaactcattgcaaacaaattaagcaaacagctgcatgaggaacactatcccttgatttatctcacttcaaaacttctctatttgattctggttctgcagatatgtacagggcaatgggctttttcagtagttcagttgcgacactgataagttaatacaaaggtaatgtacacaacgaaacatcgagatgaggggagagacacctcgccctttttacaacgggagaagcaaaagcatctacaaagggaaccacctggtcacattgccaatctacctgcaaaattgtgttgtaacgccgaatcgaatattacctctgttccatgagtttaagttttcgccagctcaggctgtcaggtggtgagggtatgttcttaatatcttgatcgtgttccaccatcatgattgaaattcagcacaggggtctaccgaactatcaatttcctcagctttctttccactagtaaatgcctttgaatgaatatctcaagctatgcacgtgcttctacaaaggcaagcttaatgccaaggtctcagtttcttcagagtcgatgctgtatgacagcctctggaaagcagttgcaaatgccctgtatgaccattagagtcagtaatgaagtctgcggttggttcttggtaatgcactctaggtaaaaagattaccacttagaagttagaactcaacttacatgttatgacggtataagtacaacagttactcatttgaatagctgtcggcgaagtctttaattcttctcttgatagtctgggggaggacaggaaatagaaacaaaatcagcatggatacgtcagaaacccaagtaaaaacaaatcaacacaaaggcaaatggcagagttaactaccgaaggacacacacctgcaactcttcgtgaagcagtgaaaagaccttcttcatcaatttatgcctctgtaggatatatggtccacaatcaaaccaggataaactttatattaatagtaaagtatcaaataaaatttcagtagatgatacattcttgatcaattgcctccccaatctaactaaaagtttaatatcaaactgcgatgcaaggagaaatttgaacatggatatgcgaagtggaaggggtaacccctttcaaattggtggagaagaataaattgaagttaggcatgtactaacaataattgagctgtaatgattatatagggaaaggcaggaagaagacatactgtgcccgattcatgatacatgtctctgattctttccataatgttataatacagatccttatctctttctttagcgacattaagatcctcctgaacctttaggaattcagatctgtacaaaaaatatgtcagttacagaaggagattacatgaacaattgaacagacaacaatggagtactgagggtacttaaaataagaaaatttacacctaagaaaataatattacgggactttaaaataagaaaattattgcataccgagttttctcaatctgaatgtttaagtaggagtaaactttgtatttctcagtgtactcctgaacataatctttgtatctgaaaaagaagataatatgttagttttttattcacaaacaacaaaagaaacaaaatttcaaaaatcacacattacttattggcatggagtatctacaacggtttacggtatgcgatttagacaaaattatccattacttattggcatggagtatctctagaatgcatattcgacaaaataacactgctcaaatgcgaaattaatcgtaccacctataaacctgtacaattccagacaacagatatgatgggtcactggtcgtaagcagtctgaaacagtcagtaaaatattcatatggacctcaaatatcaccagtaaagttcaaagaaggaaacttaatggacaatggatgtgggctatagaccaggtaatccatcatttgaatacgaaatttcatggtttggcattctaacatcctaggcatagaggaactgcttcaatccatttttggttgttaaacaaaattcaagtaataatactggcaaaataattataataaaaacaacagcgggaaggatattgtaacttactgtgagaaatcttttattggacctttcagttctggttcctctttatcatactttgagaagaataaattatcttcatctgaagaactgtcccttctctttctacttgcatcattctcaatcaaagagttgttcctacttctttcctcattttctgctggggaaattgatttctgtgttctagagcctatggcattcctactaccattctgaggaagcttgggggtagttttccctatcttctttggacctacttgatctagcattccaacctgaacccttgtttcccttttcccgggtttttctcctggctgatctggatgtaatatgaccacaggaactggattatcaggttttgacaattgctgactttgtggaacatttcctctttgttgaggcctattattatcaaaatcatatccagatgccttcttggggaatccttcctgatttatattacctccaataccaaattctcgaggtgatggtttcctctgatcttgagaagaggatagagaaccctttctgtttgccatactgggaatggagtatcacattagctaatttaccatcaagtgattttgaagaactatttctttcaaattgcttctttgccctcccagtctcattttccagagaagcctcacgaaattcacccaactcgagatctgaaagctctctctggagcactttttttccatgaggtgaactctcggcattatttctttgcaaatttgatggctgaccattactttcattggaatcaggaaacggcataacaccatcatatccaacatttcctttagcacttttagctgaaaccatggaattcacgtcaatgttagcatctttggaacgactgagcattttatcctcaacttgggttcccccatatctagctttttttcttgtggcagaatcatcagagtcatcaaaattggcatatgggtcttcagcgtgcgaaactcttccaaggttaccatccaaactattccaaggcttctgaaccttatctgcctttttcttagaaattgacttctcaaccttatcttgtgttctctcagagtgcattgcttggttaagtacatttgggctttgatttatcttttgcaaatttccagaagccaaatgtcttactttcacagcagggctgctatcatgtgcatgaagatcactatgtgcatcccagctaacattccctgtctccttactcagcttctcattcacatgtttgtcaagaggtaaagtttgtctctgttctgataatgaactagtagttcctaaataatcagccttggcccttttggcacttccagacattacactcgagttctcattggcagagcatcttttcaacttgggtttggcacctttctcgttgatcctatcctgaccatgatttgatccatcctttgatactgactttctcctactgccatgatgttttgtagattggctggtttcttccttgggtaggttttcactacttggtgctaaagggtcaccaaaaaggtcctcataagacatttcatttgcagcgtacttgctatcaattctactaggatctatgctggtatttaccatgttcttgcttccaggaatttctggtggcttctctaagtggctcgcatcgaagctatcagttggtacagctgtgtatgctgactcattattgttgtcattaaaattgttcaaatcaatgtgtggggatgcgctcttataatccagatttgttccaatatctattagctcatcatcgccatctagtgcagtcaaatctcttggcaatgaagataatttaagttcatctgctgcttttctgtgtgctcctcctttatcatcatcacttgtaatatccacaaatgcatctgatccttccttgctgcttgaagaagcatcactgtcactgtcactactgctcccactgccacttgcagcgcttctgctttggctcccactgtcacttccactgtcactgctttcactgtcactatcactaccgcttccactctcactagatgagccagctttaccatcactgtcattattgactttttcatctcgggcagcagaaactggggagcctccaatgtcaatcctctcaaatatatcaggatcatccatttttaagcttggaccagcttcctcagtgttgtcatcaatagatctgttacatacatcaacagatgactgttaaggtgcttgggagagataattacaaaaacacaggaaaaataattgaacaaaactaaggagaaatcttcattaaaacaatacccatttgtcacagtaaaacaaggaattgaatttgtaggagaaaaaaaatttacattccactgcaaggtgcataccttttagagctttctgcctctaatccaggtttgagcaaatacctccctggcgcttggaaaattgcaatctgcaaggataatagtgtattaggtatgcaacataacatagagctgatgtttcgttaatggagaagatgtagtggtgagtaatgtactaatgtttgccactcacattcttgatgatactatctattttctttgaagcattcggaaatacatctgcaacagctttctccaggccctgcatatatttcaacaaatgttgtaaatgataattgctcatggagcaaacctttcttaattaagtaaacatgtatacaaaaccaagacatctatctggctatgaatattcaagaatatgatgtacagaaatgagaccaagaactatgaaatttaaaaagatcgaccaataaattaaaatgccacttaaagcttcaaagaactgaagctatcactaatagggggaaggggggcgctttattttactagtgatacccatataagtttggaaaaatccgcttgactcaatttttcaaccacgtataaaaccatttaatcttcacgcttccaattctcaacaccatttgaaaaataccctcatagaccaaagggagtcaccatggcactgagtgatggggtcaccagcaatggtgtcatcttacccaaggatcaccaccaaaattacctctttgaacatcccatcgccatctgtgtgtgattggagacttggaataacgattaaaaatggcatgagtatgtaacaaatgaaccatatggaagcatgagctattcacagcatccctgctacccactacaaaactgcatctgtgtgctacaacagtagcagcggtggcatgtagcaagtcaccacagagccacaattgtgcataacactatgcacgcaccacacacacacacagggggagagagagagagtacctttaaattcattccttttggattttctgaaagtacagatatcaagagacttcgcagctcatttgtattatcatcagtacttgcagaaacaacacttgctcgacgacttgttccttgagacaccctatttggggttgatttctcgactttactattttcatctttattcaaatcgaatggtgttatgacttcattatttacatctgatccggtaggaactgaaggaatgctcggtccaggttgctcaggagaaagcgctggtgaagtggagaaatttgcttttggtacactattagacagcttcactttggaaactgatttggttggagcaataacagcagctggagtaggccaatggaaaacatatgccgttaaatatttgctaatgcaaggttttcttagcggaagaacatgcgtagatgtaaaaagaaataaaacaatacaaatgagagggtcaaacaagactcaaacctggattcttcttgtaaaattctttcttctgcttccagttcatcctccgcatattacctgaaagagataatacattagattatatagcccaagatctaacaaaaagtttaggcattacagactctaattaactttaggcaaagaacagaaaacaagttcagagccattgtaggctcatagctgttgcacctaaagatataaaggatatttacaccgtacagaatactgatccagtgcaagtaattgagctcagttatatactgatgtgtacaaaatagttatatatacatatttcaaatacaaatgcaaaattgaggtagaaaatgaaatcataatccatggtgaaaaggaaacaaataatagttcaaagcaagatctaacaaaaagtttaggcattacagactctaattaactttaggcaaagaacagaaaacaagttcagaaccattgttggctcatagctgttgcacctaaagatataaaggatatttacaccatacagaatactgatccagtgcaagtaattgagctcagttatatactgatgtgtacaaaatagttatatatacatatttcaaatacatatgcaaaataaaggtagaaaatgaaatcataatccatggtgaaaaggaaacaaataatagttcaaagcacaaaccttcaacagcagcagcagccattgacttggcctgactcttaacagatggatttgcagggtccagcacaatcgatctataacaggcaaaatcacaacatgttaaaaccatacataaaatcataaaacagaaactttgagggaaaaatctatttatcgggtgatcattaatcagtagaccaagagagttattgaacagggaaagcagacaaactttcgagattttgagagacgctcagcctcctctgagcgcattttcacaaggttctttgctgattcatccaaaatacgctgcacattcaccttgcgccacgcagagccacattcaagaagcaatccatttccatcctctccactctgacgttcttcataaatatcacataattcaccacgttcagaagcccatgtaaatttaaattctttgccaccaacatctataatctggtaggaaaagaacctgtcaatactcaactcaacaaatgaaatgggcaacactatttgccatattgaagctattttactcgatacattaatttagttgggctaatctagtactccctccaggctgataatacttgtcgttttagacaacggtgaggaaaaactttagaatctttgattatgaatcatttttaaaatatttgtctttcaaatatggtgactacatgtatatattagtcttaaaaagtactttaataagatcatatatttgttaacacttctatacatattataatgaaaaataatggtcaaagttgttttttttagaaaccgtgtccttgtccaaaacgacaagtattatcaacccggagggagtattgttaaaaaccatacaacggttgcaaaactcactagcgattaccttagtattccctttgtatgcaggaaataaacatgcatccatttcatgaaacatgaatcacattgtgctagtgccaaattagtgaaccagtatcttctcaaccaactttcaaagcctaaaagggtataactattttgaaatagaaatagctaacaaatgtaaaaccataagcttatcttgtcaaaacaagacaaagatagcaaaagaaattattgatgtatccaagcagcatgctggattttttttttagaaaacaaagcaaaacagttgaactaggatccataaatgtcagtgatgagacgtaaagctacagtttcactggagtaacatgtcatgtgaacaagaaagttaggaacacaaagggtcttgacaggaaaggagatttggagttttggagttcctatttgagattagtgaaccctactggagccaaatacatagttgggtgattctacgcttctttagtacaaaaccaagtaaatggttttgaagaaaagaaatatatataactgctcattagaaattaaacaaaaaataataatttgatatacccaaaaaacaatcaaagaccatagataaaagatgtacatgagctttatatgccattcctagcagctaacggttacaaaagtagggcccaacaatgcaattccacaaaattaatacttccgcatggatcatcattcccaaagaactttgagcaaccataaacagcataaaatatccaaattcatcctagccaaatagtggaagcctcaaataatgatttgctcacagtgatctgaccaaagaaatgcaaaatacacaaacaaaactccttgccattggtgcatataccaaaagaaatcatacggtttattcccatcaagccaaggagacatgtgcccaagtaaaaccaaactaaaacatgaactgccaatttataaaatcactcaataatgaacaggcaggggctggatttgaacaatcctatacaaaacttgaaggtaaaatgaatggcatatcgacaggaccagaataagcaatggacgagctcacactcaagagagtaccatataacatcacaagtgaaatttaagtatttaacgatcctaacaacatttgggataacacagcatcatgccaaaacgattcagagcatctcaagcaccaggcagtaaaattgagcaaatataaatgcaaattacacagtgaactaacctaaactcaggaacgatgttacaggaaaaccaaaaactggtattccagatgaaaataatctcgagttatgaacttaagacacatatgccataacaagcaaaatttagaaatcagttaggttttaacttcagaagaaactcgcggggacagaacttgacgacggagtgagatggagggagggaggggagggaagctcacgttctccgaggagttgtacatgttagggttgaacttgatgcgagcgccgctgcccgattcctcggcacgccggatctcgtcgacgaggtcaggggtcagccttatgattgccgcgaaggccggcgggccactggactccaggctgaacgactcctcccgcccggccgcctgcgccgccgcggccgccgccacggccgccgagcttgtacatcgtcccccgcggcaagcggcgccgccggcggggagggggggggtcctttggggctcgaaggcggagagtagcgaagacgccgaagaggagggcgcagaaatcgtataagttttccttttgtatttttcccgtttttagtttggattttggagtattttttattttctatttgtgttttgttgtttgggttggatccccttttccgtttataagttcaagcacaatagtaccaactagtattaccaattgtaaactttgacaggaccaaaagggaaatcactcgcagtaagttaaattaccatagagaaatcacggttgcacgacactcttcaccccttgaacacaaaccatacgacacatatactccctccttccctagatgtttgacgacgttgacttttttaaatatgtttgaccgntcgtnttattca

SEQ ID NO: 11750 - DNA, 3757 bp, Oryza sativa
ctgttatgctgtcctcagttttctgcatatgctccaatatatagaagttttacaaaaatcatgtatctgaacatttagtttatcacatccacatgtatcttgaatagcatgggattacatccactacgcatgttttccaccactaccattagtacactatgtatatttcttgaactaattaccatctattaatagtgatgtccaagatagtagatagcagagttatgcacattgtagcaccagagcggtatgtggccttgaaagcagccttgagatttgagaatggtttaacaattcaaaaaagataaacacctcttagagtggatcttctcttccatttgtactctggagcaatgcatcttagagtggagcttctgtcaagttcatccatttggactttggagcaatgcccaaaagtctgtgtggggcagttccctttaacctgaggcctattgcttgtttagaattttacagttttatagaagtgattaaattatattccacaaaataaaaagaaaaaaataaagaggaaacgactgcactggagtacactaagagctgtgtgcatgatgtactgtaacaaaaataattatttgtgacctttgctcatgcagatcagcaaccagaagaagaaaacaggtgttatcgctcctaagcgtttcatacaacgactgaagaaacaaaatgagatttttcgcagctatatgcaccaggtaacattttttgaatggtgcatttgccaatgtttattctgtggttttaagcaaaaatgtgatcacgctatgatctcttgctctggcccttaggattaagtcagttggccccaggcggatttctgcacaatttgttgttgtgacttgtgaacaactctgtggtctgtgcatttcttcttgatgttttgtaggatagatgtgtagcattaaatccattgtatctatattaattatttacaataagcagcttactctagattgacagaacctaaaaataagtaggagggatacctactacaagcctatcttaggtgcttctacaaacttctttttaccgggcccggctgaatgaggtgctcctacaaactgagaatatgaatgttggatgtgatatgtatgcagtagactttacatgtactttaggttctggatgaatgaacatattccattaaccccctcgcatactgagaggtcatgtgtaagtgtaagggataacaccgccttgagtctatctaaatctggtattccccaaaaaagagtatatctaaatctgaccatcttgatatccctcatagaccacatgtgaatttgcaagatagcacttaagatgtatctacataaggatgagatactataaatggcaaactgttaatggtgtagaattggcttggtcccagtccttttattcagagtccatctttattttgtttagttgtcaatagcatcctgagttgtttggctaacttaagcattgtagaatacctataatatatgtgtatttatgccaattctatggtactttactatttttgtggatattatctttttgatctatatactcgggagctcaccatggactgaaaatactatttgtattttacaggatgcacatgaatttctgaattttttgcttaatgagctagttgacatcctagagaaagaatctaaagttgttgcagaaccttgtgaaaattcctctttgaaaaagaattcaaacgggcctataaatgttcaactcaatggtactaaaaaagaaccagttcctactttggtccacaaatgcttccaggtgagtttctatccgtttctgccaatatgtttttttgcatgtgcaagtgcactccaattttagtgcttgctacagtattggagatgagccctcttgttcttttcttttttggtagggcatattgactaatgaaacaagatgtctaagatgtgagactgtgactgatagagatgaaacgttttttgacctaagtctggatattgaacagaatagttcaattaccagctgtcttaaaaacttcagctcgactgagactctgaatgctgaggataagttcttctgtgacaaatgctgcaggtatgtcagtccctttgattttgtgttgctttctcatgtggtatcaatgtcatctagttgattcaattcagctgcatctgaactctaatcgtcagttattatctcttcctattttgcttgacaaaccaaacactagcacctgaagcgtctgggttaggaaatgtagcatgacttgaatgttaacgaaaactatgcgttttcctatcgtttgtcatattgactgtgatggaaattgttcgtaatttcagtttgcaagaagcacagaaaagaatgaagataaagaaaccaccaaacattcttgtaattcatctcaagcgcttcaagtatattgaacagcttggtcgctacaaaaagctatcatatcgagttgttttccctctggagcttaaacttatcaatactgttgacaactcagacttggaatattccctttttgctgtgctagttcatgttggaagtggaccaaatcatggccactatatcagcttagtgaagagccacaaccactggttgttcttcgacgacgagaatgttgagatgactgatgagtccatggtacagacattctttggctcagcacaagagttcagtggtaacactgataacggctacatactcttctatgaaagccttgctgaaaaaagttgatgtctctctcacatttttcgatagttatacagttatcattttattaccacactgcctgcacctgataatatagaagattcagtaattagaataagttgaatgaaagaccattcaactttagatattatatggtggaatctgcggtaggcaataaaagaaaatgacgagttttgtggaaggtgctatagcggcataaatccacaggtttcttgttttctgtttatttttctgttctttggtttatgcgtacaggttgtaccaatcctgggataatgtttatttaaagtttaccatgtataaaaatatgcttgtactggaagccgtttggctctgagtatttttttttttgtttagaaacataaagctgatatgcatggtattctccgtcatctttcttttctgactgcttttgcatattcgtttaccgttgtactgctttactccttcctctgtatttggccctcaccataagttttttgaagtctaaattcggagcagtttcatttttttaaaggaataagttcactttatatttcttaatttgtcgttgtctgaaatcattacatgaactgcaataccaaatataatgtgtacctaaactctggtgtatccgaggtcctagaaagtataatattggttttggttgacatggcaagtgaactcatgtgggcccacatatcagctggcaactcttatttataggagagtggtggggagaagggtggccactgatttggagaggggcggcaaccgacgggagggcgcaagcgagtggccactgatttgtagaggggcggcaaccgacgggagggcgcaagcggggtgtagcggggagaaggacaatcgtcgacttggagagaggcggagtcacggaggagccatcagacccggctcttcgtcactcactatcgcccagctcctctctcgccggccgctcgaggagccatgagaacaaggcttgtgtcgcctattgtcgcgtaactcctctctcgccggctaccagccttctccccgtcggtcgccgcgttga

SEQ ID NO: 11751 - DNA, 4075 bp, Oryza sativa
aaagctgaaatgcatattgccgcaagcagaacgcaacctgatagtgtagctcaagtgctcaactgaatcgattagagatgctccaagcctccaactcagcaacatatgtaagcaactaagcactaagtataataaaccatcaagaatgcaaaatcaataagttacaacacacgtcttaaataattaaatatggtcatgtcatatggcagggcgaggtgttccgataaatcaattgaataaatctatatactctgatgtacccactaaattccgcttgttgggataagcctactgttcaatgctcatccttctaatgtgcctatctatctttgactaagatcacaatttcactttaacactggaacatctacataactctctacaggccaccatgctactcaacaaattttcttggttccatcatcggatggaaaatctttattgctttcttcatcagatggaggtggcacaccaaatacccagtcaaggacattcaggtacttggaccgaaaaacttctctttcttgagcatagcagtgcatgatgatcgacgtagccatactgaataccaccacgtcggctcgttttatctgcagaattggagggcaaagtcctgcatcggtcatgcatgtgaaaaaactctcaatagctctcgcgaagcagtacagggctatctcgattcgcctgctcttcttctcaattagcagtgccagacctgtgggaaactgttgaaagagaatggttcaatagtccaaagctgattattatatactgaattcatgcgtctgcatttgcttaccgtggcaagtacaacgagtggagtattgcagctctggaagattctgaaaagcaggcacgtccatgccctgaaacagagaaggaaacatccagaattgtcatcccaagagaaaattgtactatctagatgtctactctaagaagataaactcaccatgcagaggcacagtacactgagaggaacaggcttgatctcgctgttcctagaagattcttccctattattgggtaaggcctgcatgttatgaggaatatagcacatttagagaaatcgggcctgttgcaaaaactagactaggcagcatgatagcttgcatagatagacagagtttacactatcaagggtactctttctaaacaggtcaaacttatctgacactgttattcttacatgcaccgcaattacccttgagatatcaagctcaattgatgaagtgtacttgtaagaccaaataccttttcaataaatcctgtcgatgaactacaagtgcaggaactaaatagaccggaacatagacaggtactgctcttccatatgcttgaaacaagaatgtaataaaatgccctgcacatgattgatttccatgcacaatctggattaaagagagaatacattagatcatggaaattttcaggttaacagacaggatgatgcgcgtgcacacacaaaaaacaaaaagaatttttttacataaaattgatgtatggattatatgcgtgaatgttgatacatgtaaaatatgatatgaacatgattcaaccataaggaacaacatgatactaagacatttgattatttgttgcacttaccgagcaagggactttcatatttggatctaactttaggtcaacacccacagacttgtagtacttctcaatacccgctaggttagagaaagcagtgtgattgactacttctttcacaccttgcagaatagtaagatccttcccaccatgcttatttagaaatgctttataagttgatggcaaactttcttgacttaaaatataggcagatctacataagaaaaaaatattaggcaaaagttaccctcacacactaccaaacatgcaccacaaaatggtgaacagcatatatacatggtactgaccgaaacccatgtgactcatgttatatttgataatataacagatcaattaataaattgtcatagcaagataataaggaattactaatgatcaagaaatcctagcgaattcttcattatataacagtctcaaataatgcattctttatatccatattaaaaaaatccagactaaaggattttagaccatttaaaaaacaaactacattctgttatcacatttcgtacagatgctatactaatttcaagctttgtactatgtactgtatatgagtatctcgtccaaggctccaagcaactccatccaatggatagctgtcagtacattgagttattgacaataggatctaagcaaaatccaaacatacgacatgcacaactactaccttctacagcctagatattcatagcaaatatgagagaacttacaaaatttgtgcagatgaaaggcacataaggaagatgtcaccatgcgaccaagtcaaaggcttgcaaatatttccaaatcttttgctctttattccacaacgggatgcaaggacagctgcacgcataagaatgtatattgccaagctagtatgttgtgtgcctggccctgtcaagagcatcgaaggaccagcaattaacccagccaataatgatctccaccttgctgttctgaagtagcaagagtatccagttatacattttcaattaaatactgaatggaaaaacaggggtagtacagtataatggaacagcacacattctgaggtgtaatgctgaattaagaagaaaaatacagccattcagcagtttgctgaatttgtattcagtgaaggctgacagaacgccaagcaacactggaacattttaaccaaaggcaaagccaatgtcccgttataatatatttgctcaaattatcgcagatttggtaacccatcatctgatctagatactagtagatgctatcatgcaaatttggcagcacagttcaccaccggccatcaccaaagctctcatgtttcctagcgaataacaaggagaggcagaggagtactaatttcaagcaactgcagggcttcagccagctgacctcttacggccccagatgccggcgatgcactcgtcgacggagacgtagcttccggcgaaggtccccaggaacaagccgtacctcaccgtctccttcagcgctagcaccaccgcctcctcgttggtcatggcgcccaccttcctgcacgcaccgcgccacaggaaaccgtaagtcacataagcagccacttcagctggggacagcggcaaagcgaaagcgaacgccgacctcgatctgggggaccggcgccggctgcggaggcggacgagcacggagaagagcgcgaggccgcccttgaggcccgcgccgatggtgaagcccttcgccgccgcctccacgcaccgccgcagccaccggagctcgccctccaccgccgccggcacggcggggaggtagtggccggcgcgcggggtgccccccggcgaggccgcggcgcacccgccgttggcagcgcatttgagttcctccggcgaggtgggggccatgagttcgccggagatgggatccccctccgcggagtaaagaggaagatgcctgcctctgcaactgcaactgcaacgctatgtggcccctgggcgcaagtcgcgagcgcaacgtgtggagaattcgccgaaatagtagtggctgctttgtgggccccaccaccctaactggacgtttacctctcaatctaacgctgcaggctgcagccacgagtccatgaccatgactgtcttgttcaacttcagcctgctaatttagtattttcttttcttgtttttcttaatattattttgagaattttattttccttgatgtaagttatatatatatatatatatatatatatatatatatatatatatatatatatatatatatatatatgatatatataggatatcttcgttaaaagaactcaaaatgacatttctgttctatagagaaggatttcgagtagaagatactacgaggattatgaggtagcaccaccgatttagtgtatggtgctttctataatcaataatatatgatgttttagaaaaaaaatctataggtttgtttggtttaataccctaccaaaaaattggtagtgccaggcattattatcttt

SEQ ID NO: 11752 - DNA, 2040 bp, Oryza sativa
gcagcagtgaaaaaaggaagtacccttaccggttccatcccctgcaagcattttaatcaaccttccagttcgtttctcccatatgaaccatctaccatcatcacttccgctagcaataaactcccctgttgtaagagaaacgcagcatagatgtgtttacgttattaaaatgaaccattttattccatggattttagaactcaaattaacccaagtgattctgtgtaacagttttagtcagttttacgtaaaatctaaaatttagtaagcactaaaaaggttcataattccatgtaacaaactccacaaggaaatatagccttcaggacaggggagaggagatgaagtgtctgataatctaatgttaagtcaatatgcaaagtagtatgttttaattaaaggtcagtgtatttctgttactagaaaatttgtcattaaaaatgcaagtggctcatggaaggacaaatacttcaagtaccactaagcaggaacgcaagaaggaacagcctaaccttgttcaccgagaaagctagcttgctttatatctgtccccacattgcagtgtgcaacatatctttgcttcatgtcaacggcaacttctggctgcattatataatgggaagatgatgttaaatccatgtaatatcagtggaatacatatatgaacagaaaaatatcccatattaggaacttcagacaaagcggtggcagaaaagaacaaacctgataggcagaatcaccattctgagtggactcagctgatccattttcaccagaatgttcgtcagtttgactatctcttctgtgaaatcttaaacttaaactaccccggacaaaacctggatcactatcacggctttcatcacctgatgctgatgtttcaaagtccaactccatttcatcatcataatctgaatcttctcgaccctcctgtgatgacgagccactggcatctgatctaaacagtagatcacttaatgagcgtaaccgcccatgtcgtgcatcagtgtaggtattccctacttgatcctttttattcttctcaagttcagctgttcgaacaaaataaacccatcatatattttggaagttacaatcagtaaaccaacataataatgcatctggtgcatcaatgcaaccaccaagccttaaatctgcaatacaggtcaattttagtttatgtgtttttttgtgagttgcgacttcatgacaacaactatctaacatgggggattaatagagggtaacttagctcagtgcaggcatgggaaccaatttcttcgtaactatttcacattatgttgtgtgtgggaaaaaaattgcctgtgtccgatatactatgtgctaacctgcaaaaagctgctcctttatattttccacttgcttcactgactgagaataaggtggaacaatagtatttaatgcatccacatattcagatgcctctttcagccttcctaactacaaattcccaacacatgttcgtaagagaaaaatgaaaatcaactgatttcagcacttcatttcaaagggcattagtcaatccatgtttctatgaattactcagcttacctgtaatagtgcttctgccatatacagatgcgcctgaaatgatctggaatctatacaccttgcactgttgcaatcccttatagccatgtatacatcatttttccacctcctctgtagatcaatatttaatgatccgtacgttttacacagatcagattttcaacaacagataaacaaaagcaggcaaacctttagatacaatcctgcccgagtacacaagcaatcatgcttcatgttatcatcaatattatggtccactgccagaagtattgtagagcatgcttcaaccccaagcatcaagttagtgcccatctcaagagattttgttgcaacttgcataagtttcttgaacgtatctacctgaaacgggtgccattaaaggcaaagcggttcaacatgtccagcagatcaagcaaacagtgtggtctgaattgcagagagagagagagagagcacaactcaccctac

SEQ ID NO: 11753 - DNA, 6151 bp, Oryza sativa
  unsure (1)..(6151): unsure at all n locations
gccgccgccgtcgatctgctgctggcagctggatcgccgccggccgctgctctggcgccggtggcggcctcgccatcgagctcgaggcgaaganggagccgccgccgccgccgtcgcttccttgatccgccctcaggcaccagttgcacgtgccgtacgactctgccttggggtatcgctccgagcagtatctggcagtatcatacatgcgtatatacagatcagtttagctgtaaatacgtggaaaatgattgcgtgatctacgttattgcatgcatgtacgtttcagatagacactgacatgcaacacaagtatatatatgtacatccatgcacggagataaacgaaccaacacaacaaaactggcgaatcctgaattatacttatgtctcgatcaatattcatgcgtctttttcagaaaaagaaaagaactcttcatcaatttgtcaagataagatcgatgcatgcgttcattatatttatagttatccatatactatacagttagagctagcgatcaagcaagtacaataatgctttaaatcaacatttatgcccataatttttctttaatcacgcagatgtttcaacaatattcatatggcctagctgacatgcgcagccactgtcaagcgctaggggaaagagaaagaaagcagaattaattaacaaagatcgaactatttgcagacagtgaccgtgttatgtactatatatttcagccacgaacgccctactttgaatcaatttgtttgacaatttcgcgcggatcgcgcgaaaagtcagacaaaattagctggaaggcgcgctaaaagttactactcggagacacgcgcgcacgtcaaaagcgcacgaactgtggcttgtcatcgatcagctacatgccagtcaataatcttataatcacagctaattcgatcactagctacggtctggggccaatccatgtagatggattagtcattagttgagaggaatgtgttacatgtgtagcagtgttgagcagttgtggttcagagatcgatgcatgatcaattgaaactattgaagtggttgcatgctcgaactgtgtggtgcacatgcatatgtacgtcagtggattattccgatggcgaaaaaattaaacaatctgcatcgtgtgccagtttgctattgatctgaatagttagtttctcagataaacaatccacgatggctattaacctatgaactcatccaattaagagtatcagttcatgtaaatcttacagttaatttatatagaagaatatattgattccaaattaaactgattctatcctgatctgagtatgtgcccagaaatccaaatgaatcaatctagcatgtctctcatattgggttgggggaggtgtcaaaaattattttcgttaaggaaaaaaaacacccaaatctgcagttgcggacgaacacgaacaaattaacaaatgaattttgacgagagagcaaaacatacgtacgtgtgctgggagcggacggcgcaggcggcgcagcggaacagctccggcaggaggccacggtcgccgcacatgcagcacacggccgccgtggcggcggcaaccggccgcggcggcgacgacgacgatccggcggctgacttgtcaatccccatatatatctcggcagatcgatcgatgaatcgggcggctatctcaagcgcatcgattggtaaagctgccgcatgagatcgatcgatcgatgggatgggatgggattgggaatggatcggatcgaaacttcaaaagggagcagattggttgctgatggcgaagtcgaagtcgaatgtggtttgggaagaggaggaattggaggtggtaatgcggcgcctgccgacttcacgcatctcaagatcttgtagaaggaaggaaggaagctgccctcctttaattttgtcctcctcctgctgctgctgctgccatggctgtaaagatttgctgcagtttttttttatatttttagtttctgagatggcttttgcgttttggaccctgaagtttgtggctttatgttacaagttcttttgttggcctcccaagaaaaagatcttctcttgtactatgaagcaattgaggcatgtagtttatttgtacgatgaatatcgaatggctaagaataggtgatgaatctaagggactggctgttcagattgatgttattttcaaccataccattttatagtaaaattgtcaaaaaaatgtctacgtttagtttattgccaaatttgataaataaataagaaattctgccaaaaatttagcaatattgttaacttgccagattttagctacaatctaaacagaccctaagacttaataatcctagtactagtaggctcgccggtgagccacaacattatgaatatttgcggtgcctggcatgccacacacatgcttatgtctaggcattagaaaaattccttagttcatcaatgtcttaagtttaaatctaatttaagtatttttctttggtcctatgtgtacaaattgtatttaaataatataaggtgggtatatagctctaacttataaacttttcagtcttaatcattatgcacacgtgtttatttgaaaaggtgttatagttttagtcttttttattagatgcacaaattttaattgtcgaaacacaacaatgaaacaaaataaccacccacgctcatgtgcaatttcaatacgattttcatgatgcgcacgtatttaatatgtagcctttgagaccgatgagaagtgattgttgttgctacaattgccgctaccgcccaataccacaattgctaattgaaagtatgtatcgctgcaatagctacagctgcaaccacaacaatcagatccgattaagctctttatttgttgagtatatactcgaatatatattaaaatatatattcatgacatgtgtaagtggcagccgtgtacccaatgctttatctctgtcttagtgaatcttgattcgacgtcttctaggtaaaaaaaaaataaacaaagcgtgcaagacaatagacatgtcggctagaggctacataccaaaataccacatatgacagggttcagaacgcaaaaataactggagtgaaaaaataattcgagaggcaccaacaggtccctttcatggcaaaactgtagatagtgagacatcaaggggcaaaccctttcccccgaggaataatagcgcagctgggcggatggacttcgttggacggccgtgcggacgcaggggcccacttcgacgctccctccacctaccacccacccactgacacgtggggcccacataaaaccccaggcccacctatcagtcacgggcctcgcggggaagcgaccaccaaatccgccggtggcatcgggccgtaaattcacgggaagcgcgggggttgattgggccggaagcgggccttggtcggcggtttgaccctgcatgccgcgctggccaatgggagaccggcagcgatggcgtggggcccacgtgccgtggcgggtaggtactttggcgcatgtggacgggggaggccgatggatggatcgggccctgcgagcgagccgacaaggcaacggaaatctcgtgtggttttcgcggctaaattgaagtacactctcgtgtggttgattatgttttttgattagagcgattttttggattaggatgccgtcatgctgcgtggctgcgtgcgagcgtgtgcgtgcatggggtttagcgtttcgagaggttaggatttgatcggctctgtggaacgttgtagagatcgggtgcgtgacgtggtgatggtggtggtggtggccggtcttatcctaggtaggtagctggccgagaacgcggcttgtagtctctgaattagcgccttaagatatgctcgtatgctaccgatagctacataattttattagtgtgaagtacatatgtcccaacattagaaaaattgataataaagttatatctacaggtggacgggattctccggataaaagttcttacctaagacttgatgggcgacggcggcctgtgatatctatgaagacgtcgtataggagatcatgttgatttccttgctcgcctccattcagggtggtgtgtggcgacgttcttagatgttctcgtcgggttacatgagaagcgagtagatcttctctctcgcccttctctctacaacgtccaaaagtttgaaagcaatattatgctgtttgaaagcaatattatgctggagaagagcgaggcgataggtatgttcctcttcgaagggctgacgacgatcgggtacgcttagcgatgatcggttagcattagtcctatcctcaattccgttattggagtcgccaacgtgtaatggtgtgtttttctttctttctttcctgatcgtagcctcccagataataatcttcgtatttctccttgctatatcagcatgaaactttgcactatcttaggtgatggttgtttcaatatatatatatatatatatatatatatatatatatatatatatatatatatatatatatatatatatagtagtttcgttgagcctcttggcttctgggatgaacctgttgcattattaaggaccaagtggcggctcgatgaacaacgttgccattcatccgcgagtaccacatctccagctgcatcttttttattacggaatacatagacgcaagcatacacccacattattacaatcaaagaaaggcaatatgaagattcacgtagggccaagtccagtttttacaagtcaattgctgaaccatttgggagcggacgcatgcaagggcaactgaacacaaccggtcacggccacacaaaaagttgtgctagtgtagggaaatatatcctatacgcaataccggataatacgggaaccgaagcttcccgacctgaaatggcgttgccctccgggccaaagagaggaacattatggcttaagcctctgctatggctcttcgattgtttgcctccctacaatctgtacaagggaatggatatacattgcgtaccagagatcaatcattatacccaaccagcaggcaacagcatttagctgtttattctcatctcaagcaacaacacgcctgcttagacaccgcataaggaggtgtgccaacattaatcaataatgcaagcctaaaactgcagcaaggccttgcagtttcactcctatcaaaacatgaacagcttatctcttggatgaagtcaccttccatgcatttccttctttttcccgtaagctgggatggaaaagtaaaccaaatcccaaaatcaggtaactaccaatagaagcatatgtactatgcagcaagacaaaaggcaaaggtttgacataactgcctaactgtatccaaacatatatagaacttgtgtttgagcacctatgctgtaaagtatttaggatgccctaaaatatccagtgaacacaggtacctcagcaaaacttaagcaataggaaatcagctctgtgcacactccaaaggatgtaaacttccttcaccaaactcatgcattcgaaatcgttccaaaaattcgaaaggtctgcacagagaatataacagtttatgaatgataagggaaagaaaataataagggcaaatatcatgcatgttaaggcaaccggactggtttctctctaattggattacctcttagtataataaaaataaagtggaactgtttcaagattcactaagcttgagtaaactggaagcaactaataaagcaatttattaactgcatgtgacagattgacaacacactatggtaacacaaatagactcattcgaagaataatctgacagccatattttttttaatagcatgacgccaaacacctttagtgataacttgatcctaaacagcaaagtatggtttgatgccaagcaattggtcatgttagttatggcttacagcaaaatttcacggttccgggagagcttcctctgattgttttctatgacacttgatacatcaatttcgggtccagcaatcatagatgtagcgttcgcatccggtgtccataactaataaagaaacagataaaatcaaattgcattcaagtacttcaagtaaaatcattaaaatatttctaaaaatatcagattacttacctttattgtgttatctataccacttgttgcaacagcacagtca

SEQ ID NO: 11754 - DNA, 2020 bp, Oryza sativa
  unsure (1)..(2020): unsure at all n locations
cagtttactgataaaattgataaacacatctttatggccatgttctggtgcatatcatagattttataatgcttgagactaaccctgaaatctagggcatgaatgtaaatggtgatgtccttgtaaaaaccatgaatttcctggacatgataagcatgttttatctgtatttatggtataagtttttttttttttgctgttatcaggaagtgaaccatgggttcatctgtctcaaagcaagacgacgacaccgcattactgatctgcaaggatcggttgagacacattgaacaagcaattgatgcaaggtatgccctttcagctgctcaacttgcatacgagcaatctctccgcagtcttggcattgctctaaggcagtttgtggaggcacacaaggatgatgatgatatagagaggtctcctagttcttcttatgctatagtatcatcatcgccacctcaccgttccgatgttaaccatatgaagtcagaggcaagcacttctgtgacagtgacaatcaacacaagtcaggctagctctgttcagaaggagcagtcggttactgctttccttccaccaccgctgcagctagagttttgctcctcatgggatttctttgatccaactgttgttagtgaaaatgttgcatcagatgcctcagtgaacagccaaacatttgaattgagaacgttggaagatctgagcaatccaaatgaaatgggtttggcttcttcaattggaaacacaagtgaaattgttgaggtgcaagaagtgtttggtgcacctggatggaaacaggttcacaaaaatgataaccttcctgacttgcaccactctaattctaatgaaattcagatgtctggtactcatttacccaatgactcaagcttggaggaagagctcgagcaagtacagacgcaggctataggagggcagaattctaatgatgttagtgataatattaaaagtgaggccaaccatataaatgttaatgctcccaaaaatgaagaagccaaggccattttcatcactgactctgactcatccaaagattttctttcctgtgtgaaagatcttgaacgtcagttttctagggcagctgtatcctgccatgaggtctcgaggatgcttgagacgaagaagatccgccttagcatttcttcccagacaaaaggttaggacaacattttcatgatggtagtgtcctcgtgttttttttttctacttaacattggtgctaatttctcgaataaactttgaatagcaggaaaatcatcagatgtgctttttcgaccaacatttctcatcggttgcaaagccggaactgcagcatctgatggtatatttatcttctgcagacaaatactganatttgtgaacttcggtgtagtttatactccaacaatgtcagcctcattttgatgtttattgcaaaaatatcattcattcttttactgcaggatcagagaagcgtgtcacaaaagcaatcacttggaatcgctcactttcatcgcgatcatcagcatctaagaacccacttactccagctcaaatggacgatgaattttcagagatctgtagtgactttgttgaagagttttgtatgatttcaggaagccatgcatcctctttagatagactctacgcttgggaaatgaagctatataatgagttaaaggtgagctcatatgtgctcttcaatcgatgcttataagagaattgcactggcaatggatcttttacagcatctgtgtagaaccatgggattctgcttgtcttgtgttttattagaaatgtatcaaaacagattgtattatagttgttaccactattgtcaacaattcctaatgcaaatatacattaacgcaaagtcgcaaactcatacagaaaaggtaaatgtatgaaaaaaaatctttgacgcattagtatctgccttattatgtaacgcacagtccagatttggcaaaatagcatgcataactacttttaaggattaaataattataatcattctatgtat

SEQ ID NO: 11755 - DNA, 11006 bp, Oryza sativa
actcaactgcatgtgcagttaagtgagaggatctgcctccaaccacaaggatccaaaattatcaccaccttctacatgcgcaaacaggttcctcgatccatctgatctgagtcgcatccaattttggcgccaacacatgcaacttcctccctttttccccatggattaatgttacctcggtgaagcagcgatccgattaaactaaactaatttgcagccatgtacattaacgaacactccatttcaccggtccaccatgcatgcaccacccgccaccaccgcggcgcgacgccgacggcgacataaacaatcacacagaaccgcgtgacgccgccggccggctatatataccgtcctcatctgacctgctgccatcggctgcgaagatttcttggtcagttcagttgagttcaaccatgaacaccgccgtcgaggttaggtgcgccgccgccggcggcggcggggtgaatgctgcagcgtttggccggaggatgatgaggccggcgccggcgggacactgcagggtgatcagggcggcggcgacgtcgacggtggcgagcgggaggggggaggacgactactacaaggtgctgtcgctggacagggcgggggaggtgggcgcggaggagatccggcgggcgtaccggcggctggcgctgcggtaccacccggacgcttgcccgccgtcgcgccgcgccgagtccacgcgcctcttcctccagctccgccgcgcctacgagacgctgtccgacccggcgctccgggtcaggtacgacgccgagctgatgatgcgcgtgcggcggccggcgaggccggcggcggaggaggacgcgtcgtcgtcgtcgtcgtcgttggcgagggacgtctgggaggcgcagctgcgcacgctgcgcgcgcgctccgacgagcggcggcggcatggcgcggacgggacggctagacgcggccgttggttcgaggtgtgagctgtgacgagatcgatttctggtgttcttgacttggctcgatcgagcgtctgctggtggttgccgtttttgatattttcaattctttggctgtcattgtgagattattatttgttccggtggcatctctttttttactgtggcgtttgagagcgtgttgtgtgtaagatcaacgtgtgttttgattattattctgtgatgaacaattggcatttgtgattattggttttgatatttggagattatcgtcgaagtggttttggagataatcaattttcaggagatgaacagggtttactggtttgtcgggaccggtcagaccgggcggtggttgccggtcagaccggcttgtgttgagcggtcagaccggccggcccacggtctgaccggccgacgctgtgtcggtttcggtttcggattgtttctttggatatccgtgattgtttcatggttatggcttctagatggatactatacgtatgtgatactgttgttttgctactaatgagtcaagttggtgatagcttggtctcggaatatggtttttttgtttgtttcatgtgtaggtgactcgatgcctcgagagagtatttgcactgatggaccgggagtcggcttggtggtaagacaatgtccgtggtggtcagatatcatgcgggatactaaggctagagttgatgcacgtggttgatggagattccatatggcatacgatggaggtattgtgtgcgtatgggatacggagtcgaatttggaaggagtccaaatttggtatgattggttatgtagagtttgtttcttgtactaagaggtttcctatggggattaggactcttagtatgagtttggttcgtggctttaggttgcttacctcatgtataaatagagggggagcgtgaggcttcccggtatctttttggtatcgcttttcatagcgttgtgttttagggtttcgagtttagtcgagatttttgtaaggagtgctgttgttgcacgttgtaaacatagagagaagtaataaagttgtcatctacttttgagagttcttcgatttgtgtttcatcgggtacggcagtctaaccggcaactcaacggcggtccgaccggcgacaagcagcggttagaccggcggcatacgggcggtcagaccggcggcggcgacagcaagcggcagctgatcccggcggtcagactggagattgaatctcggtcagaccgacggcaaccaggcggtcagaccggtgcatctacttcggttagaccgcgatccatcgatttcgagggtaacttttatttccgctaaaagttttcggtttttgcgtataccaaccattcacacccctccccctctggttggcttagttcttgtgattcgatcctacattgtgcactgtaaactgtaaaacttttccaattctgcaaaagttacgtgtaaaccatatgaaattaggtggtgtttgaaactcatatagatgaatataaagataaaggttaagtgttttacgcaaatcaatatggtattaacgtataattagttgagttttaattattacaaacttgaaaaatatttatctaatatttagagaaacttccatatagaaagttttcgcacgaaacacatcgtttagcagtttgaaaaatatgtcgtgaatactccctccatttaatattataagttgttttaaactttgttaagtttgatcaagtttataaaaaaattaacaacatctaaaatatcaaatttgtttcattaaatttaacattgaattcgtgttgaaaatactactatatttttttataaacttgattaaatttaaagaaatttgattaagaaaaatatcaaaatgatttataatatgaaacggagggagtacaacacagcgtccggcaaaaaggaatggattggacagtaatattttgagatattatggatgtatcccagagattttagggagtgctgtctgtgataacattgaggttggctcaagtgcaccatacagtaaagaaaacgggcaaagcagagacaagcctaattctatcaaaaacttgtgaaaaatttgaatatacagatggacaagcaagttcaaccctggtccttgaagtttcttggtcatgtgtgaaaaattgatgcaatgaacacaacacagattttaagatatggatacccaaagcgatgaaatttgtgaatagacgaaacaagatggagagctagctcccatcctcacttcactagactagctcacggactacaccctccgtctaaaaaattagattttagctataaatctgaatatgtgtttattcaaattcatatttaggagttaggttttttttgaaggagaaaaaaagaaaggttgaaacttgtgcaaacatgtcgcctaccgagctaaccgattaatcatcatcatggataatcatatgtacaggcccaaagtgtggaagcacgggcttggtgcttcttgcacatccactcatcttcaaaaaagctggatctatcagaccagtgatttatctagtaaaaccaaaccagtctagttaattgtatcgaaagatcggatctgcattcaaactgtttagaaccagctgaaccgggcagttttgaggtgatcgaacaaccaccgataatactaggtagtttgtttgtggtgggttatccaaaggccagttcttccattatggcccatatcatcttgtatttttgaaataaaaaatacttgacaaatattggttgtgtatatagaaaacttataatatacacatttagtggaccacgatgcaaccacccgatcaccagctagaccgttggactggtgaaccaacaggttagctaatgttgatattttcttttacattgcatggaagaaacactcacaactatgcacgctcgccacactcgtcactcgttaaggtgccctataacacatgtttgaagagaaagaagtcagcggcaaaattaatccctaatcttattaaaatcttattgaaaatacgtcgagcgtacatgatttttggtgtgcaccaagacttaaactcttgtgtgtacatgatctttaatttcttccgtaaatccgtctatgttcttttggaattggggatgtttgatttgaacagatcacaatgagaatgcaaagaggtgtttcaccctactttcaatcaccgatcgatttcacacactagctaaatactgactgatcaggaagaatgggatgatcctaatctgctagctttgcgtggcgcctgatctttagactcagtttgcactcatcttatcagcttcttattaatatccacacaaaatgcttattattacctcatctgaaccgtgggtttggaaatccctgttctaaactttgtgggggcatgttcaattatagactctagtataaacctacagtacgaggttatttaaaaaccatgtctatacaacagtcaaaaggaaaaaagactctaaccattaactaaaaaaaaaatttgttgttatctttttttcactcatataaccttgtttccattttatggaggctaagtagatgttgagttcgctgttaacccaacaatgatgttttgtctctcatgtttctctcttctaaatctaaataaatattcttaataattagtaaaactaaaagtcatctattaatgatgattgtacataccctgataaataagtagcgaccaactttccatcagataagtctagcgaaagacgaccttttcactctcagtactccagctaattaaattcatacatacatggtataaacacagctttccttctgcaaaagccaagttggcacagatcgaaaagatgaacctgtttccttctctagttcacactcgttttcacgaatatggtgacgctgccatccagacaaacggccatcgtcggcttgacaagctgatgaacacccaacatcgccatctcctgcacaattgccacacagctatagcctgtttgagagggagtaagaataggagatgaagagtttgagaggataagtcatacggattatatacggtacatcaaattttaatcctggtttgtgataccaaccggtcccggttgttaacacaaaacgggactaaagatttgaactttagttccggttggagttaccaactgggactaaagatcccggaggggcctgacagcccctgacagcatgtgaaccgggggtaaagatcaaccaggactaaaggttatatagccccgtccttcttataaaccgggactaaaaaccatctttagtcctggtttaccgggattattgtggtttttggccgaccagacaaagatggtttctcaagtagtgctagctctaatgctcgatttctttctgcatcttctcctatacctcgctagccgctacgaataatcgggcagtcagcctcgtcgtgagatggaatcgagttttgaaacagatggttgcagaaaagttgagatgaaagttcatttgtttaagagagggatcgtcccaaattaaggaaaacgaagtcgcgggaactcgcggtggctgagcttgcaagggaggatatattctccctcgatcccttttgcttttgctcatcgcttttagaaggcgaaattccaaagcgtgtctagccctgaaatgtataaatcctactcgcgtctcgcttgcgattaattcaccatcgatcgcttttgagttcagtggtagtagctgataagttgtgttcttctaattccctgatcaaaatggcctcgattagagattttgccaagagatatgaagctgactgcagacacctcaaccaattcttttctggtacatatcaactgatgatatcagcaccgccatcttgtctcatgctagcatcaagaacagttcatcagtttcttttttcagagatttgaacagtttatcagaacaatctgtttacattttattctgtatcaatttctgtttcactgcactgttcaatgttcatacatgtttctgccatacgttttctttctaacacgactcaaacatggtgtcatgtcactgacatctccaaatccgtaatttaaccctttgttaacctttttttgacaaatctctgttagcttcattccttgccagagattaaccacgattgattatcacaaaatctgcaggaaatgtttccccgaacaatgcgagaccggtcctggagatcttcaccgcaaggagcagccaggagatgaagcaaatctgcagggcttacagcagcatgtatcgccaagatctcatccagctactgtcgcagcagaagaccacctttgcagtaatcccagcttctgatcctcttgtgtcaaaacatatttcaatcttgtctggttcgatcgccatcgtgcgccatgctagctgatgcacgcaaaaaattaatggtgcagagggtggcgtgcctcagagctagcgagccgtgcgtccgcgacgcagacatcgccagggacgcgctgttcgggcggcggatcgacggcgacgtgctcgtcgaggtcgtgtgcacgcggccctccggcgaggtcgcgctgatcaggcaggcgtaccaggcccggtacagcgccagcctcgaacgcgacgtctcgtcgaggacaagcggcagcctcaacgaggtgagagctgcgccgatcgcttgatcagattccgtttatctcgtgttcgatcgattggtgtgtgtatgtttgataggttcttctcgcgttcttgggatcgagcgggagcggctaccatggcggccgggtggacgcgacgatggcgatgtgcgacgccaagacgctgtacgaggcggtggagatcagcgcggcgcgggtggaccagaggagcgtcctgcagctgctgcgccaccggagcggcgaccagctcagggcggtgctcgcgtcgtacaggcggctgtacgggcaggagctcgcgcgggcgctgaagaggaaggacggcgacaccagcggcggcggcggtggccggcgaggcgagtcgtcgtcgttcccgggcatcctccgcgcggcgctgcggtgcgcgcagctccccgagaggcacttcgcgagggcggtgcgcgcggcgctggagcgcggcgagggaggcgctggtgcggaccgtcgtgacgcgcgcgggcgtcgacgtgcgccgcgtcaaccaggcgttcgcggccaagaccgggtggacgctggagagcgtcgtccggaacgagttcggcagcggcggcaccgggaagtcggacgacggcttgaccggcgacttgctcgtggagttgctcaagttggcctgaggacaagagattgagattttctgcagttactgtaccgtgcctttgtcactaacatacgggtccgatgatcttcgagcccacatatcagtgataaaggcacggtgcagtcgactgcacatgatcataatccgaggagagattgagatcctctacagttattgcaccgtgtttttgtcactgacatgaagtccaccctcactagcgggcaccaagcctcttgtctctcgagccgtcagatgatcgatcagctgcgaggatccatcacaatcttccattcttcctgcatgtagtggagattgcaactgatacatctcacgtttgtcaagagttagatttgttactgtattttggtgataaatataatgaaataatgaggcgaagaattatactgttatgtacacacagctatacatgcaaaccacatcaatgttcacaccagctacagttgacaaccatttacaactgctgcaaccacagcagctgtggctggaggcctgaacacactctatgagtgtgcctctaaaacaagcataaatagattgtttttccctattaagtttatgttcaaaaaaaatagagatatctctccaaaatgacaatggtttgttatgcttaaggctatcactggatttagtggagctacatgcacaggtgtaaatattttatgtttaaggtaaaggtttggtgcaacttgtaaaacttttaaaccatcaattttgtattagaataaattaattatatcatgatagttctttcaagacaaatatacccataccattccttttattctttttaaagctaattaaacatttgataacattgagtagttaaagttttagaagtttgaccaaatatatcctaatcatcaaatgtttataattggagagagaggaagggggaggagaaagaaacatggatgttaagcttaatatcaaccatgattgctatctcacgcgtacgcgccagcttgccagctgtgcccgcctcctagcgctctttctttttttctgattttctttcctatttttctgttacacgtttatcccatatcacggaaaaaagtttctttttttatttttcttttcttttctggaaactatcatgtgtgtttctttttcctttttttctgactaaaacaaacttttaagtaagatttgaaatcttctcaacttatattcgaaaattttcaattcaagatttaaaagcttaaacatatatttaaaatcattcaatatagatttgaaaattttcaagtttgaaaacttttaagtaaagattgaaatctttcaacttagatttgaaaattttcaagtcaagattgaaaactttcaactaagatttaaaaactttcaactcagatttgaaaacttccaagtttaaatttgaaactttaaacttagactcgaaaactttcagctcggatttgaaaatttttaaatcaagatttaaaactttcaattcggatttgaaaactttcaactgaagatttgaaacttttaactcaaatttaaaaactttcaagtcaaaattcaaaatattcaacttaaatttttaaaactttcaactcaaattcaaaaccttgaactgaaattggaggtgaaatattcaatttataaaatatagcatgaaaaaaatcgcacaagcacgtgaagaaaatatggggagcgattaaaaaaagcgtaaaccggaaaaaaaagcgaaaaaaaggaaaaactctcaggctatcgcgtctgcgcgtgcgtgggccttggcggcgtcgtaccggggctagcccgtgcgtgggctttggcagcgtctgcgccggcaacgcggttgcgctaattagttgcgccctatcaactcgtagccttgataaaataaaattttgctacatgaggatgaagaaaagaaaagaaagataatataggttatattgttagattaataattagagtcttctttgtagaagctaggtattttgttgaagagagtgactggaaggaaattcatatggtgaaccatgtaaacaatcattcaacgtgctaatttccaattgcatttatttatttatacgaaggcattgtttgattgttacaaaagatctgtttataacttcaggtttagaaaaaaaatgttaccaccctaatcccttgtaaattgtgttcagctactatttttggagttcttttagtgttgggtttggtttacactttggtgttcgccatagatacaaatttgcgctagatccaccattgcatatagtcaccacagtttaaatatgtaattgtaatcttcacagtaaaatgaaatgtttaaatttgaaggatactaaattgatactaagctagtatcaacttagatcctatttggcacaactccaaatcccatatccattgaatgtaaaaaaaaaatcccatatccacactagatctggagtttgaaagttaagctacaatggtttaaagtttctctaaaataggaacaaaataattcatccaaatgttatcaatgcagtcatgactctatatccatagatttctatgactaaatactcaactccaaatggatttggtcctatgtcaaaaaggaccttaatgaaatagatgcccaaattgaatccaagagaacttaaacttgaggtggtggagaacagaaatgaacctctcaccaagttttataatggaaacatgagggaatatacaaactatcggtggtagcaattagcaaataaatgatgcatatgcagggtaggaaacttcattaactccatacgaaacttgtgtttataaagaaaacatttagttgtacgcaactatggaattttcataatgttttcatagttatgaggaaacatgaggaaaattgcaaaatatttgtggtagcagataaacacatgcatactagggaaattcattaactccatgagcagtgcatcccctataaagaaaacatttaatttcatataacgggttttataaatgttaattagtagcttgaattttttgttgcgaaactgagctcgatggtaacacaatttaaaaaagaactacaattatcagtactgaatatatgtaaaaagatgtttactcctaaagaggggcatttaactatttgccacatttaagatgtggtaattaaagatttgccactcgtagtttatgacgtatgggtgttttctacaagtggcaattaaggatcttacaagtgacttgtaagagtgataaatagttaaatatctcctaaagaaaagcgcgagaagatggaaacaacggaaatgctaatatgcatgcaagggcaagctgagcaagttgcgagaatggggcaccctatttccggccatggccatcttcttatctattatatcctctcatacccccaaccaaccacatgcccacatcggggaagaagcgacaagaaattgagacgacggcgttgcacactgtaccaccactacttggcgccaacaacctcctaaaaaacgctagtgagcttgacctttacattgccaatgatccttgtcatcaacaccatgcctttcctccacattcctcatcctatccccactcccacagccaacgacgtcacctttatcatctggttgcacaaccgcctaccctaactagttggcggttgtgcttgtgttccccggttgctaaccctaccctccgccctctctcgatccccgcggcttcaatagcgtcgcctaagcctcactgcccacccatgactactaccttcctagctattcttagcctagaaacttaaaacccctcttcctctttccaacgctccttccctcgcttatctcactccata

SEQ ID NO: 11756 - DNA, 631 bp, Oryza sativa
tccaaagacctttattttcatattgactttggactgccatatccattcgatagtaggtgggggagtgagagccagaaaactgagcttgtaacagagtcgcgaagtgaatttccctgatccccaaacgaatgtccatgaatcatcaacctcctgaagggtaaaggaatggagattttcttgcatgtccttatatttatcaaacgcttgttgcgaaaggggaaggaaaaattgatcttgggggtctcttgataagtgttgtgcaatagattcatttccgtgctttgcgaaggagtataaacggggatatttgactgaacgtattactccctcccataaatcatcccaaaaaagaacagctgtcccagagcctattattggttttgcaatgcttctaaacaatataacatactgaaagatgtccctccaccaaaacgaaccacaacttctcacagtctgaggaactgcgtacttgtaataagaggaccaaataagatttacccaaggtacctgagttttgttgtaaaatttgtgcaaatgtttcataagtagggctctattttggattctcaaatcaatcactccaagccctcctttatcctttgggcgacagactttagaccaagctgctaaa

SEQ ID NO: 11757 - DNA, 974 bp, Oryza sativa
ggcgtcatctattaaaaaacggagggagtattaccaattcactgccagatcaagaacattatttcacagctttggtttaatatgtcaactgcaaataattgaaacaaataagtaccaagagtcaagaagtatacccccaagacaatgggcagctacactagtttgttgatgatttagaagctttctggatctccaaagttatcgcctcagcaagatcagatgcctcatactctgctccaaagcatcgtgctgtctccaagcatggatctagcaagtacctgtatatttatacagtcaagtgcctgacacattacaacaaggcaagctatatagaataataccgtgcgtgcttacatgttatgagagctttctacaagatagtcctgaccaatgtcatcaacctttttgaagaaaacacggtattcctgtgcaatctgtcttactgcattgatggatcccgttagtcctattattcttgggtcaaactctgccgttcaaagaaacaaactaatcattcccaaatacagtgaatttgaaggttccaatagcatgaaaaatagagagcaacttaccactaagatatgccttaagctgagcaggtgaatcacgttgaggatcaattgtgataaagagtggtgtaatcttggtgccatattttgactctatgaaacgacaaattaagaactgtaagaaaaggaagatcacaaatgtaatacaaacaacagagttcagataaatctaattattataaggaaattatagcatacataaaaattaatattttatagggagaactactaccaatttaaaaagcccagctaacagaatctacatcagtgaaagctcaatgctttcgtgactctcagtaagccacgtaagcagataatctccagccatttgatgcaaacagaaggaaatataaaccgccagattggacaaagacactagcgaattggtcaaattggcatggatgt

SEQ ID NO: 11758 - DNA, 27433 bp, Oryza sativa
  unsure (1)..(27433): unsure at all n locations
gaaagtatatttaacaataaatcacatgatatgaaaggaataaatattacttaaatttttgaataaaacgaatggtcaaacacgtactaaaaagtcaacggtgttaaacattttgaaacggagagagtatatatgtatctatgttcattaacatcaatatgaatatggaaaatgctagaatgacttatattgtgaaacgggggaagtatttatatataaaatagcttactaaatattatagataaataagcttatgcatgaggccatgacatgtatggttcctgggttcttgtttattgttgcatatggtacttaaattattgcatttagcttcatattcactctgtttaaatagataatagttgacttttcaacacacgtttaattatgcgtcttattagagtaattcatgtaaatgtaaaagatataaatcatacttaaaatacttttattgataaaacaactcacgacatgataaatgataaatacatattttttaaaacaaaataagatgaatagttgtgtgttcaaaagtcaaatggtatcatctacttaaaaaaacagaggtagtataatttttcacatggtttatacaactttctgttgctggctgtcatctagtttaatctatttatcagccacttagccgtgagagtaggcggacgcagctttaaaatatagatgggacaaagaatgaagatgcttaatcgataagagaaatcgaacacaacatatatcatatttatagttaaattgcataattgcctcgaccattgtttgtggcgtgcatacgtcgtgaagatacagactaatctattggacgtttacaccttgttatacctaatttttatggctaatgactaatataaggggtagggagggtcatgggtgtgaagcgacacgagtcgtaaatgagacagtcaacccaccctgcctaatgggtagatccgcccctaaagagtagtacgagtgaattatttagacatattctatcatcagttaggcccctttcgtttggaccggttgcttcgataacttctgtagcacgttttttaaatcgtttatataagaaattttttaaaaaataaatctattttataaatttaattgtaacaacgccttgggctgtgtttaattagaggcgttaggaacccctcccttcacacgtaaaatagagcgacgaattaacatacgattaattaagtattagcttaaaaagttttaaaatagactaatatgatttttatagaaacttttggaaaaacatatcatttagcaatttgaaaaacgtgtgttcagaaaatgagagagatgaggttggaaacattgagggaggaacacaacccaaatagtttcaacgccacaaaaaagttctaatcctacataagggtttgcattatcctataacttcactttaaacctgctcatggtgttctttaggagttatagaaaccttccaaccccacctttggattgttgcacaactctactttaaactcctctcttaatatattgcctctgagatacgatataggattgggtgacaaagtgaaggagaaaagtgagagatgatgaaccattcgaaattaagagatactccctccgtccaaaaaaacgaatctatgactgaatatgacgcatcctacaaaaacgaatctgtataaaaatatatccagatttattctactaggatatatcacatcaagtggtaggttggtttttatgtgacggaggaagtaacctccacataaactcggaagaacaatgtgtaactggatatgacagattttatggtaggaaacttttattttaacgcgattttaactattagaacacgataatatcatctttagggacaaaatacccctaaatattcgtgattttaaatctagaacacggtaaaaaataaaaatcaatctttagagacaaaatgattttaactatatatagaacacgataaaaatcataaaaatcaatctttagggacaaaatatggttatttgctggttaactttagtgtcctatatttaaaatcatgaaattgcagtgctcacttgctcttataagttgctactcgattaattcttagctgctaccaaacgtacctaatactaactaattattaattaataatgcgctaatcttttctgaagagttaggcaccaaacataccctaatactcgatcaatattgattgattatatccgtaatactcaatttattattgattaattatacgctaatgacccgttctttttttcagccgtcaatagctagagttgtgtgattcaaacgcaagcggccttaatttaatccgcttttaatttaggatatcagtcacaactcacaaatgtaaaaccagtaactaattaaacaccgattcatgaatattattagaagcagaacaagaaacactatgaccaagcattagtacctgatcatgcatctaacagtacagatcaacttgttaaactctatatcattaacctaatcctccgcttaattacctattaataatctctctctctctctcggttcacttttgggaacattaacacaaagcctcagatcaggagttccacacgcgcccaccgtgttgcccagcttcttcggccggccgccgcaccaccgcctcgcggcgccgccgccgccgccgcccatgatgccgccgcctctcaggccggcggcgtcgctcgccccgtcgcgcgtcctcttctccggcgccggcagcttccgccccctgaccgcctggacgaccctgagcagcagcattacgccctccacgttgaggctccaccacccgggcccgccggcgccgccgcccgccctccgcgccgcctcccgccgcggcgacgtacggctcgtctcgatggcctccagaaggtcggacacgaccgacttgctcggcagcgccgccgccgagccaccggcgccggcgctggtcccggcggcattattggcggcagcgccgccggcggcggcggcgagggtgatcatcaggtggcgcgcgggctggagcgcgccggcgaggagggagcggctgagcagcttgacgaccgccgacgtgcgtacggcgcgctccagctggctcgcgagtccgacaacggcgccggcgccggcgcgttcggccgccgcgtcggcggtggcctggccggcgccggcgggcggcgaggtgggcttcttcagacgctgtatcctgccgtgggcgcgcacccacgggttggagtgttggttcatatcgccgccggcttcgtcttcacctgaacgaaacatcgagaacaaaacgaagaaattaatcaggactcgacacgtctcactgcaacagtgttaaaactaatcagcaagttttaatagcatgggggcaattgcatctgtgcactcactttcgaagccaattgttgttttacccccactttttagggcttgcagttttacccccacattttaaatctaaatcagccatgtacccctatttctaacggccgattttaacggtgctagttgttaaaaaaaaggacatttatatcctggatggttattgtatttttgccctatttttttcagttttgcgtgattttgctcctaatttgtgatttcagcttgtgtgatgagcattttgaccaaatataagcatctcttgtgatgttttttactttaacaaaaaagaatcacaaatataggcaattacaaaatttaaacaaaaatcccaaatactagccttcatggtcaatgctctagaccttgtgaggtgctgagagatgatagccttcatggtcaatgctctagaccttgtgaggtgctgagagatgatagccttcatggtcaatgctctagaccttgtgaggtgctgagagatgagagtcatgttaggcatcttggagtaagggtgtgtttggttgcaagctacactttgccacagtttgcaacgcctaaggttagacagatttgacaggtgtttggttgtagccacagttgtggcaagattcccctccaacaaattgggtcccacgtgtcaatggctcaaaaaagtgtggcaagattcccttagacttagtaagttgtggctaacaatttgatcacctcaccttaggtaaggtgtgacaacttttgttggcaagtaatggtaaagtgtggctgggaaccaaacagcccctaagtatcaaacagattcgtagcacccgagcttggcagcgcaaggcttgccggatccagcggacgaagagccgctcccttccaggcactaacctcaggaaatacatgtagaaatggcagtgattcagaggcgcgttgtagctgcggagcgtgaaaacgcgatccacgaagctgatgaacctgtccaactcctgataaccccaccaatcgatggagaggcccggtgcttcctcccagtggtggagccaacgacgggcgagcacgcacgtcgccaccgcctcgtgcgccgggagcagcaacagcacgaggcggagcacctcgtccggcagggcgctgatgcggtctggcggcacctcgtgcgtgtgggtggaagcgcggcgccgccgccgcctccgcctccgcctccgcgcacacacgcggccgccgccgccgccgcgcaaggaccaatccggtgggagaggagagctggttggatgtttatcgattccctcgaggatagaacggtaaattgatatttcataaatcattttttttatttctatttgtttttctaaaaaaatgtgggaccaacctaacggtgttaaaactgaggacgttttaaaaaaatgggggtaaaattgcaaaccctaaaaagtgagggtaaaacagtagttggaattaaaagtaggggcatggatgcaattgtccctaatagtatagccaaatgttagatctaaatcatctatcgctattctaacagtcaattaatacaataattaagtataaaaatatactacaccattaatacctggtctcaggtattatacccatatactccctctccctccgtattttaatgtatgacgccgttaactttttaaccaatatttaaccattcgtcttatttaatttttttatgcaaataaaaaatacttatgtcatgcttaaaagaacatgattcaatttttttatgcaaataaaaaaaatacttatgtcatgcttattatgtcatgcttaaagaacatttgatgataaatcaaatcacaataaaataaatgataattacataaatttttttagtaagacaaaagattaaaaatttttagtaagacaaaagatcaaacgtttgttaaaaagtcaacggcgtcatacattaaaatacggagggagtaatatgttggacataacaaatagcttgctttcttctctcttctcttttcatcgcatatcatagtctatgttacagctagatacaaatagcttgctttcttctctcttctcttttcatcgcgtatcatattcggcttatagcttgctatgtacctgctctaactaatgtttttgatctagtacatgttgttgtgtacagtaatcaacctagtatatatgcacgcatgcatgaagataatttgatacgcatcgcacaatatgtaattaactagtaggattaattggtaatcacacgcgttctaatttgcatgttaattggaataccttgctgcgtggtggagagatcgtggtaggagcagaaccgggagaagatctcggcgagggtggcgcacttcctctcggcgccaccgccgccgacgacggcgtagaagaatccgggcatctcgaagacgaagacgcgggcgtcgaggcgcgcgacgagggcgtcccgggacagcatccagtggtggttgccgacggcgcaggaggccatggagaccgggtggccctcgacgcgggccatgcgcaccgacaggccgccggagcggaacagccgcgccgcctcgaagcggtcgccgcacagcacgaagaggctgaccggcggcgagccctcagcggcgagcagctgcgtctccctccccatccggtactcctgcgtccgcccgactcgcagcggcggccgccctcctcctcgtcctcctccctcccgagtcgccatctccgatcgatcaacacttaatgctgcttgatcacacaaattaagctactagattcaatttcactctgtactgcaaaagaagaagaggaagaagaagaagctgcaggcacgcaaagagcatgtccatacggcaaatatactggtcctttttattagacagtgatagatcgttggctcgtggctagatagatattttttgcccggatatttttccatgcagctaatattattcgctaggttaaacaacggcacgtgttaaggttaatgaccatgtatgtatgcaccactcactctatgctagctaccagttaaactatggtacgtagtgcttaccacaacgagagccggatcggagagaaaagagaagggaattacgttagctagagagggatcatgttggagtatatgcgaggttgtacgagctgggagaagacatgggggtggccactcttaaataagagggaggtagtggtagtagtagatagccatggtcgccgaccgaggaagaagaagcagtggggggtcgcgaaacggaggccgcgcccgcgcgggagaagagagcgtattgcattgcattgcatgcatgcagggcacgcgccacgcacgcgggacacctgcgcgccacatcgagcggggggtaggggcccaggcgtggggcccgcaggcgctacacgcggcccccaccgcagcgcgacgtggcccgacgacggccacgcgtcccgcagcgctggaccccttgcatgccgccgcctcgcctgcgccgcgaatccgcgaccgcttcgcgcgcgcgcgcgcgccgagccgagccgttcgagttcgcgcgctgcgcgccggtcgaatcaaataccggcggcattggcctgcctaatcaggggcttagagcaagcataatagacgtctctgtaagaaagtagacgagagaggagagaaaagtgaggagaaacggtctatgaatttgtgacagctggtttagaaaaaaaaccaaaaaataaatctatgaagggcagatggaccatatatttattacagtgaaaagctaacaactatatgagtgggttgaaagatagactataaaaatctatataatcagtagctggttgtattattagctatgctcatagggcctgtctagggatcttcgtagtatcttttagaattaaaaactccctacacagtttagcttttagtttagattctaagaatttatagttataaaatctaaaaaataaagtagaagtcataagctagaaaacctagcttttttaagattatcagtatcaattagttgtttcttaaaattttaaactcttctaaacaggctgttagctacacttggtaagcctacctaccgaagacaattatatatatatataatcttacttaattatttttcatgagcgagctgtacatgtagggcagtgtcttatttgtatattctatatacctgagtatgattaatcaacttatcacatcatacttatatttagagcatgtttggttgagaaataatgttccacgtattattttttattaaggtggctaagttttttcttgttataattttgcgataaacaaaatgataagttaaacttagataaatttgataataaaatagagtgtatgacatgtggaccatgtaaaaagttaagatgtgacaaatttagttgccaatcaaacatgcagccattagactcactcttttcatctacgtggtctcgccgaggtggtaatgtggtggttaaattgatgacatgtatctattaattacttactactaccttcattttttaatagatgacgctgttgactttttctcacatatttgaccattcgtcttatatttattttgttatgagttattttatcactcatagtattttaagagtgatttatatcttatacatttgcataaaatttttgaataagacgaatggtcaaacatttgagaaaaagtcaacggcgtcatctattaaaaacggagggagtataagattgctcaaaaaggacccacaaatattcgctatgtaggctaacacatttccacatatgttattaaagggagagagaaaagatatatattgatgcgcgttgatcgatttaattaaatacgaaacgctattgttaggacctgttcattttagaggaatttcaatgcacgggaatagaaaaggtgggcaaagggtgaatagccaaagtggtccttcaagttttatctaaagcttaagtttagttcttaatgtttcaatttatccatattagtcctttaagttctaattttagttcaaacttatccttgaacccatttagaagccacatggctaaatataacaacaactttcttgataaatgatacttataccccccctcattcatatatataagaaaaacaattgcattcaatgattgttttatagataatgcacagtaatttatgtaaaatgaaaataaattatgtacttacaagtgtatacgatagccattgcttaagtttaatgtgcacatattgaaataatgagaaatatatctgcaatgttgtttattcatcttggttttatcttttctaatgtatagtttgtatacaaactaaagggcaaaagagacattctctaacagaaatattgaatagaaatagccacatggcatattaagtgggtccaaagatgattttaaacaaaaacaaatatttagacgacatatgtggacaaaatgaaatctaaagtatcaaattgagcatttgatgaaacttgagggactaaattagctattcacccgtggggaaaataggaatacatgcacactccaatatataggaatttttcaagagatttgagtggattgaaaattttctatgtttttttctatacaacgtgtggaaaagaaaaaaatcttttatttttactatatctacatttatattaaccgaatagtatccatagaaattaatcctgagaaatctaaatactttaaaatttctataaaacaaaaaagcccttaaattgtcgaactatatattcacgaaaaaaaaaagacaatataactagcatcaggatgttaaactcacaggacacagcaattatgataattcgaatgaatttgggttcgttcaggtgtgtcaaaggtctgaagaaacggctggaaccaagtcaggaaacaacgtatatttgtttccacccagaataatgcaagatctcccaaggccactttgccattcgtctgcccaagccccaacggtggggaacataactggaaagagtgcaccccctccgttgtttgtactgttatctctcctcttattaaaaagtttgtgcaaatataaaaaatgaaaagttatgtttaaagtagtttggataataaagcaggtcacaaataaaataataataattctaaaaaattttattaagacgaatggtcaaacagagcatgtaaaaagttaaaatatcttatattatgagaccaaatgagtagctgtgtagtacattagttctggccggtcggcggtggcgacatgaaccgaattggttttggaagtactccgtatttgacgttactgtaaaattatattagctgtataagtaatttctggtttgtagatatgatgaaactggccactcatgttttagtttgtgttaattcaatctcagtctccactgattattttatttggtgaagacgagattaattgttgtacatgttttttagactaattaattaataatttgttaatgtttttcaaaataaatcggctagccgtcaatttaaatgaatagagtaggaaaaaactgtatgcaaataaaaactgtaagaacatgtacaagttaggtcccgagatgtgggctagtgattaagataacaagtacatctgtttcacaatgtaagttattatagcatttttcacattcatattgatgttaatcaatctagatagatatatatgtctagattcaatatgaatttaagaaaagttagaatgacttatattataaaatagagggagtagtagcgagttccctagccattgcaaggacccgtgttttgccctcttcttttatcttggttagggatgttgagatctcttaataatgttaaaattgaaatttcttttgtatttttttcccatatctcttagaggactagcaaagctaatatacggactacttgctttgaggctgcacaattttttcatgtaagaccgacttgagttcttaatttttattcagactttcaacttttccatcacatcaaaacttttctatatacataaacttttaatttttttcttcaaactttcaattttagtcaaactttcaattttaacgtggaactaagcacaacctaaaactacgagcttctatcatgatcattcaaatttcatcgatcccatggtgaagcagtcaaagcagatcgttgctcggcgagcaagatgtactccccatacaaagaaaagtcttctcttacgcacgtagtagtacgtgtctatgtctcgcctgtatccagcccagcccagtacgtgcggagagaggagtcgattgttcttggaatctcggtgcgcgcgtagtttggctccttccaacaccgtatattcccccatgtctctcagaaccccccaatacagtagcacatctcgaccagaacatccctatgcgtttcgctgactggtggggtcccagaaggccaactcgaccaaaatattgggacaaaaagctacacacttctctcaggtagcggtagcagccgtactttaattgcaacttgcatgaccttgggcccatgccctgcgtctgcatgcacgagtagtggaaagcgagagcccactacactactacgcggtgatgtcacgtacgcatgcgccgcgcccatcggcgcaccggaaggccaggggccatcagccatgccatcttttgcgtggatcgatccaccccgcgaagccgccccgccctcccgcggtggtcggaggcggcgtacgtacgttacgcgagtagaggagatgcgtgggaggagcgggagcgcgacacgcgggcctcggcgcagcgacgcgtgcccgccgcgcgcggcagcgcgacacacgtacgtgtagtagagctgggacgccgcgcgcacgactcgactcgggtgggctctcgatgggcggctttccgtttcgctgctcggtggaacatggaacgggcttggtccagcgtatggtagtgcagctgtattgggtgggtcaaaccaccaggggcaagttgttgtttccctgcgcgcgctagctttacggacgcgtggctcgttgggtgtctgcaactcacggagtagtggcgtgctgcctgagggtgcggtgtgccgcgtgcttcggtgcgtgcgatgcgactgtgattctgctctaggacagcttactccttcgtccaaaaaaaaatctaacctatttaaaataaatataatttagtattataaatcaaaacagtattaaaatatgtcacatctctaaaaaaacaagtaatataatacttaatgtgttattcataaaagatactaaatgagattggatgatgaagtggaggagagaaatgagaaaaggagaagatatatcacttttcatagagtgacaactttcacacaaactttaaataaaataaaataaaaagtgaattggacaaacaaataaaattacatcatagggttagtatgctagagatagtgtaaatatctattttatcttacatacatggataaaattatacgtggcaaactatccattctataaaacctgctctagttggtgttaggttcttttctacggacaaattactctatccatccaaaaacaaaccaccacgttttgtagtacgaatttaaacagttatattatttttgctttatatggaatgaaactagtactcactctctcccataaaaaaatgaatctaggattaatatgacatattctagtacaatgaatctaaatatatttgtatatttagatttataatattaaaatgtgttacatatgttggtcttttagtgacggaggaagtaggtgcgtaggaaggccatggccgcacggccgccgccgggtcagtggctggaccagtggaagcgtacgggaaatactagtctccagaaaacggctctcacaacttctttattggctggcactctaccagcagtactatacacaaaaacggtgtctcactagttctttactagtacactagtacacacgtttcgagctgaaaaagtctccagagcacacttctctcagaacttctttggcagcactccacagtctccgctacagcacgctgtccagcttactagtcctttacactcagctcgtttcgagctgaaacttgttgtttcgaggcaatgttctttttttagagctagggatgtaaacagagcgggtaattgggtttttttctcgcttatctcacttttattttatttatttttctaaattttatactaccatgtggaaagtgaactagtaagtgggtttttatgcgggtagcggaactacccacttgcatccctacttaggacaacagcagtacaacacaacaatataccgaatattacttcacacctagaccaagaatatttttagccacatactccacaaagcatgtcactatatggtgggtcccatgtctctctcctctcacttttcatctcttctttttctctctcctctctttttttcacatcagcggaggaaatggagcatcggcgccatgatggtcgctgccccggccgcagccgacgacccacggaaggcctctccctcgagctcctctccctctcaaccacctacttcctcttcccccctccttgctcgtcccctcccctccttccactatagcagggcgtccaagcgaagagacagtggccaacgagcggagaggcggctgaagcagcggtggcgtggattggaggacgacaacgggcaacaacaaggtaggcacgaatcggaggacgacgacgggcaacaataagttagctgtcagcacatgattaattaagttttaattattacaaacttgacaaatatatatatttgatagagtaaaatgtgttggcggtctttaatctggtagggttgtgtcatatagatccctaaactcttaaaatgcatattcatgtctcagaacttgtcaaagtatatcatttaggtcccaaatcgacacgtcccgtctagaatcctacatggcgctgatgtggcatgccacatggacgtgacatgtccttttctttttttttcttcttttattttcctttttcttttccgttttcttctcattcttccttttctcctttcttctgctcgggtcacagagaaaggagaatacaggggaaaaagacaagaaaaaagaaaaaggaaaaattttaaatgggtcctatttgtcagccaaaataataccacgtcatatccgtgtggcatgccacatcaatgccacgtaggatcctgaagggttttggtgatttgggatctagatgacacactatgacaagttttgggacttggatatgcattttgagagtttagggaactagatgagatacccctacaagtttaaggaccgcccgtacactttactctattggatattttcggctgctggacatgcatcgcacatctattatattattaaaggaatagaaaaaggagtctccacgttcgctctcatggcctagaaattctcacattaatcggagaaaaagaaaaagcagagtccatatataaatacaatttagaaatagctaaaattcggaattaaaaaataaggaatattagaagaggagactagaatccatatagaaatacaatttagaaatagttgaaattcggaattaaaaaataaggaatattagaagaggagactagagtccatatagaaatacaattaggaaataactgaaattcggaattaaacataaggaatattagaagtagagtatagagtccatatagaaatacaattgagaaacaatagaaattcggaattaaaaataaggaatattagaagtagagtatagagtccatataagaatttaaaattaactaaaattcaaaataaacataataaaattaaaattagagtttagagttcgtataaaaatacaattttcaaataactaaatttcgaaatttaaaaaacatggaaagaagagtctaaagtcaatataagaatacaatttagaattaacttaaattcaaaatttaaaatttaaagaatatcgaaagatgagtttagagtccacatagaaatacaattagaaataataaaaattcagaattaaaaataaataatattagaagaagagcctagagtccatatagtaatataatgtacaaataaataaattttgatattaaaaataattaataactaacacgtatataaaatacaatatgaatattatatattagtagtttcgtaaaggtaatacaaaatgtaaaattatgttgtcattttaatatatttgaaaaatacattgagaaaatatatgttattatatgatagaaaatataatgatgctagctgcgcaatctgcgcggaccaccatgctagtttataataaatcacttcacaaacttgcaagttataatttaacttttataggttgaaaaaaacaaattaaactatggctagttaacatatatttgtgatcaaatttatttttcccttgcaacgtacaggttaaatttgacattacatgtttgtggagtaatttatcacatatttaatctatgttgttgaatttttttcgtaaccatttagatgagatgtgaacaacgagggatgtcccctcgagagtttaaaatagttttccagctccttacggctttggttttttggcaacatgcacacactcgttcttatggacacaaactattcctgtgagtattttcgaaggactaaccaagatatatcttaaaattgttgaagtcgtcataagcgtctcgctgtcgaccgatatattgacgggtacgttgtctaccactgaaaaaataattagtcgtaaatacgattactcgtgtcaaatttaaaacttgaatcaagtaaactgattctttcacaacaaacttgaccatatttgaagctacgttcgcttggcagctttagcttcgttgagcaaaggagaactcacgttgggccacacccagcccacaaaattaccaagtcctgaagcctctttacgctaggatttagcccaatccactattacacaccgactttgctgagctaggtcttcggtttcttgaggacgacgacgccccaaagcgcatgaacttgcataattcgaggctacttgcggacttcatttaattttggcctggatcaaccatgtacgctcatccccgttccaaatactacatcatctcttattgttttttctgtttgtttaggatgtgagcatatcattgacatgaaatctgtaattcacatccacgaattggtattgctgggactgggaaactgttatgtttgatcttggttttcttcttactcttagcttcagaattgtatcttctgaaaccagtgcagttgacaagaacatcaaaagataactggttccctactgccctgactgtggcctgatatttgctacataaatctgccatccagttaattaatcatgctggattgctggtctggttcctttctttcaagatttctcgccccaaaatctttgttgacgttcgaggtcagttgagatgaaattgcatgcactcagcttctttatttggatgtgtagttagttcagagttacatgaacaatattttgttgtgtataataattgtggaggacttttacggtacattctactgctagtatatactaccagtatatacaagggtagttttggtattaggtaaaagtctgaaaagggctttttggtcatttaaattagagaattaatttcacccggattaattttccttagttttttctgtggatgtcgtcatccgcttcttctcgatacatctcgcgtctccggcgtcgctgctcctggcgcacatcgctcccgcgccgacgcctccatcccgattcctccggcgccgggagaagccgaacctccacgtgcccggcgtctcccacgtccccggcgccttgcctccatccctagcctattctcccccacatccgacctcccacagcttgtgccttgcccaaaccacaacggcgagagtgccctcgtcgagccggcagcctccccacgcctcccatctccgtcctggttgccctgcctgccctgcagccactggagtgctcctggatagaagccagcggcggcggacacccatgcgagccgagcggattcggtttagagtcgatgtggtgaaacggatctgactaagtgagttcgcgttaatttacaaaaatacccccatgcaaaaagataaaaaaacaaatataccctatccaaattatactgcagtataattgggagggaaatcagataaatttacaccgtcagatcaaacatactggtagtatatactagcagtagaatgtaccataaaaaaactctaattggtaccactatcagcaatgtgcaattatatttttcagataacttctctctttccaattataaactgaatgctctattgaaacccttatcggagtattcgaaccaacaactgtacgttagtgttccatgtcttaccattcaatgatgaaacaatttgatgttcaacagcttggatacaaataggagtccaattaacagggagtaacatttaacagcaagcagtgtcttaatttcctcaggaaagcgatgcatcacgaatcgtaattagcatgtgttgtagcttagagaggctcctgagagtttcttgtgtcttcttgaagtcttgaaccagccaatcacagttatttgtgctactccgtaattccttccatctccaagaagctggcagcatgtatagcatcttaataaagtattatagtgcacacaatcattagcaactgtcacaacaaaacttctagggtgtcacaaaaaaatgtacttaaacatttttctgaaagagacaatcgtacttaactcttatgatagcatgataaaaaacaggatccgtggagacaaaatggacataaaaatgggaacggtcttttaaatggaccccaatcattgtgccattgttaaatgcaaatatataactaaagaaatcattgttattagatataatataaatttactaatactaatgttacaatttctgataattgaagatgtcatttgtccacaaggttcgtcctggaggagggtgagttaggacttaggaggacccaagatcaggtcgaaaagcatagtcgatggacaacagatcactgcaaattaaccaatcaagccgtaaatatgccctatgaatccaagggttcaaacggagtttcagtgtaatttatttgatatagtacaatcacatacttgaaattatcttcctgtgcaatgaaacataatggcatgcatgaacttgtgctatactgctctgccattgacagcaaactttggtttctgatcaatgaataattaccggggctttgtcgctgtcgttaaaggaaaaaaaacataataacggtttgggtcaacaactcaaggtttatcaatcaggttactgaattctcggtctgtgtcgggtactcctataatgcagtagttggattgaacttaattacagtagtattatcagggtacgtacaaaggtggcgagttaattcattcatataattctaggtcaccaactagctagtgccaacattagtgcacatatatactttatgttgccattatgcagccactgtaccacacggtttaacaattgtgaagtagcaaacaaaaaggttttgcctaactgcctaaccactgacggctcatcagttgcatcagcaaacctcactgccgttgcacgtttgccatagtttatcagttcggctaccaatcaacataaacaacaccactaagatccgtaatggtgatcgctgccagtacaatgctgcaaactttaagcgccaatctatgatgatttcgttgatgatccttgcttttgtgagaaaaggtgtgattagtttaattagtgcatacagccaccataaatattcaacaactgagttgttacgaacaaatgtctgaatattgtcaaatgcactcaccgaaaattaaattttcaataaattaataaccagaatatgtaagtagaattttcagataagaaaattactgcctgccttcccgcctatgtgtcggtaattaaaggttgattggtaaagttgcacagatatcaattaagcataaaaagttaacccaaaagctgggtgtagcttgcttctttagagtcctcatctaacaatgcttagctgcaatccaccatcaggacagtacttaaaggcatatgatagcttatataaaacaaggaatagcaagtttcctattcatcaagttcttcattctactttaaaaaacggagaagaggaaaatgattcagtgtgcacaattggttgtgatgttgtatcattacagagatcgaaggtgcatcaagtaaagcaagatactaggcacgagctgatcgaacgaacatgggtagaaaggggaaacaatcaacacacccaaggattaggtattaaggccccttttgaattcataactaattttctttaataatggataaaaatctggcatcaatatccatacatatccagaggttgtatgaatacttagattttgaatcttataaccgagataacacaacaacaaaataaaaaaagaaaaggactagaagactaatcttcggttttcttctacttaacgagccctgccgtaccaagaaccacaccaagtcgatcttgatatggaatccaaactcctatactcctcatccacgttacatccatatttgattcgctcctttccccaccatatccctatcgacagctggatccaatcgattcaaatttagtaactcccagcatctacttccttcgcttgccaatgtcattcagaggagaaaaagaagaagtccctccagttcacctttgctactacacaaatagataatgtcacgcacggatacctcggatacaatacaacaacatttaggccccagatccaatgtcgcaccccatccatcactagcattgccaaccagcttgccttcatcctgccaatgccgctccttgttgtagttgtcttgcaaaacaagaagtagaaacagatctggccattagggtgaatccggttgccgccggcactactaaggatcccactgttttcacttctcgtgcaggcaccttattatcacatggagagcaggatgccattggcactgcccacgacttcgccatcacctcaagttgtcgtcatcgagctaaagttgtccaaccggccacaacagccacctccatctcaccgcctcgacgaaccatccagtcaccatcaccaagacacttataggacgttgagcacgagacagggcagaagagcagaacaaatgacgaggcgatggccacaccaacccccttttggatggttgcaagcggcacgccgctgaccactgccaccatcaacacctgttgtgatgccatgctctaaggatgttgagcccgaaatggcggcgagctccattacccccacaataaagccactggagcttgcaaaaccgaccagccccaccgccctcattgctcccgctacctacactgccaccaccaccgccgccgcttgcactacaccaagcgtcgcaatccagcctcaccatggggcctcgtcggcctgtccttgcacaaagcagagcaccaccagccaagtggccaacctcactagtgagctagacactataattggatctgtggagagaaaaaaaagaggaagaaggaggatgaagatgtgtgtgtggggggtggggacggggagaggtggcggtgttgtggcgcgcatgcgtcaggggagtgaatgattatccttttttcacctagtttctattggaatcaaactgattcatgtaaaagtccagcaaattttttgcctaatacgacgtagtaaaaacacaattagatatgttctttttatcttcatataatgggattaggtgtttaattgtgtagtgcaagccgtacgtgaattaaaaattgctcctagaaaaggagctgccatggtttaggggatgaacaacttagctacgtaaaaaagatgggccaattccctacatgcccatgtaatttcacccaatcccttctacgcccctgaaatttgtttgatctcttatatacctctgagtttttatttggatcccttacatacccattccgttagttgaccattagtttgaccgttagttattgtagaaattactttcttgtccttggtatattgttaaaagctagaaatttttttatgtgtaaattatttgagttgtgaaaaccaataaggaataaattactaaatatttgttatgaatttttaaaaataaaacattatttcattaaaataaaaattatttatcgtcaaaacagttctgcacaaaatttgaaaattacttttcaacaaatatttagtgaaaaaagattcgttgtgaaaaaacaaaggggatgtaattagtttatcacaaattagaaaataaatttcagatcaaatttgatgaatttcgtatatcttcccaaaaatttaaacctaaataacatttagtttttgctcttaattttctggtgaaactaatgtatggatttaatcataattttttaaaaataaaaaataataagttttattttttaagttgggcattaaatgattatattgcttgtattttgtataagttatttttttcatatgaaaatttattgggtagttaccacatatgtataggatgggtaatatagtcattttaaaatatttaacggtcaactaatggtcaactaacggagatgggtatagaggagatcaaaataaaaactcaggggtatataagagatgatgtcaaattcaagggtattgaagggattgagtaaattttcaggggcatatagggaattttctcttagtttatcacaaattagaaaataaatttcagatcaaatttgatgaatttcgtatatcttcccaaaaatttaaacctaaataacatttagtttttgctcttaattttctggtgaaactaatgtatggatttaatcataattttttaaaaataaaaaataataagttttattttttaagttgggcattaaatgattatattgcttgtattttgtataagttatttttttcatatgaaaatttattgggtaggtaccacatatgtataggatgggtaatatagtcattttaaaatatttaacggtcaactaatggtcaactaacggagatgggtatagaggagatcaaaataaaaactcaggggtatataagagatgatgtcaaattcaagggtattgaagggattgagtaaattttcaggggcatatagggaattttctcaaaaaagatagactacatgcacagccgagtaattataaaagtatttcatctaatcaagtgaattaggtgacgcacgaactaaccaaattgcagtggtacaggtacatacattcttatatggtcggctaaagaaattcttaaagatagcaaagcaccggccacggcgagactattaattaggtcaacttattgaacaatatgtgagaatttcaactaactgatcagatcaaatacataagctacctaaatgacttaacttattttctatgtttttgaactaatagagatgatatatcagaatgcatgttgtagtttgtgagatagctagtcttagcccaaccagctggttcatttttcaactgagctccaagagtttcaaactcggctcatatatttcctatagtagagtaaccatagagttgactttctgtgaaaaaaaaacccccacatttttgcattgtttatgcaaattatcataaattgaatcaattgctcataaacctctagtgcaatcatggattgatcaattgtaattttgctgttttggtttctctcttttctcctctcccctctttcggcccttgggcctttgtatatactcttttttcctctcttaataaaatttaccgtgagggcctctctcactgtgttttgataaaaaaaaacactttaaccttttttttgttttgaaattttatcggtttgatgagctttaagatttttttctctctttctgcatccaagtccaatttcttgactagaaagttttgattcttttagctgaaatctccaattctacttttgggggttgatgggtagctagcatttgagttgaaaaagtagagtaggctatagctttgtaaaatggtccattgaaatttcaaagcactaataatgccaatagaaaggtaaacacaatgagaagccctacataaagacatcaaacctctcactttgtaaaatcaagcattcatccttccgaatctgttttatcccattgaaatccccttaaataccattgtcgcatgctcacatcccatcttttccaaagggaaaagatcttctcaatgaggagggaacattgtgtgccaaaattgactcacgaatatacaagcatctaccaacatggacactcctgtccatatgcatagctagaaattaagtttctttagaacaaagaaagcacgtgacataaacttatgctatacaaaatattatgcatatgctagaagttacttccattaccttaaaataaacatatactacatagaaacttaacattgaataattgttgatctacaagaaattcctgccttccaagatgatgatgagctgatcccatgaaagaaactctgcaggagagacaaagctgcatgcttcagtatattctctgcttcacctgtctctcgcctgccaaccatcgatccaagtcccaattcccaaaccaaggtactacgaaaaatggacacatcaaggcaagaaaaaaaaagaaaaggagcaaaacgaaaacgagatatcactgcgaattcgcaaaaaagttagcggcaggtggtacgagcagagcaggaagccaacaaaagcgcgcgaaataaagctgcctctcgcgcgctttttttttcttttaaagcggagcagcctcctactcctgcacccctcctctctccactttccctgtaaagcaaacgcgcgccatgaggaagaaggcggcggccggcggcggaggtggcggcggagggaagggcgtggtggcgacgacgacggcgccgaccgacctgctcgtctgcttcccgccgaggcagcacctggcgctgatgcccaagccgatctgcagcccgtcgaggaccaccgtggacaaggcggtggccgcgcggcggcggcggcagcagcagcagcagctcccggcggcgaggtctggaggaggaggaggagggcgtgggcgtggtagcactagcagcccgctgttccgcgggtccaaggcgaagcaggccgccgtcgaggtcgacgacgagccgcagtcgcccaaggtgacgtgcgtcgggcagatcaaggtggcgcgccccaagaagcagaggaaggtggccgggaagccaggtaatggcggcggcggcggagaaggaggagaaggtgggaggagctggatcaccgtggtggaggagatcgagcggctgcacgagcagaggaagaaggtgagctggctggaggccgtcgggatcaggagggacgcgctcccgttcctcggcggcgcgctccggagcctccggctcaaggtgcgctgcttcgggtcgctccacggcgcggtggagtcctccaccgacgacgaagacgacgacgacgacgacggccgcggcgcggaggagcacgaagccgtgtccgccggatgcggcggcagcgccgcctcgagcgtgttctcgaagtggctcatggtgctggaaggcagcgaagagacaccggagcaggactccggcgacgacgaggaggagcccgagcgagaagacgacgacgagtgctccaatgcgccgccgtccgccccaccggcgaacgcgctgctgctcatgcggtgccggtcggcgccggcgaaaggactagcaaggagacgaacagaggagccaccgccaccggtcggcgaggcggtgcacgacgagggaagcgcggccgccgccgccgcgggggacgacggcgcagaggaggagagagacgagctggtgttcatgcggacggcgccggatttcctgaagctgtccatagacatcgccaaggagacgtggatcgtcggcggcgttgaccccctcgcgcggagccggagctggaagaggtgaccgaccgaccggccggccggcgaggagtccccggcatcgggattatttgtacagtttgtatttacccttgcgttttcggtataatcttgtgactcaagttgttgttacgtttcctctaacttggtaaatggtgattatataaatccaagctatagaaatgaggtgaatttatcatgcaacaatcctctacgatccaattgtgcacatggttgggatttgaaaatagaatcccattaaaaaaaaacttaggaaatgcctaacatccaaaattcttcaagttacttgctcagtgtcggtatgatccaggtcaatatggtgccgccttcgtcaaaaatgcaactccactaattgtgacctttttatccaaaaatgcttttcaacattgccattgtctcgtctgtgcaatcgtcggccatccggagacgagttcgggagcaaagtgtttttactagaatgaaaggagcataaggcnatcatgatatacgtagatagatgtgagttaagcactgattagacaggaaccacagcttcgttgttgattgagacagttcatggtcatggcactctcctaaacggttggtttctttgacttcacccgttggtactacagccaaaccgcctatgaatatgcaacgcgctatgtgcgctctgctcataaacctcctcatgttattgcaaagttggccgttgctcgtccgacaaactatgcaccaattggactctgtcacaacagaatctgcagagaaggtcgtcgtatgctgcagtgcagactgcagagggcagagccgcaacagaatcttcagaaagaacgtcgtatggtacagtgcagtgaggggatgtgacctctcatagaaaaatgtatctagacatagggtacagacaaattttttttacggagagagtactccatttcaatataaataaaactaatataaaatatgacatattctagttttattaagctaacaacctcatctagaatgtatcatattctgtattaaattagtattttgggatgggaggaattccacggagatagaccagacgtactctctcatcccaaaataagccaatctaatacataatatgatactacctccgttacaaattacaagtcgttttgactttttcctataatatttgaccattcgttttatttaaaaaaagtagtgcaaatataaaaaggataagtcatacttaaaatattttagataataaaacaagtcacaaacaaaataaataataatttcataatattttaaataaaacgaatggtcaaaagttacaaccaaaactcaaaataacaagtattttgagatgggggagtactaatctggtgtcacatgccaaaggttggtttattttaatacatatggagtaactgccctaatcagaatcactaccatttttccaacaaaaattctgcacggcttccgaggcaacctgcaccagcatctggcaatcgcaagctcaccaaataattaacaaaacattactgcgagaagagattctaaacaactcagtaggcaccaaacgcacgagcacggaggactaaaagcaccagtgttaacttactttttggtactgaatactgatagctatacactacaggctaattctattaaggttgtgtttagatccaagggtgaaaattctattaaggttgtgtttagttaaagggtgaaaagttttgacgtgttacatcggatatacggacacacatttgaagtattaaatgtggactaataacaaaacaaattacagattccgtctgtaaactgcgagacgaatttattaagtctaattaatctgttattagcaaatatttactgtagcaccacattatcaaatcatggagtaattaggcttagaagatttgtctagcaatttacacgcaatctgtgtaattagttattttttttcgtttatatttaatactctatacatgtgtccaaacattcgatgtgatagggtggaaaattttgctaggggatctaaacaagccctcagttgagtaagttaaagtgaaaaaaaggttgttgcaatattgtcaacacctagcatagcgaatatagagaaatgagtgtgccaagtaacacctcggcaagcataatggcggcaggtggcttctgtccacctagggaacgacagtctgcataatataagatcattctcttcgagtgcctgcagctgcaaaaagagcaaagggaaagagagaggaaagacaagttccattgcaccactactcgtaggaagctgcaccattgaaaagctaaccgtttttttcacaaaccaaaggcatgtgttaacagtcggtcactgaagagatctacacgtgacagaacatgtggcattgttgtaaagtttttcccattttacctgttcatctcgaaaggaggaaaccggtttctgaatctaagctggtatccactatccagtgctagagcctacaggtagggatgaaaacggatcggatacgatcggaaactagctctatcatattcgttttcacattttttttcaaaatcggaatcggaatcggaaacccggatatgaaaacgaaattgaatattgtcggatatagatatggtgcgaatacgaagcgaaacgaatacggtgacgaatattaaccggaacataaaaacccctcaaactaagcatcacaactcaaaaaagaaatataactctttattttttttctaatataacatatcaacttttccaaattttagtgttaataattttgttatatccgattttgtggttgagggagaacgattcaatagtttatcgcactcatatggccgtcctaaggagccgtatgtgaaaataaaatttaaaactagtttatcgcactcatatgaacttcaaattggatgattctttttcataaatatttctaaaatcatgctctaatgtgttattgtgttcttactgctattattttggccatagtttcttgtgacttttgttttatcaatttaaaatttgaatttcaaaaaatagcaacttcagataatattttgaagcattaaataatttcagctgaaaaagtcatgaacataagagttgtagaattcatcaaaagctacaacttttattttg

SEQ ID NO: 11759 - DNA, 26816 bp, Oryza sativa
gtatgaacactatccgtccgaatccgctccgttttcacccctattagttcccgttcttttcaaggtaaacattggagtagtatttcacaagcccctaaacaacacgattttttttaacaagaacttataagcatttatcaaaaaacatttttaaatcaagtttttaactttttaatatttaatttgtttgtttctatacttgagtaattaccataaacttactttagtaacacttcacaatggatttttcttaactggcactcacctcactaggtcaccggtttaggtttagcactatgaaccatagtggaaaaaatcggaccaatagatgacccggtcatcttgctggttcaccgatctgacagtccaaccgtgaaccggccggtcgtaaccaatcaaccagggatcgactccccactagcgcacattttcattcgatttttgcgaaaaaaaaatcaagcctgcgcacaagtatggcccaaacacactaactgggccatcgtgtggcacattcattcactaacttgccttagtctggtccgaccaaaggcggtttattgcccggttcatcacaaaacaggccggttcaagcgatctgaagcggttcaattgtacgtccggtctttctattcgaccgaaccattgcaacctctggttccggttttttcgggttaaaccgctgacctagtctgattttttccactatgaaccctaccagcactagaccgatctttggttttggcgacgagccttgagagtcctcttggccgtgcatctctccctcttatacaagtgctagtgggcttgggggctaaaccgataaggatttaagttggttgttaactgatcaaactacctctagttcttatctactctattttatgttaggaagataacggtggaattatctatcctttaaaagtcatatgaatttatttttaaatttaaaatacttaatggctcaccttgttttatatatgctcttaattttttcatttccccctactctcaaattaagtggttacttggctagaagtccgtactccatagtgatggtgtgtggcaaagttacgatcattcgctccattgaaccgcaatcattctacgagcaatccgttaacaaatctaacaagagacacaaagcacgctgaacagtgaatcggacgaggagaaaatgcatgataattaagcactagccataggcgtggaaccagtgagggtgacaacaaagtcaactaataaccggtgatctggattattaatttgatattcttagttccagctaagtaagttccatctgcccagctgttttctgggatcaagctgttggtttaatttgatcttccagaggtcaggtcaacttccttgcattgcattatgggagagccaacagttacacatgaccaacatctttttgtccataacttatggaccattagtacattatgctagtagcatttatatattgattgatactttcttttttcctgcacttctaacatggacgcaattgaatacgagtactaattaattcactcgtttgttgtaatgtagtagtactaagatatttgttgtaatgtaagatccgggaccttttgctttgaccattaatagcttagattgtcaaatacgaatgctgtcatcattcatcagtagatttgtcatcaggcatacacttgtgtatcgtgtgtcacattaatttctgtagttaagtctattacagagacggaaaggtatattattggcaccactaattcttccctgggacaaatggcacaatgctgaccggttgctaatcatactataatcctattgttagcacttagttttcaaaatcagcaagtctctgaaatagcatcaaacgatgcgtgggtacatcactgaacacgacacgtcggtacccactgcgtgatggtgatgcaaatgtacaggagcagtagcagcgtcggaattaacgaggtggttatggcgtcgtacgtgcaacgatcgagacgtgtagagcaacgccaacaaatcgcaggcaatgccgtggccacgacgatcccatgcgtgctagcgatgaagatcgatcgatgcctgcatctgtaacatcagaggaacaatcgatgaagagagctacatagcgcaaacagaattcagaatgcaaaacaggagaagaggatcctgcgtgcattacatggctcatgcctcatgataggtcacatgctgatcttggtaacttgtggttttaccagctaaaatgttggataatagaggatagatgaaggacaaacagaggatttaattagcattcctttgggattggcaattgtagatacctttggtttaaataatttgctaccttgattttcagagaaatgctatatattacctcttttaagggtggattcagtaaaaaatattgcagatgtcactaactagataaacaatataatgttaatgttttatttttctttgttctaaagaatattctgtaacgggattagcatagggtcattgatatcatctaacacgacctaatacaattggatgcatatccatccctgccccccccccccccccatacaatttcacatgaaaaaaaaaatctagcctagtctcttgataaggatcttgtgcacagagaagcttctagctctctctctctcatcgccactgccgctttggttcagctattgcaatgggcatatgtagacaacagagtaagaatgggctaacactggctatgtgtcgagcgcaaagactagggttgtgtttagttggatccaaagtttagattttggttgaaattaaagatgatgtgattgaaaagttgtgtgtataacaggttaatgtgatggaaaagtactaaagtttggatccaaattttagatttaaagacagcctagctatagttgctagtggagagctagcagatggatgtagtgattgaaccgagcgatgacataataggatgatagttggatgcatcgaacatggagaacacaatcgtcacttcgatcatcatcctcgaggtcacaacttctgtcacccccaacaaactatgcccatcgcgtcgtctttgagcgctttgatctcaagtccccacgctagttgacattgcttttctatatttgttatcgtctcgccgcattcctactgctattgttactcccacagtttatgcattgtcttacatgtactccataactctatggatgagtatacacttgtctagtgttgcttgccttggagtgcgcatgtagctagtgacaatttaattagttgctggtcaatgctctctattctctccttttatctcaacttatcttttctgtcagcatgaatgaatcataaccatctaaattatctgactgtatttgttcttatgtgacaatggccttcctgcaagcatatgggattgcaataaattattgtcaagttttacaataaaaaataagattaacatttccatatttcaaacactgtatcctaaaaaaaatctatgttttccaataatctgtttcacacgtataatctgattctaatttttcaaaattttctatccagcatttgaatggtgtttccggatgtcaaaactcaaaacacagcaacatgagagcaaaacacactgtaccaaaaagtcaccggttgcgttaaaacaagaaaaatacagggcaacctgctgaccaaaaggaagttcatcatcaaacacacaagacacaacttgcccctctatcccttctcaaaaaaaaaaaaacttgcccctctacaaaaaagagaaaaaatgcacaacttgccacggccggatacccgtggaatattcgcgccagctccaacgccgctgcggcgcatcgaacaccaaacacaggtatagtccccacctcgcaccctgccacgtcacccgctaaccggaagcaccggtggacgccgccgacacgtgtcgacctcctcaacacgtggcgcgcgcggggtggaaccgcacggctccacccgtcctgccgccacgccgcaccggatccagtggaagcagcgcccagtgtcacggcctccacgctgcgttgccgcaattatgcgtcaccgcgtggggcccactcggcagtgagaccatgcaggctccgctgctgctgtcatcgcgagaaagcgattagcgggaggaggagtaacatcgaaggaaaccactaatcacggattattttgagcaattaccgctctaatccggggcgataagacgagggaaattactaattaagggaggggattaaccggtaatggtctttggagctggagagctttgctataaaagagctccaatggcgtccctcacacctccccgcccaccattcccactttcgcccacacacacacccagatccacagccatcctcccaccgccgccgccaccatctccaagcccacgaacacccacagccaccgtgagctcgagcgaggtaagaaaagctttagatctgagcgacttcgagcgtcttcaaggtaaagttttctcgaaaccctcttcttcttcttcctcctctggctcccccacctgttcttctacggtttcttggttaggttgcttgcagagagcgagagacccagggccttttagatccagggctcccagatctgctgtttttctttcatcttctttgtgttctagtgttaggttggtagccaagaggggttctttttccacacctcacttgctagatctaccaccaaaaagccatctgtttttttactgtggctgtcgatttctccctccttcctgcctgttcttgattttggattcggaaccaggcaaatctttgttactactgttttagtatcagaaaaaaaaatcccaaaaaaaagagtgagtagatggctgcagctatagatctgtcaggggaggagctgatgagagcactcgagccttttatccgagatgcctccggctcgcctccggtttgttcccagtttagtcccacctcgccattctccttcccgcacgcgttcgcgtacggtggcgggctggcccagcagccagagctcagcccggcccagatgcactacatccaggcccgcctccacctccagcggcaggcggcgcaggccggcccgctcggcccgcgcgcgcagccgatgaaggcgtcgtcgtcgtcggcttcggcggcgggggcggcggcgacgccgccgcggccgcagaagctgtaccgcggcgtgcggcagcggcactgggggaagtgggtggcggagatccgcctcccgcggaaccgcacgcggctctggctcggcaccttcgacacagccgaggaggcggcgcttgcctacgaccaggcggcgtaccgcctccgcggcgacgcggcgcggctcaacttccccgacaacgccgcctcccgcggcccgctccacgcctccgtcgacgccaagctccagacgctctgccagaacatcgccgccgccaagaacgccaagaagtcctctgtctccgcctccgccgccgcaacatcctccgcgcccaccagcaactgctcgtcgccgtcctccgacgacgcgtcgtcctgcctggagtccgccgactcgtcgccctccctgtcgccgtcctccgccgccaccacggccgagacgccggcgaccgtgccggagatgcagcagctcgacttcagcgaggcgccgtgggacgaggccgccgccttcgccctcaccaagtacccgtcctacgagatcgactgggactccctcctcgccgccaattaacaccaccaccacttcttggctagtactcacgccgtcgttagcctaatcgtcgccgccgccgccgccgtgcagatgggattttagacattctgcaccgcacggacgggcatggattagcagttttatagtccctaatccttttggtttggttcgtttgtgtacgtagatcgatctctctccggacttgtttcctctgtagatgctagggttggttggtgttcttcctcaaccggagacgccgatgctaccggcagccggcgtttttgtgtccggcgtgcgtctccggtggccggtcactggtcggttactccggccgtggcgtccattgctcttctaaagtctgttattaccttctactgctgatcttacaggttgtaaacagtagtagtagcattattattattattatgtcttgtaatattattagcgtgttataagaacttgtaatgtgaattacctctactactactattattattatttagcgtcgttgttaaaattgttgtgtgtaatctttttctgatttcaccttccaacttgcgaagatctgcctgttgagttgcttgtgtgtgggggcagagaaacacttcgctttccagaaaggagaagacgaacaaactcgtctgtctgactgtctctgcatcaacgtcactggatttcggctagcggatgcagatctcatctcaacggcgcgaagcttcgggcgaagatgttcttcaatattttccgcttaattttctaccatgttaatccgaaagcgacgctacccgtggaccggtcagagtgaggctctcagcgggggcagcggcaacgacggagcacgtcgccgacgagatgctacgccgtaatgctttttttttcttttttcatcgcctgatttggatttcgcatcgctcccgtcaggatgtactacacggaatcgcgttctttagcctcggtttcaatgacaggacaccgttgatctcacgcgaacgtgccgttgcgttttactgtgtgtactacaaggaatcgaatcttgcaaggtatagtatgatatccgtgacgggcaacgacgataccgtgacaggcaggctcggtgcatcgatttcttcttttttttttttgatttgaatgttccgggcggagttggaaacagaggcgcgagagtggaggaattccccgccaaaaaatatcgagagattcgtagcagtaggtacagcacccgcaatgtaaagtaaagtgctatctataaaatatgtacatctcagcaatagactagattaatagtaaaccacctcaataatatgtctacatgggtatctataactctctcatgtattgccttaatatctttcaattagaaaaatatgctgacatggatatgttgtagagagtttatatataactgttgtgggtgtcataatgcacatgggtggcgggaaaccgcgtagcctcagcgtccgcgccagcgacgactctcgtactctctctctctctctctcctctcgtctacaaaaaggatgggcctcattggccccacccacgtcgccctctggatgagggtggcattgaatgcgtgtgttggtgggacccaccaccacgcaggaggtgggcccacctgccagtgtcacaggggctcagtacgcagaaagagagagagatcaggtaaaaatggaatggaaaggagagccgccaaggcggccacaggtgaaagccgacgacgaccacgaccaggcgtttctctgactagtgagtgatacactgatactcctacaattaactgtggtgctttggttggttgctttggcatgtggtaactggcaatgtggcacgcgcgctgtccgtcactagcgattcttgtagagtgtagtacaactatctcatcatattttcacctgatctaagggcccgatcgagagcaggccattagcacatgattaattaagtattagctatttttttttaaaatggatcaatatgaattttttaagtaacttttatatataattttttttataaaaaacacaccgtttaacagcttgggaagcgtgcacgtgaaagacgaggtggtggggacgtttgcccgtgggaacgagcgcacacttaaagccgtgaggcatcatcatcaatccggtggcaagttgggcttgtggcactgtctggctgcacactccagtagcagtagacgttactccttaggccatttgccgtgcatcaccgtggcgttctacaccgactcgctaaacttgggcatgtgttcttcgtcagttttagcaggcatgtgtcaaagcgaggcgaggaactggcgaggaacggtgcgcataacacgttgggagagggcgtgggcctgtgcttcgtcgctcccaacgcaacggtggccggatctgatgacgtcgatggcgtgggcatcggcggcctggggagaaaggaagatggcggcagcggtggaagaggaggcggtgaaggaagaggcggcatcatttataggtcctaacctcgttctcgttcccgttccgtaccgtcaacctcgtcgtcatcctccgctccaagccaccttggccagtccgcaacagcagcttgatgatggcctcctcgagtcctccgcctcccatgcttaccactagatccgtgccgtcccattctgtgccaccccgctccatgccgctgagcggccgtcccgctcgtagtctctgtctctccgagctccacgccggcgcgccggccaaggtaggatggacgccggtcgtaggtcaggggaggagtcctcggtcgccggtagggggaggagtcaggacatcagccggtgaaggaggggagggagccaaagtcgctggctcgttgtcgggagtgagtggaggagaggtcgagaggagataaggggggagagagacgggggagggaggaatttataattttgttttggagtctagggtctttggtataaattttgaacctctacccaaaatgaaaaaagtatgaaaactaaatcaaataagtggtagggactgaaatataaatttaaagccacacctaaaaccacaaattttggacctgtgaccctagcctatgtggcagtctgaggctcctcatttgactgggacacaatgtgaatggctttagtagtttacatcttttgattcttttagttaaaaacttattttatatatagagctctaagaaaacttacaccctctgtgctatgagaaactaacttatgagaattaatctggacaaatgtttatctaaatttatcttaaaaatagttttttttaactattctaggaatcaacgttttttctcggtgcaaaggtaatgataccgagatgtcttggtgtcaatatcgccaataacgttagcgttgacaccctagccccatgtgatagctaaatcattgacgtttagatgttggacttcgataacaggatcactagcgtcgggaaaaaaggtctaattttaaatatgtgcttttaagaatctatttacaaaataatttttaaaaggctcgaaacataatagaatccgacagtagtagggtaagtctggttgcttggctgggcttggcgttccatgacttctatccttgctgctacacgggaaaaatatacagtgcaaaccacatgacacatatgtagtggaaacctgaaagctatagttacataaaaaaatagacgtattcgtccacgtcattatgagtaaaattttgacccctaatgatggtagttctcgatgcaaaggtattcatacgtctattttttaatttgatggtagtttttgggtgtctactatatacgtaatttccggtgtatatttatactactctatgctgaatgctgaagtaaatgtgaaatggcaggcacaccagccactggacaaggaggtagggtcggcctcatctgcaactgatcaccggtcaccaccaccgttgggtaagtagcagcagcgtgtagtgggcaagtctcaaatacagtgatccttggtggccggtacaacattcttgatggcaaagtggttgctcacatacagtgatccataactagtgctttatttttgttgggaagtccaaatgatactcttttttgttgaattgaaaatagggccaattggtttggagccggtttttttgtcataccaaaatttagtgccaaaatgttggtatgttttagtaccactagattgatagtatagaatttgtatagtatgtgtaaaaattgatagcaaacaaaacatccatataacattattgaagttgccaaatttttttggtaggacaaagcactataaaaaaattattttcccatacaatcaaaaccaattttcgcatgtggttgggtcgccgcctgctagggcagcgcacctgtccgcgaaaatccgccttctgcgggcggtaaattatgtcgcccaccctcggaaagaaaaatcgctaaaaccctatctagctcccatccacaggtgacattaacactatagtctgctatcgctcgtcaccgtcgttgccacagaggccccgcagctcatactcatcgtcgtcgccctgcccccatgccttcaccacctccaccgttgccccttctcaccccggtagcagcggcagcgtggatccgcctgtcacggggatgctcgacagcggaacccattgcggcgccacccgacggcggatcccgcctagaggggagttagctgccgaatcctcgtgggagaggagttgagagagaagggatcgactacagtcaccgtcgccgagcttgagcacgctgtcagctgctcgggagggggaggcgagggagagaggaggtgagaaatgagagagagaagagggggggggggggttgagagagataaggatgaggaagagaggaggtgagaagataaggatgagaacttataaaattttgaagatgtggaaaggaagagagaaggacggtcaaacttttcgtaggcggacctcttaatcggcctcttgagataatgtattttcgcatgcagtctttgaaccgaccctggggaagcaactttgcatgttggcgcagtttcggcccgtcttcagcctagagggggtcttgtacagaaaaatcgattctgtagtagtgaagatttattttaatccaaacaagcccacaatcttaataaactttccaaccatatattatgtagagagaaacatgactagccaagtcggacatctcctaaatgttaaagtatatctacgaacaaccaatttgctcaccagcgtaatgtatgtcagcttgagcttcgaatgtttgtaatccatcccatccataatgtaaccattcgtggttgcaatggtgaccatatcctttactccttccctccgaaaaaaattaaactctaggatcatgtttttttataggacggagggtgtagatgtaaaccttagtaaagcaaatgtagagcgtttagataagtaaaaatattataatcaatactaaatcaaatttagtaagaaactagttaatcttttatcgtacacggtgtctttgtcactgacatgtggacccagggatcatcagacctacatttcagtgataaagtcatgatcatcaagcccacatttcagtgataaagtcatgtgacttcgactatagaggatcctgatccgattagttggcctctggcgtagcgttggtattggttgaataatcagtttaagtcttatctctctctttcatcgcatcagtatgtcttaacccgaaatcatacaaaataagtactgtatcaactttgccatatgaaaataacataatttcaaatattgttttcacctggaaagatgtgtaataaaaagttgcttttgtcaatggccttgggtaggttgtatcacccagagttacattctgcaatgtgacagtttgttttcttttaagacccaacgttttcgatgaccagagagagatagagtgagagagtcgttaaattgtggcccgtatattatccgtgaatcgttaaattgctgcagagcagaacaacgcaagaaaagacggaaacggtgccgccccactacgctacgctagtgctgttcctcctggtttttgtggacttgcagcaacgggcgtgcatttgtttatctgaattttctgattacatttcggcgtgcgctatggatggaggaggatcttcagatcaatccagcatccatcctttttctaaggccacgaattttcaggtttattcttctggatcatgttaagaggataattcagcgtcctaactttcagcttttctttctctgtgatcggctacgaagccaacggtttggtaaagaaagaaaaaggcaaagtctgctgctgctcatcactgtccactaatagtgaagttatggatcaaacatgatcagggttttgctgggggatttagcccggctaggcttcaatatgttgggcttgccgggcttcaatatggtagcaacaagaatgcagcctgtctggacaaagttgggagcctactcgtactgaacggcgattgttttttttaattgctcccactgatctatttatgttactatgtataactgatattggtactattcaatttcaaattttgacaacttcttttttccctaaaatatattataatacttgatatatattatgttatattaccaaagtgtgtatacgtagtgtttcatccatcatactctaatcattaaaaagcaatttattgttaaagtgagatgcatggtagcagttgacagtgtcattacaaaattataaagatggtcattatgctttaggctttatgcaaacaattaatatgctatattcggataactatatgggcggtcaaaatttggtacgctaatatttttaatgtattatttgggtaggtaaatgcaccccctttgattataaatatttttcatatttgattaaactttaaaatttataaccaccaataatttcataaatatttagtttaataaaaaaaagacactaacacagacacgtctacctgtgttacatctataacgggttcaaccagcaattacaaccaattggttaaaacgtggccaatcatcactaacggttggaggccctttacatatgaggtggctgatgtctataattgcttctcaactggagccgttacagataagtgctaatccctaatggtttcaatattgcccgttacagatgagtgatttgtaacggctcgcttaggcccatcgcatataaccgttacagacgtgagaatctaagctattgaaaataatataacagagttgccttgaaaagatatatattatactttataaacatgctttaatacaaaactactccctcagtctcaaaataagactcttttacttcatattttaaactagatgggtgcttattttaggacggagggaataataattaaaattttaaaggtttaatcaaattttattttaaatgttaaatatttatgatagaagaaagcataacattcttacctaggacacatctgattttggaaataaataaatatttatgccccaaaattggctcatggttttcacaaaaccagtgtaaacaaccggctgtctagatcgtagccatgcagctagctggctgccagggatcagtagaagtactctgtgcagtgaacagggtgagccatgagcatcatcactgatggttctttttgagtggctaagcatgtcactgggatagcccatgatcattctggatgcaatgcatggctagcttcaaagtgaataaaactgatctagaaacatctggttcttcatagccagagaccaggctacaccatataagagaccactatgtactttcttggtcacaaaaatgatttgcatgctcaactaacatggtcctagatacgctctgctgggtccagagacaagtgtctagatcgtggagaggggaatttcagtttatgggtccgattccattgtaaggattgcccccaacaccgttccatcacaatctagtgaatcttgggatttgatctaaggaggatgtctctactcggatgtagcacaacagtttgtttctgataagagatttgatttatagagtggactctgctcgggcatactgcaaacgttttattctgattagatagcttattcttttaggagaacacggaataaagggacatatatatattctacgcacatcaccctcacacagatcaagcttagaaattgctagcaaaacccaattgcccattgtatagctcacatatatactatcatggaatagcttacacattgaacatgtgtagcactaaaattggtttgtgccaaacttaatggcgcgacttaaaattggagtaatattctatttagttcggactacatcgtcgaatgataagtacggtatcaagtttatcgaaggtgatgttttagaaaccatatgtattgggtgccacaagttattcagatttgtttcagttttttttcctttcttatttttcctgcattcctagttagtgcagatcgaggacatataagtattttttttgtgaggatatatgtatttttttaacttaataaaatctgcattatctcgttctattattcatcgtctgatcacatgcatgctagtttctgataagaatagtctttcttcaatatttgagggaggagaggggattgcatatatgcaagtgcagaatttctacaacaggatgagttgtaaagcgcataataattcaccgaaatataagaatgcacacatgcaagatagatcgagaattggatagatccaagaatgctcaggttggtatgtattaagtccattgttgtggtcgtcccagagcttagctattgtccttttaacaaattctaatccccttagctttatcatcaacttgcatgctctgcgtgtgcaagaggattccagaaaagaagaaaaaatgtgctagagtggttgtattaaggtagcagatttggtagtcctagctttgcttgatccattgctttaggccatgaaggcatataacggcagggataagcccagattagcaccacatgacatggaagtgaaaggcgtgtgctcaccaaccatgtaaccactcaaaatctcacccttttcttttgtccacaaagctttttctatatgcaactatagtcttaattaattaattcaacaggaggcatcttattaccatttgaaagctagatatatgaccaggaggcatgcatgtacacatatatagctagctagctatttgatttgaacaatataaaggccttgataagtgctactaatccataacaacactagtagtatccgggttctcaatcacattgtggaccattttggcatatcattttgtgcgctcaatcttgataagtactcccttaagtttttgtttgcaacgtttgaccactcgtcttattcatttttttttgaaattattatttattttatttgtgatttactttattatctacagtattttaagcacaacttttcgttttttatatttaaaaaaaaattgaataagacgagtggtctaacattacaatcaaaaactcaaaattctgggacggagggagtagttatttgtgcctttaatctgacatgctagaagggggtagggggagtgtattaattatattgtgtaactcattatctgattgcactaagaacgatctagctttgcttggcttgatagctgaactgctgaagtgcatttgccatggcagccatgcaaatccatactgttatactagtttttattatctcatactttccaaaagaaaaaaaaaaaggcctttactctccagcttttgttttttttagaaaaaaaatgcaggcatttgtcgttctttggccccacttgtcccaggttaatgtttgggatttaaagttttaacctcatttccactaggacattacgtgttgctttgtatccatcgttagcagagtagagagtgtgaatcaagcgcacatgggttaatccagaatttcagatccatcatccttgtgcaaaggaaaggatatatgatttcaacatacacaagagctagtgtgaccagtatagcagagtgtgcaaattacccccttccccgaactatcgcggtcgatcgaattaccccactgaactcgaaaaccagatatcgctcaccataaactttcaatactggacaaaagcaccccctaactcaacatcgcagtggttttggtcctaagtggcagtccagtcaacaatttttattttaaaaatggtggggcccacctgtcatagtctctcctctctatcccctctcacctctctatctctctcgtctatcgctcgctcaccgctgagaatgagtggagcacgcgccggcggtggttggcccgacgcgatgggacggctacagaagccggcgaccgtggaggcgaaggcagcgcggtcgaggactagcggttgcgagtctcctcgaggcggaggccgaggatgaggcgtgccggcggtggctggcccatcaggctcaccaggcctcgtcctcctgtggttaggggagtagcggccgacaccggacttacgcaagaaggcagccatggcggggaagaggggaaacgcggtggggcggctgcggaggccggtgaccacggaggcaagggaggcgcggtcggcggcaaggccgaggcagctcggggtcgcgggtgagcgccgtcggcgggtgaggcagctcgaggtcacgggtgagcagcaaagagaagaggagacgagtggttcaccgtcgccattgaggtcactgttcggcgctgaggcggaagcggtggcgctgctaattctcccttccctggagacggcggtgaggcctccccccctctctctctctctccctcctccttctccactcaggcaggcggtgagcgacaaatcctcctcggggaacgcatggcgcgcgtggtgggcagggcgaggcgggcggcaccgaggacattggaggcggcaggctatcgtgacgagtttgccgcccatccccgtcgtccccgtgcccgattgttcctccgccgcctccgctccaatctcctctccttcccgatgccctcgccggcggctctaccccactggtcccgtcacgacgtgccctccgcaatctcgccgtgcaccagagggaagaaagagagaagagagattttagcagtactccgactgccgccgcatcctctgcgtgctcgctacgccgcccttgtctccgcctccatgccgctgccggcacgtgccgccctcgcttccacctccttgccgctgccggtagtgccgctctactgtgtcgctccgtctccccctgccgccgtgcgctttagaaggagggagaagagcgccgcgtcgttccctctccccagccaccacccgctttagaaggggatggagaatagagaggtggtggggattctaacgagtgggatctagcgattttttttaaaaaaactgatgattggactgtcacgtgtgctatttgaatcctaaaccgcttgcaacagtgagcgatatctggttttcgagtttagggggtaattcggtcgatcgcgatagattaagggggtaattcgtactttcctttatattatggattgagaacaagaggatagcttattcttcaacgcatccttgtgacaatctcctgcactcccagataaacagatcatgcatgagcatatatatcgatcttgttagaagatatagctagctttgattgtcagtcaaagatatggctccctttttatcaccatcacagtcaggggcaacatggctagaggtcacttcactatcaaaggtcatggatcgagtatactgatccacttttaaatgccgtatccttacatactccctccgctccaaaagtctgtctaaatttgtattgtagtactaaatgtgttatatccatccaaaaatctttatatatttggatggatatactacatacattttgtcctttaaaacataataactaataataactagaaaggtggcccgcgcaacgcgcgggcatccatattatttaaatataagattatattttgttcgtaagatatatcttataaattaagggcaactcaaggtcacacgtatctaaaaaatcattcatcgaaattttaatagagaatagattaaggtcacatgacatttgaatcaactgaataataaaatgctgctaggtaattatcatctctatcatttatacacatagtgtgacagtgtgaaatatgtctaagctaaacttgtgagagtaaggaaatcaaagttctttggattgaatcgtctcattaaggcacatgatatattgacaaccaaattaaggatagatcaaatgtttgattttttttcctatgtagaagttcaacaaattcattttttttcacagttttgaagaaatttaatggtatgttcagacacatatcactcacacaattcattggcttggtaatgcaaaatattagcaattgtttcaagataatttctttctttttttcatgcttgattgttttctttgaaacaacatttgtttgaaataagatcaaaattgtataaatttgattagtatgtgtagtgtacttatacatttgaagtgttctatagtaaagtttgcttttgtcatataatccaattgtatcaaataatattgttttatcatgtaaattataatcaataagttcaatatgattcatatcatcataattaatgaaacttagttaaaaaatatgactacctaaaaattattgttcgcttattttgttttttttctccttacttaatggtgcctttgtcattactctgaatcaaagaaaaagtggcacatcataccatggctcatatatagctataagctattactctatgtccactcattgctcagtagtgtccttcactcaccgattatcttgtgatagtcatatagacaatatttatcaatttgtttagtttacataaagggcaacaccacattgctcctttctcatgcatggtcatagagtccaaaatgatttttccaaataatgctctgcattaacacatgtatctagaacattaactacataacatatacgtgtggaacacatggtagttttcgttctagattcacccttatttacatacatgtaaagagtgtaatgacaatcaatactgacacctattaacaattgttatatacctaattagaatatgtcttaattatattcatctcatgactctgactatctttgatcaccttgagtagtagaaaaaaataattgtactgtgggtttaggatgggtgaaactaatggattatttgatttttatgatatctatttgagggtataaatgaatgaattaacttatacaaatttgaaatgttgttctggaaaaagcgctttaagaaaaaaaaaatagaattgttttcccgaaacacatcttttaggaacatgggaaacatgcaaatgaaaatacaaaatctagatcgaaaaggaaaaacagggagtaagactcccttatattatataagtacaattaggtaatcaacccttcgttttagcttacatagagttgcatgttgcaaaaacttaacccaatggacttcattattttccttctgcaatagtcgttcaatttgttttcactttattaacaaaacaatcattatccattgatgatttgttgtgtcctcaccttggcaaactggtacggtgtggtgatcgtgatcaccttacttgcctcaatctggtgcaccgcattgtcgtggcgcacgcatgcatgtgttgtgtagaggaacggactgatgtttttggaggatttttttagaaaaatagatctgatggtttattatctatcaatttaaatgaaaatcgatagtcaaatattttagcaacaatatagtctcaaatattgggcccacttgttggtttaaatataaattagtcgatatagattataaattgttaatttaataggtataaaatataatggtgtaaaattcaaacaattttatatttgaaaaaaaaattaatccaccagttcaagtaaaaaaattatcttatattattaatttaataggttaaaaatacaattttttaaactttacttttaaacattatagagctaatttttagttatatttatttgtaaagagttaatttatgatgatatatatagtctatgtttgtaaaattataattattttaaatttattatcactaatataactgttttatcacatgtacatggagaaagttggaaaggagagagaagcagatgtatttttttaattgatgtatataatttgtgtttttatgtttttttggctttaatcttcttttattgatagtgcgttacttacgtactttgtattttgggggtttttttttacgatcagtactttcgtgaacgggagattataagatggaagttttttaaatagatctaatctaacagtaaataacagatcaggtgttttgcttgtgttttgcttttcttttagaatttataggaatttctttaatttattaagtgccacataacagcttgagagcatttgtataaaatttaataaactttttatatataatagataatagattgataaatacataattgaaatatagaatgataaagagtgttgattggatatcttatatacgatctagtttaaccgcatatatttatagagcgatatattttatttttaaatagtagaaaatcctactttaaaggccatcaatttttttaatgacactacgtacgtatgttttttctttactttatcgcttttatccggtgaagagtagataattaagcttcatcgtttttatttcagatgtatgtacgtactgaatactttcctttttcttttccgtcccacaggaggaaactattactttttaaaataatacatctaatcgaatggtccataatatcgggtccaccaattttaatgaaaatcgatgctaagattaaatacgtgacgacctaggagtgtttctaggagcgccacatgatggcttaacagtgtttgtaggaagtttaatggacttttagtatataatagatagatagatagatttctgactataaatttagacatgggttattgaggttcatagctagatttttttttaagatggcttgagtatatgcaacgagaaacaaaggcatgcatacatgtcatcatttggttaattagactattgcaacttgcaatagctacctacctgatgtacgtcgaagcaagtacaagttgcatgcaagctttattgtctgtgtctgtctttaagaaaattaaagcagggagactctaggatcagaaagaagaataagctgttcaaaatagaccaactgttcatgatgcttttcaccttcctttcgttaattagaagcatataatcccagagatttcagcgtcaaggggaaaccatttgtagcttggtagcacaggttatataattaaagccaccaaccaatcatttgggctaagatcgagcgatactgttacggtgctgttgcatttacttttgactaattaatctgcgagctaccaggccaaatggatcagccccaatgattaacaacgctcatggattggaactaattacacagattcatcccgatctgcaggtaacaaaaatatgcgaacctttctgcagccaatctatgcaatggtacagaagtgtaaacagataattggtggcttgcagagaagatgaatctgaattatataagcaggttgggtgcttcttgttggtggccatgtgagtatcagtatgtgacccaggatgactcggatgacacagctctgctcgccgaccgatatgaaaatgacggtgatcgactgcgactgccaccagttggcggcggccgaacgagaccccccgcgtcgttcctcgtcgtcctccaccttcggctccctgcttaaactgcttcgccgacctgttaactatttggcaatgtacctgtgattggctccctttcctaaaccttccgatcctgtttctataaatcggttgagcgttctatagaagcttgatgcctatttgtacagctaccatgtatcaacatgcatgattatcgcattgagctgtatcatccaacattccctgctccggcggacggccctgctcgccaagccctggctctgttggtctctgcctctgtctcaaacagatgttgttcgagccattgactggatggctaaaggagaacagagagaaggaaggatgataggacgacaggtgggccctgtaaattcattattattatttttctgattgggatgtcatgttggcaccacgtgtaccagtttaagtcaagacaatccataagggataatttatccggtacaaaaagcttagggtgtaaaatatttggttttgtattttccgggggtaaatcggattggcacaatagttcagcagtgtaattcaaacttttttttttaaaaaaaagttgttctactattttttactctctatcccaatataactgcaacatagtaaacataggctctatttagttcacaccaaacttcctccaaactcccaacttttcatcacatcacatctaaaacttttctacacacataaactcccaactttttttttccaaactaccaactttccccaaacttctccccaatttcaggaactaaacacagtcatagtatagatgtgatatttgtactaggttgtatttatattgagacggaatgagttttaaagatagtcaattcgaatatgctaccactcggtgacaatgatgcatataaaaccatctatgtaccctctatttaggggggtttgagattctgagaattaaccaatgataatcacttagtaatcaatttagcgaagctgaaaaatgcctttagtttatttttattccacagttgctgattcttcaaatctagattgtttggagtagctgtagagatttactaatacacattgtgctgcttgaatctttttcaaacatgaccatagactagatgataaataatcatgatctctctttgccggagcaatggagggactgggagaacacataggtgagagtgagtcgatcaaacgaaggacatggggtctgtttacttcttgccctgaaaatcttgcctgactcagacgcaattctccgacatctaattttgtgtctgcagctggatcgacctgcctgagcgagagccctcaggtcaaccaaacaaggccatgatcccccgccgctcgtgggcgcacgcacaggccatgtgacccatgttagtaggccgccgcgcatcgatctggacgcgcgactgcacctacgacgttcgcctgaatgcaagcatgatgcatgcacccgtagacgttgctattggagatatatcctatatgcagtgtagtacaagtactatggtggtagtacgtactatattttgctgcttttgataacagaggattatgagaaaaaaaataccagtaagaaaaggaaaagaacatacgtgttcccagtagattttggttgccaacagtgcgatgacatagtaattaccggcgaattaaccatgacaagctgacgcccaatggatgaagtggccgagctagcactgcagattaaacaacaaattaacctgcaatggccaactaatttagctagatagccaagtttccgtgtcagccatgtgcgcccgaggagggctaccttgtgcagctgccggaggatcgatcaatgcagacatgcgcacattcatgcatgcagctgcaggagcatgcaacggcggctggtcttaattaatttgctgaattgagctgatctgcatgcatgaacgcgtgaaggcacaggcagagggccggccgttggtcgcaatgcagaggcagctaggcgcgcgtacagtgatctgcctcgataccgcgtcgatccatccatcggctggtccgtcgtccgtccgtccctgtcgcccacgccggagcctagagatctgtcggcctttgggcagccacccaacagtcaagcgtcgtgcgtggtggctggaccattttctcgtagtaccaaactgcgtaccaaaccgatcgatcattaactaccttcaagagtactctctttactgtactattcataatcggaggccgtatgtcgactaaatgctgaggtggagaaaataagaaaggagagagaggtgaagcgggctgtaaacttacagtcggcttggatgcaagaaccaaaaaattctgtgagagagacaagtgcgccatatattaattgtaagagtaaattgcgttgacggtacaagaacttggcgggtgggtgcgattaagtacaagaacttgaaaattagacatatcgatgcaacaacttggctaggtgggtgcgtttgtggttcaaaagactgccacataagattttttgccacgtcagctttccaccttggacaaagtctacgtgagggccctttacacatcatattaattttgcacaaatcccctgttgtttttcccatttgaggacattttctagtacggatcaattaatcaccatgagggataggacctcaaatatgtagcttccggctgcagcggtcggtgggactcaaagccggcgtgcggcagcagtcgtcgggactcaaagctggtggcggcggtcctcgggactcgaaaccggcgtgggtcagcggtcgatgggacacgaagcccggccacggcagccgtcaggactcaaagccagtgcagggggttgttagacctcgaagccaccatcgctgcccatggccgtagtaggttcccttcaactgatgagaatctgaaccttccatttttttgtgctgtaattttatgggattcttcgtccatagtggaatcagcatcatgataactgcatctggtgtaccacagtgagaggactctttgactctttgttgctgtcaaagcagtatgtgagtgaataatggcaatgtaggtgcttttgtaaatactctggaagtgcttttgttatataagggatacatgaattttttagctacttaaatgaatggtgaacacgatgtagcaaatactgcttgtattctctcttttggaattgtatgtccaagtgataacctgaattttgctaacattgctttgaccagtagcaatttctgtacagacatatgtggtatgttttcttgtccatagacaaatcctggcagaaatgtgctcctaatattctgaaatgttttaccataaatagctgttgtataaacaggaaaaacaagagatgttcctgaattggaacttagagcaatgtaacagagcacagtccaaaatgaaacatgtctgattggttggcaaaaaataaacagaacttctggctaaattataagctaatcctttttatcaagttgaatatattgttcactttttctttgtctcctcccttttcttcaactctgatttcttattgggttgcgtatttctcttccttggctcagcttttctcttccgaattgttgccctgccctctttggttgctgtcgttattggcggctgcactgcagcttttcggtttgtggcaataaaatttgattccggcagtggaccaaggtcaaatctagaagagttgtttataatgttctgcagaaagtacattgaaattgtgaaaactgttttataaagctataaaatggaaaattggcaaagcattgtctaacctctctcgtcaaggaagacaatatggtattttgtaactgatcatagctaggttgtgtcacgcccagaaattcacgaaccagaatttctaagctgaatgtgtattaaacccctgtccaggaccagccagggtacacaaacgacaattgttgacatacggatccacgtcttacaaaaatacaaaatattacaaatgcagcgaaaaaggtaaaagcgagctaagcctgaagacttgactcctgcagcgggcaattccattccacaggcaacccttgacggcagcgacgaaaccaacctcttcaagacatctccaactgagaagaacttcaactctggtgtgggggaaaagagcaagactgagtactacccactgtactcagcaagtcataccggaagaggaggtatgatgcaggatataaccaaaggaggctacggggttcatttgcataaagcaggcatttaaaaccagtagttgaaaacagtaaaaacagttgtagtaattaagcaatattaaccagtcactgtccaacgctacgccacgttgcaacaggcccaaccaaccacctgaactacaccagttcattaagctaaactaggggtgagactaatcacggtgaatctggtcgaccacccataaccgcgggcacggctattcgaatagttttactctgatcagaggtgtacaactgtacccacaagacacagccccacgacacgttcccatgcgccgacatgccaccacgacataccggaaagaggccgtgacaggacctttcgcataaccctttttaaccgatagcaccacaccttagggttcgcccccgtccccagcaggcaacgggcagcccccctttcgtgccgcggtgaatccggaagccgatcaaccggacaccccggccgacccaactccatcacgcccaccctcacctgggtacgtcggctagagaaaagctacactacaagcccagccgttgcccacgctggcttgtggtaagtacgataagttcttccagggcatcccgcgaaccggtccttaatcgccatgggcacgactagcaaaaccatgcacccacagcccaccatgtagtgtattttaattaaccaacaccattgtggtggcactaatccaaagctattgccaataatcaaagtctatgctttaatgtgatccccttttgtgcactagttgaactaagcatggctaagcatctcctaaaccaatatctagtcattttaatacccaagttatcaatggcgtaagggaaacaacatatagctgagtaataggacccatcccacatgatattgtaaaacaatgcaatatttaatagaaatgcgggacatttgtaaattgggtacaatatgatcaattgcaatgtatgacttgccttgctctcgcactgatggaaccacagcaacgtcttcgagaaaccacgaatcgacgaaacgggcgaaatctacgcgacaaacaaagcacacaagcaaaacatgctataagactactgaaacaggaaacaaaaccatttttaatgga

SEQ ID NO: 11760 - DNA, 1779 bp, Oryza sativa
cgtaaattttttgaataagacgaatggtcaaacatgtacgaaaaagtcaacagcgtcatctattaaaaaacggaggtattaaaaaacggaggtagtacttgataacatgccttgttgttgtgtttggtcacagattacttgtctattgcctactacatagagcctgaaacaacagctagaaagttcaatctatcaataccttttagctgtggtgctaatattgttgtacatgcaattaaatgttctgcttttactttcttggtacttgatccaaacaatctcttgaaagatctattacagatgtactttggattatacacgggggagaattacacatactagtttatcatttaaatcttgaagatactgtgatgtcgacacctcatgcatagcatgtttgttacaagagaacattttcatgtcgattttttatccattattttagttgcgctgctaacatggattcgttttcccaggacctagttcggcacaatccaatgtttgctgtgaagcactttctccctctcccctgtatagccttgatcacaaaagggtgacatggtgaacctctcatttagctctgccaccaactgattccagctcctgttccccgctcctttgtgtgtaagaattgagcaaaactgtacagcgcctcctccgatgaaaattttccagctacgattcacttgcaattttacgatcacagaattctgtggcaatgtctatttgatgtaccaaaactaccttgtagaacaggtcctgtaggtagggatgaaactggttcggatagtttccgtccgtctgaaccaattttcggattcggaaaaattcggtcggaactatccggaacttttcggattcggaaacgaattcggattttttttctcggatacgaaaacgaatacagtaagggtgatatccgatggaaacgtaaactgtcggaaactatctgggatttttcatcggatatccgatattttagcaaaagagagatttttcagccaaaaaaataaaaaaaccctaaaaccctagccggccgccttcgcgccgcccactgccagccgccgcatggccggcgatagatccgcgccgctgcggccgcctgccgctggccgtcgcggggctgagcgccgaacacctccgtaggacggcagatccggcccctcccgagggcggcgccgctggatccgccgcctgccgctgtcgcccaccgacgctgtcgccgcgcatcgaagccgtcgccgtagtcgagcccgctgccgccgcccatcgccgtgacccggccgccccaaggccggcgccaccggattcgctcatcaccgtcagttgcacgtcgtcgcctcgcgccgccgagccctcgccgtcgcctcacgacgtcggatcccgcggctccgggaccgccaaccctggatccagccaccacgaggctcgcgtcgccgttcgccgcacgccgtcgcctcgcgccgccacgccccagtcatcgccattgcctcacaacgtcagattgggccgctccggggccagcaccgtcgaatccgctcgccgccgtccgttgcacgccgtcgcctcgcgccgcggagcccacgacgtcggccaccccgaggccggcatcgccatccggcgcacgctgtcgtgggaggaagggtggcggctaggagagtgggactgtgggagtggccgggtagggttaggtttatgtatccctctatctaaatgggccaacgggcctaagaattagctaataagtctatatgtactccctcaacttcgaattaaatt

SEQ ID NO: 11761 - DNA, 11538 bp, Oryza sativa
agggaggggaacttcaggcgtgacaggttggctggttaaaatgctagtctgactgttcagaacttcaggcatgacctgcagaggcataaaatcttcattaccatgttgttgtgaaggagcagcactggcttgctgcttttctgctcatatatcttccttcctcttcttgcagcccttctttttgtgattaactccttgacagtagctacaatgcatttgcacaccatgcttggatatttttgttcctccttcaagttcatgtggctgctttcttctacatctcctaggccttccaactttcttctcataaatcggtgggttcaccttggtccattcatcttcacccaagatgccttgtccctaacaggcattatgttaaatccataggcctccatgtatttttcagttgaataatagaaggataccacatcttcaggttttgtcctctcactcctcaagcaagaaattgcatggttgcatggtatccctatcaattgccatctcctacattcacagtgttttgccatgaggtcaacaatatattggtgttctttatcagttgcttggaacacccctttaccagcaggtaatatatagcatgtatttgacaattctgcatttttatcaacctttttctatatttttgggcatatgtttcccgaccacttctttacacactcctcttgtttggtatgtatcctattcatgatttggctcctaatcttttcaagcatggataaaattggaagctctctggcttcaagaatgtacttgttgaatacctcggaattgttgttgagtagaatatcacacttggggaaatcactaaagaatgctctgcaccactggttgggtggtatttcctccaggtaggcataagcatctttgctaagagacttcatcttttccatgttaaattcccactctggtatagtacttgaccttgcaattgcccacaactgattctttagagtctcccctttgtatagaacatgaaaattttggtacaaatgcctaacgcaaaatctttgttctgaatctgagaatttatccctcacagctggtaccaatccctacaaaatttaaaaaggaagggtgagtaccaatccattgaacagtaaataattcaaatattttaaaaatgacaagttgaacaaaatcaaatatgatggaataaagtcacaccttctgcctgtctgtcatgatagtataaggtccagtgttgtcgataaggagatcttctttcaaagtattcaaaaaccaaccccaactagctctactctccacctccacaacagccatggctataggatagatgcagtcattaggatcaatgcctactacagtcaacaaatgtcccccaaacttggttttgatgtggcatccatcaaggaatatgataggtctacaactacttaggaatcctcttttgcaagcatcaaatgacacatagcatgtatggaagcacatattttgtaggttcaagaaaaatttactacctggatttgaagtcctaagctcttgtccataatcccacaacatatcgtattgtgctatttcatcaccatatatcgctttcatagctagtttccttgctcgacctaatttatgtcttgatggtgttacatttagttccttttgaactaccttagagaaactcttgagtgtcatcctatcattatccctaaagctttcaacatatctatttgcaagatacctagcagttacataattcaactcccactccttctgacatttgtggccatctatatatctttttaccataagacaattcgtcctgctgtcctcagctacatccaacatccatgagcactcttctttacatttagcctcaatttttttcttggtatttcttgtaaatttaattgcgactctattcttcacactgtattgttttattgcttgcctaacttcaatagcatcagagaacaacatcccaaccttaaagattggtgactccatgtccacagcagccacaaagttcttaaatttcaacttaatgccttcattatcttcatcagatgactctggaagcaacaagccttcatcatcagagtcatgttcaggaagcttaacaaccatcttgctgctagccacttcttctatctcaacacagttgtcaaaaacatcatcatcccccttgttagcctcataatcactgtcaacaaagtcaggatctacatcgatgtcatcgtcatcgtcaatgtcatgaccttctataggtataacacctgaatctttttgattcattgtagacctctcacggctagccacgataggtatagaagcaggggtagaaagagcaacatcatcccaattgatggattcaagaatgtcttggtgatccacatacaaaagcaatgtcctaaaccttggtgctaatacaaccatgctgttagtgcttgcatcagagttaattctccttagcccatcactgaatgtcttcccaggcaataaccaataaaccttggccttctcagacatatcatatcctagttgctcaataaaatcatcaagccataatgaagaccatgtgtcactgtcacaataatcaaaccaatccaccttttcattcaaataaattttgctactaccaactccagagaaaaaaccaccatgatgtagttcagttgtgaactgttcatcctcgcagcctatattacaagacaaaccattctgatgtgtcaaatcgtaaataattatctgatctattatacacaaaaagattatacagagtacatattcatgcttagagcaaaaattatttctaatcacaaactattcgtgaaggattacttatatgacacctagccttataaaacaccaaagcagtggcggaggcagcgccgggccaccataggcaattgcccaggctccatgcatacaacaacactgccccaatgcatatacaacatattactcattaatcatatacttaatcactttgtctcataggttataatggagattaattagatgaataaatagaaacgaggaagcaaggaccaaaccatcaaactgtagctacagagaccaaactatacaatcacaagattcaagaaaaaacagagaaacatgcaattaccggtacaaatcaatgaaaccctaactttatcaacaacaatcaattgaaccaaaaacgaaaatatgtaatcactagggagttatttaccataagaaggaggggacgccccaagaattcgccgagtcggcgccatcccagcgcacgaggcgatcacgtcagatcagttcgtaggtctgaattactaagcgcaccagtttgggatgatctcagatcagcgtggctcatatatgatgccctcgcaaccggtgcagaggcgatgcagttttgctgtgcactcgctgctagccgccgtcgcctcttgatctgttgaggtgagtaaatcacggatagaaaaacagaaccaaggcacacatattttttgctatgttaaaacaaaagaaccaattagaatataaaaactactaggaggttttttgtaaaatgagatgggatatcactccatgatgctgatgctaacgtgggactttgtccaaggtggaaagctgacgtggcaaaaaatcttatgtggcagccttttgaaccacaaacgcacccacctagccaagttgttgcattggtatgtccaattttcaagttctcgcacttaatcgcacccacccgccaagttcttgtaccgtcaatgcaatttactctaattgtaaatagctaactattatatgtgtgtggctaagagaatgtggcaaagaatcttatagccaacaagtcggctgtattattagccttgctctaagtagtagtaggagatactccctctcagtactcataaagaaagtcgtataggataatgtttaaatcaatcattgggaataaaatcatgaataactcttagtttgtttagtttgaaaatgtaaaaattatatgaatagatttgtcttgaaaaatactttcataaaagtatacatatatcacttttcaataaatatttttatagaaacaagaagttaaagttgtgttttggagaccgtgtcgctgtcgaaaacgacttcctttacgagtacggagggagtattaaattccgacaaataattctctaaattattacgagaatatccgaccatcgtaatagtttagagggattaatcgtcagactttaatgtcttctactactcatcattcatgagctcataaaaactaaaatttatgaatattccataacctttctacttttcaaaccagacaataagaaaaacccatataaaactagtcggcggtagatttggtctaagctgacttacttgatacaaacgtgacagatcaattagcaaaaagcattaaaaataattcatagaacacatgtcatatgcatcacctctccctctctttatctccttctattagacggaggcaactggaggcttataattaggtcgaggacaacgtctgttggcacaggtggaagcagttgaaagctcaggctgtggagctcgagctcttctctcggggatttgcatctggtttaacagatactttcacctagtgccaagtggagcaaaataatggtcacacacaacaccatatcataaaaggaaaaaagatatcacaaacttatttttctcaccatatcataaaaggaaaaaagatatttgtaaaacatgtgttctacaaaattaaactattgcttcacccagtcatatgcaatattatttgagaacttattttaatctcttagagagatgtactcttattttttacatgtcatatagataattaaaaaataataataaaaatataagttagattaatatgtgatatatcattctaattgtttttttttaattttaacttgtacgagtgataatttgcatgcttgtaaaatgatatatcgcatattatatattttattattttttaactatttggatgatatttttttttagaaaatggattaaaatccggcattacatccacaatgaacttacacagccggccactatttggatgacatatatatgtatataagaaatgatgagatagtttagcatctattttcgtattatttcctttgcagcggacatagtacatgacccacagttaatttttggaacgagtaaaaaaaataaaagaaatgatcgagatgacccacagttaatttactcctgactgaatcaccggcgggcaattcagctatgcaagtttgtcgtgcatagcagtcactactgttagtcctgcataatcagacaaagacgcatacgcattgtcgtggagtgagctagagccaatgtgcggcagagtgtgttaccacgactgactgtcactgcatgcagcactaataatcgcttagcatgtgatgcacgtacacattattgtcagtcaatgtcatgtcatctctgcacggaccaatattatctgcgccaatcaggaatataatcaactcagctagtactaattgttgattactttgatcttccctttttttggctgtattcttctcctctctttttttctttagcttagctagaccagtaggagtacgttgtcgtagtaatagacgcatccaattggcttgatttgtctcgagcatctggtttccttttctaacaaaaatcattagcgcataattaattaagttttaattattataaatttagaaaactgatttatttgatatttaaaacaacttatatatagaaaattttctcacaaaacgtattgtttatcaattttaaaaaatatggaaataaaaatcaagataaaacctatttcatatgtccctaaatataagagattttgattgaatgtgaccaatctggataacttgtccaaattcgttgtaataggatgcgttacatctaatcaggtactccctccgtttcgaaatatttgacaccgttgactttttatcacatgtttgaccgttcgtcttatttaaaaacttttgtgaaatatgtaaaattatatgcctacataaaaatatatttaacaataaattaaatgataagaaaagaattaataattacttaaattttttgaataagacgaacggtcaaacatatgctaaaaagtcaacggcgtcaaacattttgaaacggatggagtatataataacaaaatagcacgacctagatccgaacaaaatctctccaggctccatagtatttatctgagcaacttgtgtgggcggcgagaggcagctttacgctcactcaccggccgctgatgctgcccatgtttcatcagtacgaggaaatgcaatgtatactactatctacatattttatcttggcacacagatcaaggataaataattctacttgtcatctatttaaacatgctactagtcattcctcgtaaataaacaattcattaatatttacatttctcaatgcctatgtagccaatcatgtgtggaagaatggagagtcacacattaaatccgaaaaaattattaaaatgatagattgttggattgaaatatgactactaaaaataattttttcagatttagaaatatgactatcaaaaataaatggagggagtactccccaaaccagctacacacaaagggagtggtcaataattacctggtccatcgatcggttccgacgattagtcagaaaaagaaaaataatcaagagaaggccaatgagcatcgcgatttgtgttcgttcagatcgccaatcgatcggtaccatgattgtgattccaacgacggaattgttctcttcctagcctcagggccctataggcaattgattaaccgtcacctgcatggatacactgtacagtacctgagtaccatacggggttcaccaagaattctgtcaagttgaacagtattgtaagtgcaagtagaataaaaaactataagctagctaactacaaagacctgtggaggaggaagaaaaaatggcttcatatttattgtcagttattaatagtactgtagtactccctccgtccaaaattatagggcaaataaacccggtagcttttgactaataatcatactaactatatctatactaattattatgtacattatatcactagatttatattttcaagtactgatgttaatttcatatttcttggaatcatagaataaaaaaatactagtcaaaatatattattgaaaaccgtgtaaaaaaatataggttttataatttggaacaaataaagtatatatttatatgaaactactatgtgtaggctattatattagttataaataacatggttaatttttagagctatcagctgagtatactattaaacgttgctcttatgtcgttagctgtgatatgctgcctcgggcaacctagaaaaactcgaggagtcgcgcggccacttgcggttgcgggggaaaaaaaacacgaaagcataggcatccacgcgatcctacgatgccagcgcgtgcggatgccgcgcccaaaaaccggtagctggtttcgccgccccgtagggagcgcaggcagtttcacgcgcgcggcccttgtttcgctccgcgcaacgcgcgcgcgagcccaaaaaaaaaaaacgacgggggaatcatcgcctccgctgctgggttgtggcttttttgccttttggcgcctagctacgtaccaacccacatcacgcgcgtgcgcgtggtggcacactggcatgcatatggttgcggggggaaatcggggaaaggaaaacgcgcggccctcgtagactcgactctctacactcgcgcgaggcgagcgatgttggaggggaggggggttgcgtgtgtgacaccgctcgggttgtccctctctcgctcgcggatgattccctcgcctccaccatcgatcaccaccaccagcagcaccaacccaaccacagcctacgcatacatgcagagcatatatgctgctttcctttccatagcctgttgacaactagaggaacacccggggtttttcggctagcttcataagatgattagtctagatgaactggattcaaaacctcacccccttttaattatttgatattagattattttctaatattcgtgtatttttagcctatagccattatatattatgatgacgataataatccgacgacgtctaaggatgaggcaggttaattgggatttgtcctcgcaaaaaaatgaaaaaggtttattgggatttgtgaggaggatacgactacgaggacgatgtttgcatgttgacctttgttgtggggcaggtcacaccgggcaacaatcatatgtgccgcaccatgctagagtgctttattttgtttttgttggttattcgtgtgagttatttaatttgctccacgctttttaaatatttaatttatctctataatcaagaagataatccatcaaaataatatgcttaataatcatgtgtgctgtgatatgcggcattgttgtttttgctagtattccataaaaaatattacaaaagccaaaacataaatcaaatatgaaaatttaggaaaagcaaaaccataaaattacaaaatagataaattaattacacatgataagctagtatgcgttgatgctgagattctagaggattctttttcaatttatttcttcaaaactaaaaacatttttatgctctctctctcccctctttttaaattgtatttgacatgtagatctcacggagtaggttgaagcccatttggactaacccatgtcatgttcagggactcaaaaaattgttttttagagtgtagagattagatgtcatacccacataagtttagggactgcccgtgcacttcacttttttttatgtgtttgtgaatgtaaacacaaaaggaacacaaatttagattaatgcatcgcatctcatttgtactacactaaatgaatatcaaacaaaaatttccaaggtactgcacccgaagagatagggaatagaaagaacacaattttttgggaagatagttagattagaggaagacctttagttgagaaatatccaacactgtattacttttaccaaaaacattactagctgttgcaaaggaatttaaggagggtgggggaggggctatcaaatttagaaagaatatgcgaagtgagatagctcatctgtttagtttttctagaacctatgtacccggatttgagttctaaacttggtctttttataattctatggagagtaataatctgcaattccctttctcagagatttgaatgttgaaattacctttcaaaattaaggtggtctcatatatggttgctccttagaaatggtatccttaccaaagataatttccttagatggggctggaaaggggataatttccttattggtataataatctaattgtgaaactattggacacttatttatgaaatgtgctcaggcttgatttgtggagaacgtaattaatatcactttcaatttgggtgcaatttagaatatcccacacatatttgagggatgaaacaattttggaaaagaaatgaggaagctaatagaggtaggtgtataaccgttgttccgtgagcaatttggacaaaaagagaaatggtgcttttttttaaaaaaaaattactgctaatagaggtaggcttgattactcgcccgttggagcgaatcagacatgtctatttttgagtttcattccaaactattttaaataaatcacaggaagagacataagaaatataattttatgagtgagagatgtgggtaggtcagacgctaaataggatggcaagtgacatatatataatgcgagatatggccaacgaccttggagaagaagactaagatgaattctctaagtcttggcatgaaggttttatttaagaagaaatgagtgaaagaagtccagggttttggaaaaatgctacttatgtcatctaattttggaccattttctatttttcggttgttaaatacaatacttatgttaagtgttttttctctctgtagagcaacttgaaagacaatgggatggcattattaagtcaagtgtcgttgataatggattatgtactatttgcccatttatgtaaatagaaatgatagaggccttgacctctctttttggaagaagataacatgacttgagaagcatactaacatagactatcttcatgatagtgtgagtgtgatgtgacgtctcaatgccatttgaaatctgtaggaagccaacgacatagtctatttgtaccaccataaacattatctgcatacatattcatactagtaccaagtttaaaatgtcaaatgaaaaagttggagagaaagataaacatatattggggttgagagagggacaatacaataatgggtggagaaagtggataagtaaaggaacaccaatatttgtgtggacgatgaggctatcatgttacgtatttttacctatctcgactgagggaaactattttaatcccttgaggggatgtctcctcattgtttgcatgtcacttaaatggttatgaaaaaattgaaaaaatttaagaagatgtattaacatgtgatatatcactccacaaacatgcaagttcaaattcaactttcacatctcacaatgaaaaaaacaaatttgactgtgaatatacgttaactagttgtaatttaatttgttttttcgttgccaaatgtaaaagttgaatttgaatttgcatgtttgtggagtgatatatcacatgttaatacatcttctcaatttttttttaaattttttcataaccatttgagtgccatgcaaataacgaggggatattctctcgagggatcaaaatccactccccctcgacagataaataaccatttttttttgcgaagaacaataactttttatgacattattaatacagatgagttttatatttataccaaacttcaaataaaaatatttagcagtatttgctactcgtgttaatctctacagtacaagttctcaagaaaattacactttgccccgtggggagttctaatcttccagtatttctcgtcgctctcgatgcaattgaaaaaaatacacacgagttgtaacgaacaaaaaggaaaaaccgcacgggtttatcatcaaagctggatctgcacaacaaacagcctcgcaacagaaagagaatcaccacgggacaaaggcggtgacgtgtcacgcggcgcggccccacacgtccgcgtgggcccggcacgtgccccgcggcgcgggggccacctggcgccgagctgggctcgcgcgggtgtggcgacgtcggacgcgtccaagacatcggcgtggcccgtggccaccacccccaccggcgggccccgccgtcgccgccgccgccgtctccctcctccctctccaactataaatacctcactcctcctcttcccgcctccacacaagcaaaccaatcatcacctcttcttcttggggtgttcttgactggaaggtttctttggtgatggcgaaggcgagcgtggtggtgcctgagcaggtgggcgcggcggcggcggcgcaggtggggtgcccctgtccgggcacgacgctgttcc

SEQ ID NO: 11762 - DNA, 5017 bp, Oryza sativa
  unsure (1)..(5017): unsure at all n locations
ccgccctggccgccggagtcgacgaggagcacgccgcctggatggtccgtttccgttcaccgattgatcgatgttcgtcgcgttcttggcgcgcgcgcgctgacactgacatgaaccgtgcatttccgttcgtctttgtgcaggcgaggcacccgtcggcgctgggcgagttcgagaaggtggtggcggcgtcgaaggggaagcagatcgtcatgttcctcgactacgacggcaccctctcccccatcgtcgacgaccccgacgccgccttcatgagcgagacggtgagcttgagctcccctcccctgtcacctactctgctcctccactcatcatcatctcacacctctctccttcctcatcagatgcggatggccgtgcgcagcgtggcgaagcacttcccgacggcgatcgtgagcgggcggtgccgcgacaaggtgttcgagttcgtgaagctcgccgagctgtactacgcggggagccacggcatggacatcaagggccccgcctcccgccacgccgccgccaagtctcctccccacaacaagggagtcctcttccagccggccagcgagttcctccccatgatcgagcaggtgcaccagcgactcgagcaggccaccagctccatcccgggcgccaaggtcgagaacaacaagttctgcgtctccgtccacttccggtgcgtcgacgagaaggtaactgatcgatctgcaagctcgattggttgattggcttttttcatttggtgatcaattgatgatggaattgggggtgcagagttggggggcgttggcggagacggtgaggagggtggtgagggagttcccgcggctgcggctgagccaggggaggatggtgttcgaggtgcggccgaccatcaagtgggacaagggcaaggccctcgagttcctcctcgactcgctcggtacgtgcagtgtgttactactctacaactttgccattcctcgtcggcaaaaaaacccattggctctgctccgccgcaggtttcgccgactgcagcgacgtgctgccggtctacatcggcgacgaccgcacggacgaggacgcgttcaaggtaaataaatacttgtactactaaccgacaaaaattactgcatgctgccacgctacgactacgtgtagcagcagcagtaacacgagacgctaccactacttcgtttgcaagtggttcgacgaacgtacggccggttcgtcgcgtgcagctagcgacaacgtacgtcttcttctacgttggactaatcggcgagccgtgtgcatgatccgggcaggttttgcggcggcgtgggcagggcgtggggatcctggtgtccaagcaccccaaggagacgagcgcctccttctccctccaggagcccgccgaggtaattaagcaaaaccactcgtacgcacgcatgaaaacgttcgtatcactctgctcatgtttgtgttgcaattgcgacaacaggtgatggagttcttgctgcggctcgtggagtggaatcgcctgtccaggacacggttgaggctgtaacaattgaatttaaccggcgaggctagctagagagaagcgcgtgatctgggccgtccaagcgattacatcggcagggtaacccgtgacgctgatcgatcgtggattctacaccaacacaggtgctcgaaaatggtgtccacattgcagaagcgcagagagctaattaatcaacgacggacgagagaaactgatggctgtctggccattgttgtgccataatcctgtttagttcttcacctttctcccttcttcttttttcccatttggggccccccttttggtaccaaccatgtaaattccgtactactagtaccttgtcatgcacaagaggaagatcaatgcaaataatgaagagcaactaatgcaagtatatactcatcagcacattttctttctgctagcttagctatagctcttgctctgatctgatgcaccaatgatgcattacacatttgctttagctgaagaaaagctcagtgcactacccactgccggcacaacgtagcaacaggctgaaccgcatattggtcaattgggtgagtgtaaagcttgatctgctcgttgatggatgttgttaggacgagcagtaaactgggcctcactcacatgatcggtagcacggagtggtaccacggcttctctactgctctctgtcaatggatccaacgacacattgccttgtcatgttcttcctgtgaatcatgtcctcatctctgaagaagggcctgccagagcaacctctttcagcgtgttcttggtgggcgaagctttcactgatgcacaaaatgagcagcaatctttgatgaggttctgtgtgctcgttgaccactaatttgttcggatcgaaagctcgacaatgtcagtaactatcactgcatcatgctctcgcacacatcgagtgaatgagacatcctcgatcgactcatttaagtagattgcagtaataactgaaacgagcatcgattaaccaacttggatcacttgcaaacaagggaaggtaggtacgacgctgcatgcagattgattgatctggtcagatcataatagtctcgcttaaaaattgcacatgaatcgcactcattttggatttggatgggactgatctcgattgtacacgttgatctgccttgaagagttacacgacaaacacagccggcccacaggcaaaataatccttggaaataatgcagagaaaagattagcatctgcaagaacctcgtactgagaagctagctgttggatcgatccatggtgcatttttctgcatccacagtggggtgaaggacttaaggacaaagtgagcaatcatcaacagatatactagtacgagttaatcataattatgtgttagatccagtgctagctatgatctagtagttaaaatcatttcttcctcctaacaatactagcatatgcaccgataataatcaacgagagaagtgctagtgctggttctacatgcctacaatccacgcatcatatcaatcattaaggttgatatttcagtccaatggcgcactatgagagagcccaaaaagtaagaaaaatgaggggttaagtgattttactacacacacaaaacgactgtccacagaaaccatgccgatgtcactgataggtgggccccacgggctggttagacttcgggggcccttttgtcggcggctatataagaaatcacagtacacatacatagctatttttttcttttttttataacaaacttaaaaatagtcagatatttaaactgttgtcgatttgcactctccaaaaagtttaaactgatggtgaagtgatcaaatgccaccatccccattggccagccccacatcagaaaggagcaaccaattggtggaatcttggataatgtatcttgatatacacaagacataatatttaccatttggggatatcatctgtgaatcacagttagtgtgcttatggagaccaagtccatgtgaagggtagtgggtgccatggaccccaccaactagcttatggagtagagacaaagtggcaagcgaactgctatagaggggacagcgaccgaccgattgatccatcgagcgaacgatcgattgaatgtagccctactatcgagagacgtctggcagttcccagcatacggcagactgtgagcagcaacttgtcatgccttgncaatatatatactgtataccatactataaacagactgcaggcggttgcgcatgctgactagaacttctgattggcgatagagttcaaagtgccatacgaagaataagctgaaggagttctttcttcttgctttcgaagctcagctatattgaccgagtagcagcagaactattttatttctcccatgatgtgggagctggattgagttgacttagagttgggaaattatccaaatgcattgtgaatcacaaattggcacgaggcaagttaacagtatgacaaagtgttactgacagattttatgtggaacagggccgggttgctttgggaacaatttggggtttttccttaatcccttatccagatacaagccaatagtagtagcaacaaccgacctgaccgggatctaattaagtcaggtcgacattgaacatccttatcaatgccacttttacataaaggattatgaggctaagcaaatcaataatcacctctctcattgctaatggatgaactgttaattggtggggaattaaacagcgcatatgaatcaaatccacccatctattcgctgaattattttatccatctaatcttaaacaggattgtgccctagctagcatactagatgtgcttatcatgatagactttcgttccaagcaattatcatgataaacatgccatgatcatgaatagttagccttaaagcgcgagaaaacacataattgaatggctggcctgttgttaatttttaggtggctccatggagccaatcatatatatgtgtaaatggtttgataggatattaccgtggatcaagcattaattgcatgggaaacattagaaaaaaggagtacatttaagtttgatctcctgttcttaccaacttgaaccccataactttaccttttgttttactttgaacctctttccctcgaaatgttgccatctccaggaagacaaataaataagatgttattagtacggtgatggagacgagagtagcatggccagtaaagagagcgcgctagtacaccaagtagagcttaaggaaaacaataaaatacatagtgaaaaagagataaataaggggttcaaagtgaaagaagattaaattgggtctaatgtgaaactctagtaaaaggaagcaggggcaggcccagaatttttgttgggtattcgaaatagaaagggataaaaaaatacaatatcaagcctaataaatgatatgtatgtatagtttcgtatagttatacactatataatatataatggctataagcatattttcataaattcatagaattggccatgaaatgaatt

SEQ ID NO: 11763 - DNA, 3456 bp, Oryza sativa
cgatcaatccggttttttttttgatgattttcaatatttggttggttcataagtagtgctatagccgtgccttgcgattgcagtgtcgtccgtgacaaatggcgatgttgggcctaccactcataaatctttggctacatagttaggttaaaacaagtttgtttggtagagtttcaacttttaaatttaaccccaaaagctgagtttaaatcggagttgtgaagcaaccttaaaccatgcttcacttttctagtttattttgtcagggcacttcaaccgattctattttctttttgagtttctagtttattttgttagacacttcgactctgttttctttttgagtggctgaaactttatgattgggatctaacaccaggaaaaatagaacagaaccaaacgtacccttaaaagttatccacctttcatggcccttgagcacccggccattggtggaccgcccagttattgctggcctccaattgggacgagaagcctccgggctccagacataatcactcacccaacccaagcagtgtccaaccgagcagcccaacaatcaaactgagtgccattttgccacaaagatcaatgagagattgagagtaccaaccaaacctgccagatcccatcagggcaagcaaaacttggcatgtcactgcctagtgccaacatcgctgcttgctgcatgactgcatcagaaacatataaccaacacaacaaacagcaggtaaacttgtctacaaacttcacccagaagcataaacagaatcaccatttcagttacaaaaaacgctgactggcctagtcaggagccaccaacattcggaacacaaacaggtaaaaggaatgtacagttgacgggtataccaccaccaccaccaccgaatcaccatctttctgacgaaacttatttctttttgtcctatataaactgaattcaaacaaatttaccaggtaatgggtatgatcctgtaacttaacctgaccgaccaacggcatacgcctcgcgggcagcctcggttgagttcttcacgctttcagacaagctggacatggctgttgaaaactttgacagccgatcgaacatggttgctaaaccggcctgcagggttgccagcttcgatccagtctccggtttgttaccttctgcttgatgattcttgaacattttcttgagatctgacatgatgttcttgatagagcccaaggtttcttcacccgggagtgacgcgattgctgaggaccagtcatcaaggagcacgaacatgggaggagcaaggtgccggcgaggcgagagcgtcagcctccttccccgggtgtgatcgtaaggttgcagcacgcatttctgcagccaggagtggagaccatccacatagcatttgtaagcagcaatccaattcgtcaagctggagtagaagaaacccatctcgttgacaaggttcaccaagggctgcttgtacggctcgccgcgaggagatctcaggacataaacgatatccgacgacgagacgatggtctgctgaactcggtgaatttcatgcatcattgcccacatgcgcgtcaacctatgtcaagcacgataaaagaagtatccaaatcaatgccaagaagttaccaataagggcaagcttgatcttggtttgagcgaattcgcatttgatgaaaccatgaatactttgttgaaagggtgcagcatttaactgaaaataaaaggaaacatagttctgacaatggacttacccttttaatagttcaagaagttggggctgcagctcttcatcccttaacttctcaattattttagagattgaatatagcacttcagtttctaccttgagccgcgaatacaaatctttaacaataactcgagtcttgtcaacttgtctggcactcgcatccctttcaaattggtgccttaactgaacgcatttcttatcatatatcttcttgagtgattctgtaccctgcagttcataaagtagctaggttagagtacagaaatccaattaagcagaaaaatatatagtatgcctcttacacttagacatagtaaaatactgtagcggttctttcccccatttttttgttactcctacaagctattctgaacccaaaaagatcatgacactaatgaggttatatcctaatgcaatttctgcattctgtaacctgtaggaacctctaatagataaatacaaataccatatataaccccagatatttaagacattattacaagggagtgattataaagatttaagatagtgaaagaaacatatatggctgtgtgcattcatagttgatgcagaggctcgaagctactgccactatataaaagaagtcaaaacaaacaaatcagcatgttcccttttttcaccaaggcctccctgaccactcgctaactcacactcctccccacgcttcccaaatctactctccaacataaccttcttacgtacttcgccaatgtaatcaaagttgccttcagccttacatagcaatcctctgcccccaatgcataacttatttctctaacacatcctatgcattactcaactcattttttatggtatgcccataaatttaggcacttgttttttgtttagacgttagaaatgtgctacctccatgactccatcccaaaacatagctacttctggctatgtacctggacaagtacttgtcctggtgtatagccagaagtgctatatttcaggactgtggtagtatataagtatcctcactttaagaaatatctatgctaggggtgttatatggttctcaaaagatagaggtaccttcagtaaaaagtggttgatgattgcaatttcctttaaagttatggtacctataatacctttcaaacaccgacaaacatcgcttttgaaatataatacacttttggtatgtgcaataggtcactgtccgatggctgttatccagaaagggttgaataaacatgtcaatacgtcatggtccccacataggtaaggcgaagtgtgccctaggctaacacttgagcaccctgtcgtttgtgggaagaagatccttacaagcatactataaagctcaataataacatctaaagctccacctcactgctcactgccactaaaattagagaaggtgagcaaggaaagcaaacgtgacggtggtttgcacctagacccagttgtgacaaaccgacaaaaagacttgggcacacccaataggtggctttaaaattagatgttctttcgtcgacctaggactaacacgccaccgccattcgccacattctctctggctttaacaataactatgtggccttaacaacatatgtatcttctctcggccataaggtgaggagatacctgcgatggcagatcttgaatgccttaataaccatatagttcttggttgaacaccttaataaccatatagcgttagcccatttcttcatgcaaatgtatg

SEQ ID NO: 11764 - DNA, 1767 bp, Oryza sativa
attcgattaatgagataggtggctgcctgaaaggcttcatcccagaattttaaaggcatagatgcatgagataaaagagataaaccaatctcaactatatggcgatgttttctctcagctgagccattttgttggtgagtatgtgggcatgacacatgatggataatgcctatggtagagaaaaatgagtttagagattggtattcacctccccaatcagtttgcatggcaagaatttttctatcaaattgtcgttctaccataacttggaactctttaaacttttcaagtacttgagacttatgttgtaaaagatagatccaagtaaatttactaaagtcatcaataaaactaacatagtatttctttcgtccaacagattctggagcaggaccccatacatcagaaaaaaacaagttccaaaggatgtttagaaatactagatgacacaggaaaaggtaactgatgactttttgcttgttgacaagcattacagactgactcgctagacaaatctgaacaaggaagactaaatttattgactacttgcttaacagtagagatggagggatgaccaagacgacgatgccaccggtccaaggataatttgatggcgctgtaggcttgcttcaaggaggattgtggtagggggtacagcctgcgccaagatcttcctttaagaagagttttcctggtgatttgatccttaagaaagaaatagtcacgatgtaattcaagaaaagcagagttatcatcaactaagcgatgtacagatacaagatttttcttagcctgaggaacatataaaacattttttagatgaatattacgactatttggggtatgaacaactgtatgaccaatatgacttatatccatacctgcaccgcttgcggtgtggatctgttcacctccattgtacttctccttcacggtgagtttctccaattctcccgtgacatgatcagtggctccggtgtcaatgtaccagtttgtgtcaacaccataggagtttacggctgcagctgcaacatgtttagcatcaggaacataatcctcatcatacctataccaacaatctgccgccgagtgaccacgcttgaaacagacttggcatgtgggcctcttgtcgacaccaccaaatccgccagatgcgcgaccacggccgcgtcctcctcctgaattgccacgaccacggccaccactagggttaccgcgaccatgactgctgcttcctccggtgttggagcctcctcggttggcgagattcaccgtgccttcatgtgcgccacggtagatggcctggcgcacttcgaagttgagcacttgggagtacagatcactcacagtgatcggttccaccctagcacacacagccgaaaccacctcgctgtatccttctccaagcccagtaattatatactggatcaactcctcttcatcaatgggacggactccagcgattgccatctcatctccaagggacttcatcttggcgaagtactccggagttgtcatgttgcccttctttgtgttggtgagagcgaatcgagtgttaatcgaacgcgctcgagtgtgtgtggagtacatcccttcgattgcactccatgcttctgctgcagtgtcgcaagttgcaacctgcatgagtacttccctcgtcagagatgagagaagaaatcccaaaacttgctggtcagcggcttcccagtcgtcgtacgccgggttgggcttcttcacggttgcgccatcagctgtgacgctgatttg

SEQ ID NO: 11765 - DNA, 7089 bp, Oryza sativa
tgtgtgcccatggacagagaccagagatgttatccatttcattatataaagaaagctcaatatcatctgcgtttgccgaccaggaccttcatggttggtggagccatccccaggccaacgttgtcgacgcagtaaatctgcgagcagcagcttttcccatagttgtttttactatcgtcaagatgaagccctcaccgctgtcgtcgcaaagacaaagcccgacctcaccaccgaggcttgtcgctacctgatctattagtaccgaggctcaccgccatcattctgctcctcgtcatctaaatactgacgccccgatcgagctcgtggcggtgacggtgtggctatggacatgaatggtggtagcaccgtttggcaatagtacgacagttgatggtggcggtggcctattgagaggcactactacataaacattttttctgtaggaaaatacatgtatattacaggcggactataaccggttgtgtatgtaaaaaatcgacctttattttcacatacaactccttaaaaaaatctgaacacgaaaatgtattttttaaaaaattcttatgcactcctcctggatcactccccttatcctctccactcatacctcatttttccttatcctccctcatctgctagcagcggtgggctcgagagcggcgatggtgagtgggagtgccgggagctgcacagcatttgcatgtcgcttatccgagcgtttgcgtttgtacaatgtttcttaaaaaaacaatctcttgagctaggtgcctttgaaaataccactattttcacaggatgattttttcaatataatagatacagaaattaatattacagctgttttggatctacaggacatctctttataattataagcagagttgtttataacttctatagtttaatttttaagtagtgcggacatctgaaagtatgaaccgcaactggcaaattaagtcaaaagagagcagcaatgctatcttgaatgatatattagtcacaaaggacaaaagcctattcgtctccatttcaacggaggaatatttagaagagcgtcgtcacgtgaacacatctgtgtggagaccggctttagaaagctctccgggcgtccaaaagaaaataaaaatccacgtttctgtgtaaaccgggctgagtcgtttgtcttattaactaaacttgtttaaatataatcgtatgttggtcctaaacaagacccataccctcgttactccgtcaagaacgctgcatataatttagttatccgctcgaagggtttgcacgcgcaacagatacaattaatatttattaattagcgtcacaagaatttgtcttaattacccgtaggcacatgcatgtatgtgctaagctagcctgtaaagcaagctttggcttcaaataattataatacgatagtatcatgttgaaactagcttaattagactcaggttttcccaattaagtcagggccacttcaaggtaccgatcaatttacctaacttttgacattaatttgatcgtgtgatatcaatggaggatttcccgtgcaattttggatggtctcgttgaattggatttaatatgtgcagttctaactttttattttcatatacacaattatattatgtatatatagatataaaaattaggattggactgatataaatctcttttcttctgtttttatacatacaattataacttgtatacaacctgaactatcaatctatacctatactgttataatttggccccacttcatctgatggattagattatttttttcgattaatgttatattgcttttagtatttatttatagagtgaatgtggtgagcccatttgaagactgttttaataatataatagatttagataagaatgtcgagagtgtgtgtgtacatatatatatgtcgatccagctttcattagtatcaaagccaaaacagggttcaacgagtttacagaaagataaaacttaggacttaaatttccgatcaggcatactttcacgtcaacttgagaagacaccagaactaccgaggatagagacaagcgtttataaatccatatgagagatgagatatgtaatatgttctaccttctacgattacgattgatccgattaatccatgtaacaagaatctctcttcacgccaaggagataataaaaggcttaaggcggagcactgtgtgatggatactacctccgtcttaaaatatagcaacttttagctatgaatctgaacacacagttgtccagattcatagctaaaaatgcttacattttaggacggatggagtatatatatccgaaattaactctcacttgcacgatgcaccggtcgaaacggtttgtcaaacgaggttctactactatactccctccgtttcaaaatgtttgacaccgttaactttttagtacatgtttaaccgttcgtcttattaaaaaaattatgaaatatgtaaaactttatgtgtatatgaaagtatatttaataatgaatcaaatgatatgaaaagaataaataattacttaatttttttaataagacgaatggtcaaacacggtgtctattttgaaaggagagagtacttcgtacgcgtgcggaggtcaaaatattccaccacttgctgtgccattgcacgccaacatcccgacaccattacatatatttgtcctaattgttttgatcattccattataaaattaaccaaatacagcaagcagctagctggggggggggggggggagacgagacgaccgtcgtgtctctatcttcactatgtttgtctgggaaaaaacaacagactgaaaaaacaattaatcttgattcagacagagatctcagctggatggatcaaattactcctcccggtctccacgtatagacgtacgctaataaacactagctaagagcacccgcaatggtaaagtaaggtgctatctataaaacatgtacacctcaacaatagactagattaatagtaaaccacttcaatggtatgtctacatgggtatctatagctctctaatccattgcctcgtttttctctacagactatctccatgttagtagatagctttgctctctctcttcatttaatctcttccaagtaggaaaatatgctgacatggatctcttgtagagagcttatagataaccattgtgggtgccctaaccacaaccaacatcatcattcagtacagtaccgacgccaagatttcaaacccgtagggtcaaaagagggccgcataagtatgcgtgtaattaagttccagcaggcaattgtaatttgcatttttcagttttgctagcttgttaatttcagtcacaaccagcaggaggacgaaatcgtacttgatgtacacgtacgtgcgacataaccaactgacgactagtacttgaggtcactcggtatgaactccacggtcatcacacgtaacgttaacgcacgcccactactcattactcatcatttagttaattatctttatcctggaaaaaaaatgaggggtttgttttactacaaatcatcttaggaatcctacagttgttggcatcatatactccctccctttcaaaatatttgacaccgttgactttttaagcacacatatgaccgttcgtcttaataaaaaacttttgtgaaatatgtaaatgtatatgtctacataaaaatatatttaacaataaatcaaatgatacgaaaagaattaataatgacttaaattttttaaataagacaaacgatcaaatatgtttaaaaaagtcaacggcgtcaaatatttaaaaacggagggagtatatgtgactcgtcacccgcgtaccatattccttcgattttgctagatattggtcatcaaatttctccccctaatatttgtcgtttttctgaccataggatttgtgctacgattcgtgcacatatgggggtggggatgcagctgcgtcaagtgtaatcagaccgcgcctgtagtcaaatttgggccatccctgtcaaatttcgggctccgcgcttttctgtccatagccgttgtgttttcctcaactctcttctcgctctctttccttctctttttttcttttctcttcagggcatgtttagtttccaaaaagtttttcccaaaaacatcacatcgaatctttagacacatgcatgaagcattaaatataaataaaaataaaaactaattgcacagttaatggggaaattgcgagacgaatcttttgagcctaattagtccataagtgctacagtaacccacatatactaatgacgcattaattaggctcaaaagattcgtctcgtggtttccaagcgagttacaaaattagttttttcattcgtatccgaaaaacccttccgacatccggtcaaatgtatgatgtgacacccaaaaattttcatttcgcgaattaaacggggcctcattgttccttcgattttggaaaaatgtttggcactatcgtagtacttcatcactgtatcgttgtgaaaaatcggcccataatctcaccatttccagttcggcctatttgcaaaaaggaaaaggttaacttttcatccctcatctggctgagtttcaattacttccctcaaccataaaacgagcataatgtatccctcatcttctaaaaccataaaatgggtataacatatctcttatcttctaaaaccagtgtaaatattgagagtgattttgaatgatgtggcgctgatgtggcactaaataaaaactcatgtggaacccgcatgttagtgaaccaaccactctcccatcacccacatcacatgtcagtggcccctcccattgagcacaacaatgttgcccatggcttacgaatatcagggtttacattaccggttgacaattaaatttcgagccccatcggtatcacggttttcgataaatttcgaccaaatctattgtttaacctttgaaattccaatcaaaacttaattttgagccgtgtagaaacgtcgaaattttgcggaattcgaccggttttcgtcggaattataaaccctgcttacgatgacttcttcaagggctgccgctagtcgtcgctcctgcccaccgaagcagagcgtgcagagttcccatcgctgcctctgcccccgcagagtttgcctgcggagactgccaagatggcggcccttcgtatcccgtcagggcagcggcgggaagagcttgctgtgcagccgctgcttgaggagctcctgcgcttgatcggcctcctcccacacttcttctcatcttcgtcgtaggggccaccatggccaaggaggccatggcgcagtcatccccatcgatttgctccctctgcttgctcacctgccgccaccaatcgagttggaagaccttgaggagaaggcagggaaaccaagagaaagagggtgtggaggcggagggatatggccgcgtccgtacccgctcgctctccaatatcggttgccgatggtttcggtattcacccgcatcgccactcttgccaaaccaagcttgcaccggagttcccactctggtttctagtgccccggtgccacattggagcggagcgccccatcccctccattgcttcctcattgacgcgtctacctgctgacaaaagatgggagagagggacaaggtagaagaggaaaagcctgcgaacagagaggatgggatcatgggacaaagggagaggatagaagaggaagaagttgatgccaatgatatgtgggtcctacttttttattttttaaaattgtgatgccacataataagcaccacataaaaaaacgactgggtcaacacgccatgtcaaccaaaaccaccatccaaaaccaccaagggacgtagtttacactacttttagaagttgaggatagtctatattttgttttatggttgagacacatgattctaactgatcccctatggagggatacaaagtgaactttctccactgcagaaacagtgtgagatggagcccataaatagttagttacccattaggcccatgtttattattttatatatagtttttccttggaatcagattcggaaatgtgtatttctttgtatcttaaattagtaaatattaaatctagggaggcaattagagtgttaaaaaagtacatcaaggaaaaatttatgcaatattacttgtgggctcgtaaaatagtgattaatcaatcttttattatgtttgtagatgaattttataatatgttttcatatacgtttgataatatgggacatacggaaggttataatttttcccgtatcctaaccttttatttttgcatattcgaattcgaatattactggatatccatttttctctccaatatctatcctttctacaggccttgggttgggtggtcagaaatacacgtcctatttcaccccttgttaccgcgcccttagctttcatgattttaggattaaatttattgtgaaaatcacataataagtaaatattttttttagtttatttttgagtgacgataggaaagggagtcttgcagattggaaagcatgcatctgtcttcactgaagcagtctttgataaggacatcgttcctttgcatacatacaatacttctcaaattgctatgcaagattacatagcatatactacaacttattttttaggaaatcctacggtttgttaacatcatattgttgtagatatagtctcaaatcagagagtggttttggatggcgtggaactcatgtggagcctatatagatggccatgtgggcctcccggcacggcatggcccaggcccggccgtgcctgggccaaggcctgtcgggccggcacggcccaaccgacgcaccgagccgtgccgtgccagcccacgtcccacactcacggcccaggcacggcacaacacgcctcgggtcgtgccgggccggcccgaaggcacgatgggccatcgtgctttttctcagaataagtctaattttcgtccgtcctattgggctgtgacacacacacacacacacacacatatatatatatatatatatatatatatatagctcaaaagtctattttcctccctcttctttgggttggagtacataaatag

SEQ ID NO: 11766 - DNA, 18915 bp, Oryza sativa
aaatccacgcagggacgggccgccggatcaaggcggggtggtggcgcccactcctgctcggtgatgagaggagagaaagagagaggagaggagaggaagagagagagaggcgagaataggtaaaaaaattacaatggtgagaaggaaaagagagaggaggaaaaaatatatgtgcaaaagaggagtattttcgcatgcagaccacttaagaggcccgtatatgaaaatttatttttgtacgcagccccttaagtgaaccgcgtgggaaaatatacttatttttgtgtgtagccctttaagtggttcgtctacgaaaatagattttttacatgcgggcctcttaaggagccatgtgcgaaaataaaaatcgatttttgcaggcgtgatcagttacggtccgtctacaatctatagggattattgtatataaaaaatatttctgtagtacagtgtttaaaaagtctaaagcttcaaatcagaaagtccaaatcaacttaaatttgcaatcgcgccatctgagaaagtaaaacaggtccatcagaatcatgcaaaataaatgctttggaacctgtctcaacaacaacggaacattgcttctttggttgggtagccgatcgatcggcgtacggcaggagcaccaaatagcccaaaagcgttaacctgcacttagcattttcacaaattaggtgtccacatcgacggccgtaccaccatatatatagagagacaaaggcatgacggctaccttgcctcttctagcagtaaaaattcgttcagggagaagcaaaaaaaaatactatcaatgtataagcacgtaggagtacatactgttcagcatttcagttgcatctaaaatttaaatttcaaatctctcttagagttatttccgatattttgtcattgtacattattttttagttaaccttactgtcctaattagcaaggtatcgagagatattatatttttcagtgcaaaacttggtatctccaagtcttggatagcttgatttaccaaaattttaagtgtaaaattttagtatgtacacgtacaatctcaaaaatcatgaaaaaaaaattcttattcttttatattgacctttaagctgtgtttgaggtgagatgagaacagaagattgattgagatgagatgagaacaggagattgagaagatacgtaaaacgaggtaggccattagcacatgattaattcagtattaactattttaaatttcaaaaatggattcatatgatttttaaagaaatttttttattgaatttttttttaaaaaaaatacaccgtttagtagttcaggaagcgtgcgtatgaaaaacaaaacaaactcacaatctcccaccgctgaactgagcctactaagaacatatatataaaagtttacgcataattttatttctaataagcggttacgggttataattagctgtaggttacggcttatatataatactacctccgtcctaaaatataataacttttggctatgaatcagctaaaaatatttatattttgggacagaggtagtatatatttaatcacatgtgggcaaaataatactagtagtaagattgtgataactgaatcttaaattcaaattaactagtaattgcttcgtatgatgtgagtttcagactgatcagaacttcagaaccgatgcttctgattaaagatgcggacgcacaagtagtaggagtactttctttcactgaaacctgattctggagatgtaccaacttgtacttgcacattaaaataacgagagttgttagcatttctgtatttacttcagcttgtcacctgcagctgcaggcaagtggcttcttagcagtaatggccacatcggtatccatgtgaccagcatccatagctagagagcttaattaccaagctttatactagtacttaagaaaatcacgggattggcttaatcaccttaatgacatggttcagtggctcaagctggtggccgtctcatgaacacgtagagatacaactaaggaagaatcgcaagctttctctttctgttttcttttcttttttatttgacatcgatcgattcttcgtgcttaaactgtagacgaacaatctgcaccactaactctaagaaccttttatatagctttttttttcaaaaaaaaaagtccaattctcacaaaattcatatgaaattcctctgttccaggaggccatagattccccacaacattatatatgatcgatcaattaatcaatttatcaacccatcatcactgatcggcaagaactctgcaactaattaacatctcgatcgatccaagtactgatcaggtgatacatacatggattgatcaaaactaatggtatctctctaaaggcagatcgatggatcgatcgatcgaaccatacaataatggtggattaataatcgattcttgctttgctttcttcgtcgtcgtcgtcgtcgtcgtaattgagccgtgtgcatggtggttgtagcttgtagtatacttaggtgtgtgatgctgatgagctcggcgttcttgctaggtagctagaggctgtggtggctatcgatcgatcatgccgccgccaccgtgccgccgctggtggtggtcttgctggagcggcggcggccgttgggcggcgccggcgcctccttcttcatggacgtcaccccgcacttgtcctgccactcctcctgcgtcatgtgctgctgcctgcactccaggctgcagaacgccgcctctcccctgcgaagcacacagtgcgtgcgttagccgggcgccatggatgaattcatggaggaacaagaagaggaggaggtgttcgtacttgtacatgaaggtgtcgcggccggggccgaggcggcggcggcagaggccgcaggagcggaggaacgaggcggtctcgacggagcagtagtcggcggagttccgcctcagccccgccctcgccggcgcggcgcgcgcgcggtacgccgccagccagtcctgcccaggcgcgcctcctcctcctcctccgccgccgccttcgcggccgaacgacgccagccagtcctgcgccccgtctccgccgccgccgccgggctggcccaccatcatcatggcctcgagatcctcaccctcctcctccaccaccgccgccagcacgtccggcggcgagaactccgtcatgctcgtcgtccgcctcatcgggttattcttgctccctcccctccccctcttgcccaccatcatcaccaccacgcaggcgagcagccagaacgcagagagacggcctcctcctcctccttctccgacgacgacgacgaggcggcggccggcgacggcgagcgtgcgggcgcgcggcgagcgtgtgtggaggagaggatctgggaggagggggtggagataaaagaagcgggagggggaatctgggccgtcggatcgggatcccgcgatccgtcggatccacgtcagcgcggggggctcggctctgcactgattgttcgttctctcgagccaattgtgtttcttttgttcgcgactgatgattgcgtttttgttcgcatcttggctcggtcggggagctgtcgatgcggaatttatttaaatttttattttaaatttattggttggttttgtattatatattggtagtggcactaccaacatttactagtgtgattgggatatctcataaatggggagaaaatttgtgtgattgagcagctcgatgcatgaaagctgagtctggtgtggggttctttgtgcgtcacataccagttgtcatgtatgtgcaaccaaacttaattattagggctccttaagatttttggaattttaaagggaattgaaggattttaattcttcgaaaaaaattcatgttagcttctttggaacaaaggaatatatggtctgtttggcttgctgtcttgctatgccgcagccaactgcagcagcaagcagcaaaaccgtgcataacgtgcagcgtaactatagcaatagctatggaacgtgcctctaaaattcataagtttgtttcataaaaaccattcaatgcgctaaataaatatttctatgttttcaaatcctataggaataaggtggagtaaaaaatatattcttgtgtgttttttaatcattgctccaaagaagctgttaattttttttatggacacagtacaaacgtaaatgctaacaacgtgcgcatactcaccacaataaatgtagcatatcttgagattgatgaagttcacacttttacaccctaccctatggacacctccgaaaaactaggctagagattgatgaagccatcatggatggttcgctgttgataggaatatcgtttatcactaaaagaataactagtcgtagatgtaagcatccgcttcaaatctattacttgaaacagggtgagtaagttccaccacaagaaaccaaagtctaaccagttaaactacacatgagtttaacttgccaaaaagtcatttgtcacagtatgcctaactaccaagatgataggaaaataatttactcctcggatctcacaggtcccttcaatcatataaatgcttggtgccttttctttaaaacaaatatttagccaaaattaccaaaactcgagcttctcctcttattttctgaaagatcacatttggtcgtgtaggtttgtgtacatgaaagatgacaatattactaaaattttagcatgatttcttatgtatttatcaaatttggcaacaaactaaacgtagccattttttttacaacttttaaaaaaatggtatggttaaaaatggcatcaaagtgaactagcctttaattgctcaagtgattttcaagaacttttgtttaggtttaagtctgttggattaagtttttaagttagctttcttggttaagtacctaacttttggtttaacagcataatattatattatagctttaaaaacatatgaaaaagttaattatttttaggcttaggtttttaagttttttttttgcctatatgatttataagctaatggatttaaagttctaagtttaatggtgaagttataactctacctcacttaagaaaaaaaaagtttctccaaatagtgtaagagtggcttatgactttaaaaaagtgaaatggaaaagctacttgtttatgtatggttagacttttcgactcataagctagcttataaatctaaataaagatgaccttagactttttttgttgagaagtcagcttataagtctaaacaaataggacctcggcattgttattgttagtatgctaatattccctcagacgcttttcctataatataggaacattataggaacttaagattaaatttgatacggtatatcataggtttgtttagaatcgttgtagtataaagtatttcatacgatttataagttgtgatattatatgatggagggagtactaattaatttcataatcatgattcaatttgtgattctttgatatattttggtgggaagagattctgctaaatgttttacacccttagaaatctcaatgaggtctgttttttctgtaaaaacgaaatgcaaatatcgtgcttggctgtttggagcgttcacaacgacgttgtgtcactcataagtgaagtgcaataatgaagtgacaggtattatattgcttataaaatatttttgcgcacgaaggacctgttcactttggtgccattttcaaccataccattttgttttaaagttgtcaaaaaaaaaagggctacgtttagtttgttgcaaaatttggtaaatatataagaaatcatgccaaaattttaataatattatcatcttgtcaaatttagtaaagtttattttggctacgatctgatccggtcctaaaagccacggcataataaagcgcccccagggaatcgggatagtgggcccggcctgagctggacgacttggaccggtagaatgtcgtgggccacgcgtggggaaaggtcggcctccagcgcccacccaaatcgcttgccgcacgcggccctcgcgcacacgcgggtttcactgggcccacgcgtcagccggtgtgggtgggccgtggggtatcgtacggtggtcagctcggccgctgtagcgtcgtcggttttgggaaggcaggacgaacaggaacagcgagagtggggcccacctgacgccgagggtcccacacgtggcgggcggttataggtgggattcctctgggcccacctccccttgtgcttttgctggattctctgtggaaaatgccagtactacagtattgtaaggtgggccgtctcgcttggtgggcctgtcgagcaggcccagcccaacgcccttgcaggatagggccactttcgataggcccaacgctaaaagcccaataggacacttggccccgctcggttccaccacccaccgtcgcgattcctccgcgactcctccgccgcgccggcaatgagcgaccccggtcaccaccacgggccacggcggcattgtaatgctgaaaaatccgcagaaattttgccagaggaaggatttgaatcttgcattgctctcgttatgcgtagaaaacataaaagcctcatccgttacgacaacgcaaaccaaatttcggtttcgttgaagcctgaacttctaggatcattggtgggttgagagtcgtttcagcagagatcgccattggactggtgctgcatctttctcaagctcttacagctatgccttttctttttcctccagcacatgcaaaagcttcgtcggtatattagaaagaaaacaaccgagaatggttctgacaggagctcggcaatgcttctgtgatcgctaactttagcaacctcttatatatctatatatctagcatatttctctaacatgttacccttggttcatttgtccatggaacctgaacatgttggtgaatggtgattacaatcatacggattgagtgaacttgtgtcagatttgaggctagcttagggtaacctgttgttagttgatgcatatctgcattacttttttaagtttcttcattgtttgagataattgatatgttctcggaatacctcggttctaaatatttgtcactatttactgttcatctccaatgtaaaaccatggagattctatattgctatgccgtttccaaaaaggaaagaaaaaaaaagagagagagaagaattgggagatgctacttggagtgcaagcaggaaaggggatcattcaacattgtcctgtcatctccctgctcatgcctaatgtcacaacagtcgatcgtaatatgggatttcttacagctcgttcatccatccatctagaaaccatcgagtatatctaccgcaacaattagaaaagaaaattttcccctgcttgtgagccattgtagctttggtcacattatttgactcttatttgccctcgaatgctataccaggaggttcagttcagaagtcatcctcattttatcactgtaattggggtatcttgagttcttaatccattttagagtacagatttgtgatccaatttagatgtacacgtgctttagtaaaaaaaaaacagaagcaggtaggaggaggcaacaccgcaacaggtagcagaacagatcacacaacaaaacatccacgaattgcaagctgggaattcagaccgtgacgcaggccgtgacgccgccgctgcggtcaaggatgagagaacaatctggaactgcaagcacacaccaaaattaagtactaaaattcttgactgccggagagatagggtgagtgcgtttggtaatcgtgtgtgcacgtttgatgaagcatatcatatccttgtcgaaaagaacaaagaaaattaaggaagcacccgcctactctgtattagcggacgcaatatcacagcaagaaacaatctgtatgtaaattttctcctagcaggtaaaaaactgatactcgctccgtccctaaatatttaacgctatttattttttaaacatgtttgatcgttcgtcttattcaaaaaatttaagtaattattaattattttcctatcatttgattcattattaaatatactactactactcaagtttttaataatattcacaaaagtttttgaataagacgaacggttaaacatatttacaaaagtaaacggcgttaaatatttagggacggagggagtacatgacttacttatcttttgctaggaatagagagtaggcagaaaatatataatgtaaatcatagcgtgaatttaaaaactatagtaggtttttttttaaagaaaaattgagaaattcccaagggtcttccggctagctccacaagatggtgggctagatgacctaggttcaaagcctcaccccttctaattatttgatattaggtcattccctaatattcgagttttttttaaagaaaaatcatctgtgatttattcatgtagtaccttatagtgacgtagataaatcttaaaattttattttcttattattctacgatagttgtaaagtttgcaacaaatatttttcccaccattgcatataggtaataatcacttcatgaggtgttaaattctggctattatccttggtgtaaaataattttggaagcacatagtatgtgttatgtacattttgtattgcctcgaaccatctagtacaacatcctaacaaaaaaatatataacgaattttagttatgcatttgtattgtcaaaatccaaatgcatatatgtatatgccaaaataggccacacccatgaaccaggaagcctctttttggaataatcaacggactcataacagtcactgctgacgtaagccacacacatctccatcgcctataaaagctcacctgaacaacctccaaatcacacacaaaacgcagaagcagctagcttcactgatccacattactaccagcttcttcttccaatcttcttctccgacgagcagctagccagctagcggcgccggccggcaatggcggacgaggtggtgctcctggacttgtgggtgagcccgttcgggcagcgttgccggatcgcgcttgcggagaagggcgtggagtacgagtacagcgagcagagcctcgccgacaagagcgacctcctcctccgctccaaccccgtccacaagaaggtccccgtcctcctccacgccggccgccccgtctgcgagtccctcgtcatcctcgagtacatcgacgagacatggccgccggagccggagaagaagaaggagtcgccgcgtctcctccccagcgacccctacgcccgcgcgcgtgccaggttctgggcggactacgtcgacaagaagctgttcgactgccagacacgcctctggaagctcagggccggcgacgccgcgcacgagcaggccaagagggacatggcggaggcgctggggacgctggaggcggagctcggggagggggactacttcggcggcgaggcgttcggctacctcgacgtcgtgctcgtgccgttcgtggcgtggttccacgcctacgagaggctcgcgggattcgccgtggcggagatctgcccgcggctggtggcgtggggggaacgatgcaaggggagggacagcgtcgccaagacgcttactgatcctgagaaggtgtacgagttcgcgctctacctcaaggccaagtttggcgccaagtagagtgagaattccagatttggtttggttaacaatcgcagcgtatgatctatatctattgttactgtatttggttatcgcgttgtgattttgctcctacctatcacctgtatgtatgtgcttgagcttcacgaataaattagaaagtgcagttgtgtactcgtgtgtttgaattgcgcgctctgtttgtccataatcaaaacaatttaatgtacttgtttttatgggtcgtcgtcgaatcgatctgttgtacgaaacgaagggatatgcccggagaatgaaatgcaggggtgactgcagcacgtgcgacacctcgtcctcagtcctctcgtgaggtaggactttcggggtatcaagggtagcctagcccattacatgaagcccactaagccgatgtgtgcatcgggcagacgagtttgggctgtgtcaacctgaccatgggccgcacgtgcgttacgttcttattccgaaggaaaaagaacacccgaggtccctcaacttgtcatcaagatacaaaatcatcctcaaaccgtaaaaccagatatcccacgtctcttaactaatcaaaaccggttacaaaagatccctcagcggttttgataccggtttggtcctacgtggctgctgggtcagcgtgggacccacgtggaccccacatgtcagggtaatccacgtcatcaccctccctttttctcctcttctctctttcggggagaggcaaagcggcgggtgcagggccagaggccagcaggagaggcgggagagaggagggcgatggcggccggcgcccagtggtgggggctgcagcgggaaacacggcaacgcggcagccccgacggcgatgtcatcgactgcgcgccgatgcacctgtagccatccggttcgggatgaagcatccacgcgccgccggcgtcatccgctgcgactccaccaacgacggtcgcgaatcctcttgctcgcgcatgccgaggcggcctctgtgcgagcgcgttcggctgcccctagcgagcggtgttagcctctgcttcgcggcggccgcgccagaggccgtggacgtcccgcggctggtgctccacttcgacagctctgtgtcatggagtagcagagctcgagcacgggggcagtaccgtagagctcggggattacgtcgtagcggaactcgaacccgagatccacgcaccccttcaactcctccaggttgtcgtcgacttgtcggtcaagctccacgcgtgccgccgccgccgccattgttcccgctcctcgccgtacatgcaccgccgccgaaaacgacgatgccgtagggctcctccttggccaccaccaccggcttcgtccgccgtggccacgccgcctcccactataccccgcaccacacgtcctcggcctcgacctcaggcgccgctgccgctccgcccaccccttcgctccgcccgtggcctgctgtcgtcgtcgccacggtgctctgccagtccttccgcggctccaacacctcccgtttctcccgcctccccttctcgagctccatagccccacagatctcagcggcgagctgtgcccagcggcgagaggaccatcgccgcggccgtgcaaatccggcagctgagcggcgagatccatacggtggcggaggaggaggaggagaccgggagattggccgcggcacgccgctcctctcccgcgagccgctgcgcgccgctcctcttccataggccgccgcgtgccgctgcctcctcgcaggtgaagactcggaggtaatagaggtagagaatggagaggtggacaccgccgccttgccgctcctgctcgcccgttgccatcctcgtcgcaccgtttccctatccaccacgtcgcgccgctttcccatccgccaccccactgcacggcgccgcccctccgctggttgctacctgtctcctcctccccgtgcctctgccgccgcccaactccaaggcctcccccactggcgtcgcggccctcgcacggccgccgaggagctcggccgggttgccgccgccggccgccgtcgcggcgccgccctcctctcccgcctcggcccgccgaccggccttaggctttcaagcacacggagaacgaaatgagtaaccgaggaagagaagagggggagagtgactcagcctgataagtggggcccacgtgggtcccatgctgactccgctgccacgtaggacaaaatcggggtcaaaaccaccgaatgaactattgtgaccggttttgattagttaagggatgccggatatctggttttgcggtttggggatgattttgtaactcgatgataagttgagggaccttcggtgtacttttcctattctgaaatagcgggcccataagcctctctgtttagaccaactcgtggaaagaaaaagtccacttttccccccaagtaccgcaagctgagacatgacgcgaaaatccgcagattactctttatttaacatataagtagattcgcgggttggccgcttgcatccatactgacacgtgggcccacgtattttgttttatttttaaaattgttaaattttgcttcatatgccacagaattgccacgtcagatgaaaaccgagtcaaattagccacataggggccacgtcagctaaaactgccgtccaaactgtcctagaatttattttgcaccggttttgacagttgagggatcccttgtatgtggttttccggttgaaggactaagatcggatttgttaataagttaagggacataagatgaacttattcctttcctgcccgacttatttgcagaaactgcatgagatcgagcccatagatagttagttgtccattaggcccatgtctaggaatcctgcttatgagtttaataaaggaagaactgtatttgcctccctcaactacacgtcgagatcgattcgtatccctgaaccacaaaaccggttacaggtcttcctcaactgttaaaatcagataaaatccctaactagttctgacggcggttttcctttaatttcttgagaggaaagatagagtaggagatatagaacaaaaaccctcaactaatttgagattatctccacgggtttggttaaatcggacgcgggattagggtggcgtcgggtgtaggctggctctagctcggctggagctcgaagaagttactgtagcgacattctgggacttcttttcctaggcccgattgaaggaggacgcaaactggactttaacggagaaagaaacaggaaacagagaagagactaagggaaggagtctggacttttccatattcagcccaaacctgaaagtgaggattttgattccttttttcaattaaataattgctgaaatgatcttttatttattgtgtgttcatgtttccaaaccccagctgtatcccatctgtgttggcacgaagaaaacagttcggtttgctggccggtatgagatcatgacttggataaatctaattctaattataaagatagagcttatatttgataaatctacatcattatatttaaatatggaccaaaactttttctagatcccctatgatcaacggtgtattttttctttcaattaatgtgttgatttctaagccacaaatatgaataaatatttctttattactgtaataaaataatttataaatatatggaaaaaaacatatatgcggtgcttctacacggaaagaaaacatatgtaacaccaggttatgaaaaataatgtcattttaaagttatttaatattttgtgtacttttattttttttctttttcgttgcaacgtacaggtaatttttaccgtagatatatatatactcggtgtattttgagatttagacagtaaaggattttcaaaaacgaatctggaggaagggatacgctagttaattaaatgtttacatataagtcttatattataaaacatcgaaaacgatagtacacactggtggagaaactatctttggtcgatcggcctaaatccacaatagtcccggttcgactaaaaaccgggactgaaaatctttagtcccggttcaaaagacggcaggtggtgtcagacccctcctttatctttagtcccggttggtgacgccaaccgggactaaagatatatttttagttcgggttggtgttaccaaacgggaaaaaagatcgacatgcgccgcgcgagatcgagaggaccgaagctcacgggaggatcagttaataagttttgacatttatctcctcctcttctcactcaccccatctcttcttctacctcctttggatctgcccctcccctctcctccccacttctcaggtggtggcggcagccgggcggccgcggaggcagcctcgcgcggccgggcggcgcggaggcgaaggcagcctcacgcgccctcatgtggtggccgggcggcgaggcacagcgcgtggcgtgggcggcggggccgcgcacggggcggcagcgcgccggttctcctctttttttttataatttgtgattgagagatgtataatttcttttttagaatttgtgattcattgcatggatctgagatgtataatcgatctgtgatgcatttgatttgtgtgtatttttttaagatttatgatgtatttgatttgtgtgtaagtaacttaggatttgtatttgtgatgtgaatgatttgtgatgttactttgatttggggatttggggtttgatttaggtatatgcatgacactcgatttggggtttgttgtttgatctgggtataataaaaagaaaatggaccaaccgggactgcccctatcctctcttatcctctctttagtcccggttggtagcattaaccgggactaaagagttagtccgggttggtgttaccaaccgggactaaaaattgatttttactcccggttatttcatccggggtcctggaatcgtaaccgggactacagggggttataaaccgggagtaaagatggtttctccatagtgacagtatattttgaaattgagagggcgtagcttattttcgatgacagtaaccggctgtttgttcgtcgatcgaggatcgttgtcgtgctttgtgggctcgttcctgtcgtccatcatctagaaggacggcgtcgtctgtttttttcaagggaacggcacttaattggtctatcgatttttagcgtacacgtgaacatagatccaaataaacgggcaatggacataggacttgctcccgaagaggccaaacaccgtctactggttcggatcgatatctcgcctggtattgcctcgtcagacggctgaaccacactatctacaaaatcggtatttttctcaaacggacggtacaaccacgcacgaaaatcgattccacgaatggtcaagttaagccacccgcgtgcaaaacaaaataataaaaaaaaaatcctagctcccatctatactaccgcaatccgtcacaatcatcatcaatgcagtccgccactgccgttgtcatcgtcgccgctgccggagtccactgttgttgtcgttgtcatcgctgagactccacctcacgtcctcacctgaggctggcggcggtggatccgccctagcctcccggggtcgaggccaccggatcccggaaaggatatttatctatcgatcacgtgcgggatcggaccgcgatcagatcgaagtcccataatcccgcgcgatcagcccccctatactcctccctcttctcccccttcctcctccccttcttctctttctactacagtacaccataatttttttaaaaaaaaacaaaagttagagaaaatttatgtatagaaatactatatataaaaaatttgaattcaaattcaaatttgaatcgggtatgtaaacttttgacttataaactttgggtctataaactttaggtgtataaactttagatgtatagaaatactatatatagaaaatatttgaattcaaattcaaatttgaatcagatataattcaaattcaaatttgaatcgggtatgtaaacttttgacttataaacttaggtccataaactttaggtgtataaaatttagatgtatagaaatactatatataaaaaatatcaaattcaaatttgaatcagatatataaacttttgacttataaacttttggtctctaaactttagatgtgtaaatttgaggtgtataaactttaggtgtataaatttactaaaataagaaagtaatgcagtgccaaaaaagaaaactaggtggagggagggggggggggcgaatctgatcgctacccccattgccagggcgatcgatcgcccattagaagcctccactggatccaccaccgcgtggcttgccgctgttgtgatcgtcgctggcattgaggcccgctgcacccgaggccaatgggcggcgggatccacccctcttggctctagggccaccggattagcagttgcgcggcttgcctttgtcatcgtcgctgctgctgaggcccactaaaccctacatcgactcgattgatctgttgccgcgcggtttgctagcatcattgtaatcttcgcgtgctcctttgaaggcaaactgccgccctcttgccgtccgctaaccacttgcggagaccgccattcccgtcgccacgctagccacaggctcgcttgcacgttcgtgatgaaggagagaagaggagacaggggagaagaggaatgatgagatggggagtaggggatgaatgaggaaagacttaattaatgggtaaaggagaggggatggctaatgtaaaatggataggtgggtctctttctaatctgtttacagacggatttttttttacttcgccaacgaaaaataatagcttggtcgcaaaaattgtttttttatagtgtgactggattattatggctggtttgatcgcgactgacaatgactcaattttggtttaccttatcatgtatacgcgcttgatcggtggactattaatggtaaagccaaaggattaggtgatcacacaaagtattttatactgaacgaattgaagacttaagtcatgattctctccagtcatttatgtgttcctctcatctgtatatgactccacacctgtatatatgcagcgggcctgttatgtagtatagatactaactcacatcatgcaatgcatgcatgtacttgttagctcaactaattgcacaatgtatcgccagactcgctacctccacgtacccatatatatatatatggccatatgcatgcaatggacatgactgtcacgttacacccttgcacacctagatgactatattgctctttattgcttactttgagtcgatgactttagatgagtcaaatacaaattccatttcatgcactatcgacttgtcactgtggttgaaatcgggttggatacgtattctcgtatttatagcccatattttcttcaaattcgaaaatggcgcgggtaggagagaaaaatggatatccggaatcctagttcgaatttaaatctgaaaaaaaaaggttaggataccgaaaaaattatatccttctctatgtcctatactccctccattccaaaatataagacacaaccatctttaacccaaagactaagaaataattattattatcttatagtttggatcctttaataaatatgtattgcatgcatccaatagaattagagaatgtgagagtgaaggatttaaaaaagtaataatttaatggagaagatgtcataattaattgcatgtatgcattcatgtattatattatggaacatcttaaaaaaatggttgtacattatattatagaatggagggagtattatcaaacatatatgaaaaatactatgaaattaatctacaaacataataaaagattgattaatcactgttttacgagctcacaagtaatattgcataaatttttacttgatgtattttttaacactaaaattgcctccctagatttaatatttatgaattagatatacaaataaatatccgtttctgaatccaattctgaggaaaaactatataaatagagaataggatacgagatgagtgatatgtagtactattcatacccgcgcctgggggtgaaataggatatgtatttctaaccgcccaacccagggcctgtggaaaggttagattattacctcacgcttagctgtcatgattttaggatttaacttattgtgaaaattatataataagtactccctccgtcccagaatatagggagttttggagttggacacggttattaagaaagtatgtagaattaaatagaaaggggttgtgattggttaagaagtggaggtaggtgggaatagtgaatggtggaggattgtgattggttgtgaatagaatattgagagagaagttgttatattttggaacaaatcctaagtgttaaaagttgttatattttaggacggaggaagtaactattttttaagtctagtttttgagtgacaattggaaagggagacttgcagattgaaaagcatgcatgcatcctgtcttcgctgaaactatagtccacctttttatttgctgcatcaattcaaaaatatggtaaagccgcgtgcatattattgtgtgtttatccactaatcactattgtcttattcccttgcaaacaaaccaagtcaagacctctatatcaaaccaccgacttaatttttcttgaggatagtacgtcacacaaggagcttaactagaataaatggtactcctccatctgaaaataagttcatttataggtttctgtatccaaaacttgattgtccgtcttatttaaattttttttatgattagtatttttattgttgttagatgataaaacttgaatagtactttatgagtgacttttttttataaatttttcaaataagatggatagtcaaatgttggatacaaaactcacaaattaacttactacctccgtcccaaaataagtgcaaccgtggatatccatgtctaatttttgaccgtttatcttatttgaaaatttatcaattttttttaaaaaaatagtcacatataaagtattattaatgttttaccatctaataaaaaaataataatcataaaaaaatttaaataagacaaacagtcaaacgttggacaatgcaaaactgcacttattttagaacgaaggaagtactctacaccaggcctataaataggggcaacgtcctcctcggctcctcatccctctccaagtgatctccagagtgcagacaggacatagcggtattgcaatagagctggtcggtcagttagccaccatggctcgtcgatcaaacccagcactgatcagtacccttt

SEQ ID NO: 11767 - DNA, 5648 bp, Oryza sativa
tatatatatatatatatatatatatatatatatatatatatatatatatatatatatatatatatatatatatatatatatatatatataacccatccagcaaccgggccatgcaactaaaaaaaagggcaactcacgtggctgagccatctttagtcccggttggtaccgggactaaagatcgatctttagtcccggttatttcacccgggactaaagatagcgatctttatttccggattggtagtcccggttttcaagggactacatgggggttaccagccgggactaataagggtttccccaccagtgagaggatggaagaaccgaagaagacggtgttgggtgtttagggtccatggatgacagacgaaggcagcgtttaattacccgtccctaggcttccttgtgtccgttggttccagcttgaacggactagattgaatcacagaaaatcttagtactctcgtgaggtagaataaaagggcttttggatatcacggcaaacctagtctgtatatatcctcagacaattcacatgtacctagcacattacagaagctgaaggcatcttttcgtatcggtctgacaatttttgactgcgttaatctaggctgcacggtggtggtaatcccgttcggtgaagtccattttgcgtacctcaactatagaatgagtttaattcatagcccttgacaataaaatcaagtataaaaactctcaaccttttaaaccgatgtaaatcaacttatccattaaccaccacctacctgcttattcgtacctatggcagctggagcgtcgagcttagtttggaggacaggttttgcgagctacgccacctctctctctctgtgtgtgtgtgtgtgtgtttctcttcagatttagggagtcatagcaatctccttgagctcagccaccagctaccttgtcaagctcttctcgagctcagttgctaccttacgcccaaccagatctcgccaatgttcagccagggtctttgcctagtcaggctcgtgcttgccgtggcggttaagtcggtgtccactgtccttgacaaaggtggtgcggtgggatgcgtctctagaggggcttgtcgtctaagccaggtacgcagacgcgcgcggctggagaggaatggtgataaaagggtgagggagaaaatgggatgggaggagagagattatgacatgtgggccttacgttttgttttaataaatgacttacatgtggatttcatatgtagtttttattttttttaatgctaaaatatcatatgagtgccatgtcacatgaaaaacaggtcaaagccccacttacaacgaaaccatcatcaaaatcgcccaagaatgtaaattgggttgtttcgaacagttgagggaatttttatatcttgttttacggtggaagtatatgaatcaaactccgataatattttgaaggacacggaatagactttttgcatcctgttccaaaacaacggcccataacgcttctgaaatttgttttgttcggacaatctgtggaaattgcacgtctccagtccagtctcccaggctctcccaccctattgctctacgggttgcgaccatgtcgatacggcggcgggccagctgtgaggtttgaattagtagcttgtactcctggtagtgcaatttgcgagattgcttccaaagcaatatttaatgtttctcatatattctctccgttctactatgttataagatgttttgatcttcttcaatctttgtctagatttactaacgctcgtatgaatttagacacatatataaaatatatacatgtgtctaaatgagaaacattgggaagtagtaatttgaataagatattaatctattcaaaatctaaaatatcttataaaaaatataaaatttggttattctttgaccattctgtaaagaggactgaactgatgatgtcgcaggagttagcaacatgcttgggtttatctttgccgtgatcagattttccgaataaattttaattgggagaaggttacatcaacatcaggaaagctagctttctcctttggttttattctctgaccatcctgtatggttgaacagataacatatgtcgcgatcttgcgtttcttatcctaggctgtgtttagttcacatcaaaattaaaagtttggttgaaattgaaacgatgtgatagaaaagttgaaagtttgtgtatgaaggaaagttttaatgtgatgaaaaagttgtaagtttgaaaaaaagctttagaactaaacaggaccctggtatctgtctatctgaccacgtcctgtgattgaactgatgggtgtcgcaatctttgcctggatttctcttgtcttgtcgtgatctttgccgaatacatcaaggaggtttcttgtgcccactcaaactaatctggtgatgtctcaatctttgcctctctctttttttttatctcatgtcatggtcaggaaaagttgaaagattacacgaggagagcgcgtgtgaatcatgacggcaaggtcgtcgagcctgatgtgccggccacagtgtcgccgtcgcaccagctcgaccgacacgatcagcacgaacattcacgtaccggaacgtcatcagccagtagattgaccgtgccgccccggtagatatatatactccatatactagtacgtctattttacaagttgtaggtggacgacgacggaccgtccgccgagcattcatgccctgcacgcacaaaagtgcacaacgcgtttcgcagagtatggcgtcgccccgccccgcgagtcgctcaacggcatgacctcggtggccgtgcgtcggaggggacataccctaatagcaagtttaatagtatagccaagtactgctagcttcaatttatctatagccaatctaatagttcattcatacaatagttacataccacattattaatatctggtctcacctgtcatacacactgtgtcttggagtccgtgctacagctggctataaatctgtaacccacttctcttctctctccttatttatctccttaaaatatgtttatagctagcttatagcctgctattgtacctataaatcagctataaccacatatcgagaagaaaaaagaagagagagaagaaagctggctacagatttgtagtcagctgcaatatgggctccaagacgttatgtgtgtatgacaggtgggaccaggtattaatggtgtagtatatttttatagttaactattgtatgaatggactattagattagttatagatgatttggagcccgtacttggctatactattaaacttgctctaagagcaggttttaattggaggtgatcaagagaccgtacgtatagcagttggctattggcacgaactccaatcaattgatccacatttttctaacttagctttcacacacagatgctctcacatggaccccacaaccatgtttctacttgcttgtgttgtccgtctcacctaggcgtgtgtttggagccgacggcaaattaattgccggcgtacataatctctccacttagagcaaggttaatagtatcacttaccgtacgtgagctataattttatccacgtcacttatagccaacagagtagttaacctgtataataaacaggctccaacattagctaatgcaaacaatatttatttcttgttcatctggttctctcttttatccatgtcacttatagccaacagagtagttaacctgtacaataaacaggctccaacattagctaatgcaaacaatatttatttcttgttcatctggttctctctctcttcttgtttcctctgatttgtctgtgagcctatcaccatcttgggactcgtgtgtagctgggcgactatttagtcgcccactcacattctctctcatacgtttactccgccagcacatcgttgcagtttacgtggttgttttatcgccggtgtagcgcctcctattacacctgctcttatttctcttccagctcatcacttcttcttgcatgcatgcactaccgtcggcttaaactgtctactatacgcgcgcgtggaacaaccgatggttggacctactctcgcacggcgtcatgtccatcaaacctccaggcgtgcgggcgggaacaactaaccacttccctttcgggcgctctcggctcgtttgatggactacggccggcttgacgacgaacggctataaactgcgcgtgccactgccccccgtccatcccccgtccatccagcatcacgcacgcaccgaacgcacgcattcacgtacgcgcgcgggccatggcgtacgtgctgcatgcagtggcatcgatcgccacatacttcatgcgatcgcgagctcgcgtaatcacgtgtccgcctggtgtatgtccctctcgacgatggctactgggccaaaggagacgaatatatatattcggggatcgaccgcggaggggtgcgccatatcgatcacgtatacgtacgcgcgcgtgttccatcctgctccgcacgcgttcgcggagtttcctaattcgttttccttctacccgcgcgagatggtcaaaattttcgactcgtgcattacacatttctggtatgcgtacacactggatgaatagacgaaatatttttaaactaattaatggaggttataggagtataaatgcgtgatacaccgctaaaataacaaatgaatcggatggttttgaaacaaacatgtaatactacatataccacacctggtagaaacaaaaaatcaccaagttcgcggttacaaaaatcatctgctggataggacaaaattggagcgctcataattttactgcaagaaaccagcaaccaccgcggcaatcagagccgtcggatctccaaggatggtgccgatgatgatacgtattgccgtcccagcaatcctgcacaggcgctggagccaatgctcgtcacccctggtggtggtggttctctgcaccgctcctcgaggaacccgaaccaccaacgcgtccgccggctgctggcccgccgacgactcctcgtcgccggcggcgctgccgtcctgcggccggaggtacgcgagcaccgactcgcgcgcggccatcttcttcaggcacgacacgttcagcgtgacgttcccggacccggagcggtagacccagtagtcgctccgctcgccgcagcagtcgcagcgccagcgcgccgacgacgacgctttgcggaggtggagtacgccgccgtcgtcggttggccggctccggtccagcccggcgcagcacgggtgcaggtcgcggctgccgcaggcgcagtggtagacgagccccgccggcgccgcgatctcgccgaacgcgtcgcagaaccgccgtgttcgccccggcgcacggtcgtggagcgtgaacgtgcagcacctgtcccggtggagcgggtgggtgatcgtctcctcggcgtgggcgcagatgtagtggaggtggaagccgcaggcgtcgcaggcgtacagctcgccgaacccgggctgcttgcaggcgtcgcactgccatggctccttcgaagtatgtgcttatcaaatcttagttatgaagctactagacatttacatgttcagatttattattaggatttgatttttttttcttaaatgaagggaacaaatatagctaggtaacctccagtgtt

SEQ ID NO: 11768 - DNA, 2593 bp, Oryza sativa
gcaattaccctgcaggcttttttattatacattatatcttttagttgtacagtggtattcattacaacagatttttttcacactgtataagttgatgttaccattgcttggacagcgttattcattcctacctgtaaagctatttttgattgataagatctaggggtacaatcaatatgaaaagaacttaacatagacaaaattcagttttggtgtagatcaatatttcaaatggttatgaactacagagtgctaaatatatcccctttagtgctgtttttttattaaaaaaaaatcgttggctaatatctggttggtgtacgtatatatccctctctaggtgatcaagagggtacggcaggaagtacttcaaggctgcaaactagtgtttacgcgtgtattcccgttacatcagcgccaacaagatcagatgatctggaagatggccgagcagttgggtgccgtttgctgcacagatgtggattctacggtcacccatgttgttgctttggatctaggaacggagaaggctcgctgggctgttagtaacaagaagtttttggtccacccccgctggattgaggccgcaaatttccgatggcaacggcaacaagaggaggattttcctgtagctcgaccaaaggagaagggtaaagaaaatgccgctgatgctcctatctcaaaggagaacggtgacaaaaatgccgctgatgctgctaacgcaaagaagggtaacgaaaatgtcgctgatgctggtagcacaaaggaggggagtaaagaaaatgctgatgatgctgctaactcagaggaggagtaaagaaaatgctgatgatgctgctaacgcagagaagagtaaatctgatggtgctgccagcggtgcaactggctcgtaaccagcttataccttttgtaaaccgttgcggacattgctgtagctgcgaacctacattaggatacgtactcttgcgaaatagaaattgtggctagtttgaatcggactgtgcggatgatggtgttatggtacatgtgagatttttcctactgatctgggcctccagccatatactttagttgacagtttctgttttgaagatctgtgctagtaacatgggtacccatagaccagtgatctcctttcagtaggtgttgatttctctaaacaccacaattatacatttactcaatgattgggagaccaaaaatagtgcaaatgcaataattatccactgaaagaaaggtgcaccagaaggctatcatgtctttgggatcaaccataacatacatgatgtcaaatgctagccaacagagtcttaggttagtcggtctcttttagaaacaaagcaagaaagaaatgccactcacccgtggctctcatgatttactcttactttcccacgaatgcgacggtggcacagaaattcacatcatcttatcctacacccttttaggcctgtttgtcttatcgtcaaagctctcaggaaaaggtgtaaagcatctcttgtccgtgaattctgcgacggtgacatcaaacatgcgcaatcctacccccattgttgtcaaaggaggttgcatgaatctagattcccctgctcagtcagagaccgaaaccatcatcgtcattatcctgaactctggcaggagttcatttcaacctgcaacatctctcgactagtcaccaccagctcagtccatgtcatctggcaccgggccggtagacgaaccaaggccacaaatgccgcagagaaccacaactccacaagtcccaacaggtactatacgcatgcgcattattggggggtggcacagactcgacgacatgtgtgagatgcgtgtactactccttctgactactgtgatgatctgcaacgccacacgttgccacgagcatctctgcagcaggagtagtaggaggaggacgacgacacggagccgcgctgctggatccatcggaaatccgagccggcgccccaggctagtaccgcagctgctgacctttcttggacaggaaaggccaaaaaccgatcgcccacatgtgacctctggtcgcgctgctcccgctgttcccgtcacacggtcacgcgctccgcgcccccccgtcgacccggcgaccgacctccccctcccccccgcgcgaacgccgcctgcgcgtcggctcgctcgcgtcgcgtcgcatgtgctgcttgggttggggtgggtggctgcatcacatgcggctggatcgcgagcatcttggtggtgctcggcgcccgcgacgacgtggcccgagcagcgcgcgccgcggggcgcctgcgtctgcgtgtgggcggcgtcgtggatcgatcggtggtgcgagcgaggagcggcgaacctagccgtgtggggggatcctaggcggattttcggtttggtggctatgctagctcgatcgtacgttgtactacttggttgtttgggattggacccgctttgagatgtgtggtacgtgacgcgtgggggtttcggaatttggatggaaggaacggcgggcagctgcggtggatccgtcgaccacgcgcggtttacatgcacagatagtcccagaaccagaagggacatcatcgatgagagcatgtgt

SEQ ID NO: 11769 - DNA, 1130 bp, Oryza sativa
gagtttaggaacctagatgacatacccctacaagtttaaggaccgcccgtacactttactcaattctattcttttcgatgttaatggaggttaattacataaagtaagtttagggaaaataactacagttaacataatgattgcctcccaaaatggagttagctgtatgtgaggtgcatgtttactcagtaagtgataaccataagtatattgcttttttttttatgcagactgtaccaaaactggtagatgcctcaagcttggagaataagaatgcacgagctgtttcttgtggagctcgtcatagtgcaataataactggtacctttgactgtactagtatttttcccctagaaggaatttgctatcctatctgtctaatataactgcatattaataaaatgctcttctcatgctcatttaaatcaaggaaatatttctggcaagggtttgttgaataaacccaattatccaaacaagacctttagggtttgttgaagaggtagagattatactcgatcccttagaaagccatgagtattttagtttaatctgtctgccaaccgaacgtactgagcctaatccccatataagcaagccctattgaatcttcctagatattctgatgtgtaatcatattatgagtcactgtagttattagcgtattatcagtaacttgtgcttggaaagttggaattctacaataagctgttccatgtgtgattgaagtacttaaattcttgttaatctttggcctccctgacaatttgtttaaacatgcccgtagaaagtgctgttcctggtctaacatctactgacaaaatgtggtgacatttatgcagatgaaggcgaggtcttctgctggggatggaacaagtacggacaggtgcgtatttcagctctgcacttggagaagaaaaacattcaccgttgcagttctttttataacttttgagttgcgcgtgcagctcggtctcggcgattccatggacagaaacgtgccttgcagtgttcctgtcgacgcataccacccactgaatgtgtcgtgcggttggtggcacaccttggtgctcgcggagtcccctacttaaaacctgacggcgaacaaacttccctagttgacaattttg

SEQ ID NO: 11770 - DNA, 1558 bp, Oryza sativa
ttctaactccacctagccgtgttgtgcagcttgaactaccagagaaatacagggttactaaagcgcggtttgagagaggagagggatcctcacgtaggggttagctattatcggacaacttggcatattgaaatttctactgtcatgcttccttgtcccattactacatcgtcgttgtgttcaactattgcactacctccctcctagttcgaatctaatatcatctatgtcacgcccggaaattcactagtaatttccgaacttatttgtgcataaaatcctcgtccaggaatcagccgaggtacacaaactgacaatttaatatacaaatccatcataataataacgttacacacttacaaaagaaaagaaaacagcagcggaattaacggtctagcgatggcttcagctccactcccacaggcagctcaactggggtataagccaaacgtcttctccttctggatcctttttcttcaactgaggttgattgattattgcaagaatgagcatatgacatactcaacaagccacacagcaaatatgcaagtgcacaaggataccaaaggatggcataatataggctcatttgcgaaagcagcatttagcaaagagttaagagtagtaaaacagtagagtaattaattaaaaattttaatcaacactgaacagcacacccatgctgtacaggcccaaccatcctgaacaaccatacccggctgtacagatctaactccaaaccaggagctaggcaaattattatcaggtattaacatccataattattgtgagaggtgtgagactaatcacgaaaaacattgctcaacccgcccataaccgcgggcacggctattcgaatagttttactctggccagaggtgtaccactgtacccacaagacacaaccccacatcatgtcaccatgtgcctcaataccaccacggtacctcggaaaggagttgtgacaataccccttgcacaaataatccattacagcgcacctttcctggatcataatcaccccctcaaaaaccagaggcatggactctccagcgacccccgtggacttctcgccacttctcagtctggcgcactataatgaatcacgctatacaaaagataaagccgttgcccacgctggcttgtggttggcacggtaaatgtctcacaacagtagctcgcgaaccggtccttaattgtcatgagcacgactctcaaaaccatgtgctcacaacccaccattatcaagttttagttggcaagtaattaattaaccaatcacgattaaccatcgtgaactatcattaagccatccttaaataatagtgagtcataagttatcccaatagtgtgctaatgtttctaagcatggctaagcaatcataactaatatctagctgaaccaatatataaagcccaactagtcaagttataataacccaaggtatcaaggaataaagtaatcaatgcaaattggccataacaaaggaataagttcacaccactcggtgacattcgaaaataaatgcacagttgaaataaatagagaatttaaata

SEQ ID NO: 11771 - DNA, 680 bp, Oryza sativa
tttatatggatctgcctgatccttattattatccactttgcatcatttgctacaaattgtgcaatacatcatgggtctgttccatatagcagtatatatttgtttcaaaaagaacaaagtacaaggctgatcctcttcttttataggaaaaagagtttcttctggtcctcttggtgcagggttgagaactttactggatggtccaaatgaaggtacaatcaaatatggcacactgaattctcattgagaagcagttttcagaatgtgagtaacacacatgctaggtcaacatcttggaaggatcacaggtataaactaaagatactgcattaaaagaacttgagtataccataacataaaaggagggttagttcacatgacaatctcaggcttcaggatgcttgacttgatctctttgtgcgggagaacaacaccgccgttggtatagacctcatcacctacatgtacgtcctctcccaggatagtcatattttctatccgtgcccattgtccaacagttgagtgccatccaataatgctgtttgatatgcaagcatgcttcttaatgtgcacgccacgcatcaccgtgcaacgggaaagcctcacaccatcctccacgacgcatccaggaccgatagcaacatcaggaccaatcagacagccttcgccaatcttggcac

SEQ ID NO: 11772 - DNA, 666 bp, Oryza sativa
ttttgatcacactgataatcctggggatgtccctgatcctgttattgtgcaagagcttatctcgatgcttgatcagttcaatcctcttgtgcagcagttccgtcttgctcgaaacaagctgctttcttcaagtgctcctgagattgctatcaagctcattgggtcaggccattctcagagtgaccgttacagccttcccaccacctctgagttggcagcactgattatacctagtgcatcttgtgaggtatcaaagtttgatgtcattgtgcagaagcattcaggtgagttatgtcagttgtcacctattcatccagcccttatgtcattgcagtacccgcttctattcccatatggtgatgtgggttttcatactggtatcaagcttagagaggtagatgatcagccacccggtagtcacgacgaagcatcgatgcttgaattttatcggtacgagtcccactatcgaaaggatgagcccaatccattcacctgttgtggtaggctttctgatcagctcgctgtgaatgctttctcatgtatagagacatctcgactcatataccatgccctcaaccagaaaaaacttcgctctgagacacatcaaggtatatctgatgctgttgctaggggagacagtgatggaaaggatgttggcaccaagta

SEQ ID NO: 11773 - DNA, 693 bp, Oryza sativa
gatcatccaaagtattgatccagtagaagattttcgatttaattcgaccagggtaattgctaatggatatatcacaggaaataccatattggttgctcacatactgaaggactggaactcttgcattaggaatgaactccatatgtctagcaatacctaaataaggaatgaaaacagataagaatatcctgtaaattcaacaaaaagggttgcattgaatgaagtacggaacaaaaagaagatcgtgaatagcttgatcaaaacttattcattacagtgacttcacctctcacaagatatattgctttcctttttttttttagataatggataacctggccgctgcatcaaagacgcgcaaagcccacttattgctttccttggtgcatgtatatgcatatagtgactatttgtttgatcacaaagaacacacaaccaaaacttctatcatttcggttaaagctgttttcattaatcgaaaagaaagtttacctcgcttttgcaaagctctccttacttctctcagggtatcttgcttctttctcttacttatagggagattcaaggcattgaacagctcaactgacacatccaaatcacctgattttgcataaagttgtgatacgaaggatccaaaaggttttacagaagcacctataaaggaaagttaagaactcagaaaaagaaacacta

SEQ ID NO: 11774 - DNA, 887 bp, Oryza sativa
cagaataaaaaataaaataatattcaaaattagaaaaactaaaagagagttcaagtaggaatacaattttgaaacaactgaaattgaaaataaaaaataaaatactaaaataacacaatacgatattaattaaaatttgaaaaaaaataaattctgaaattagaaaaagaaaaataagatttcaattaggaatacaatttataaataactaaaatttgtgataaaaataaagactatttaaagaaagaccatctaaaacacatgacgagataaattaagtaagaggcctataaaggagtagagtggtggcggttgatacgacatataaaaactgttaataaaacaccaaatagaatcctaataacgattaaaaggagggacgataggcaggccgtgaagcaaacgagcaatgtgattgccgggactactagaaagtaaaaaaaaaaccccattgataatcatattcaatttttaaaatctcaatgacaataaaaagaagcagtgggcggggtgtatagtagtatagttttagagccggtgatgtttgacgtgacttctagaaaataaaaaatgaattgcaacgatagttgtgcttaatttttagaatcacaatgataataaagaaagagtaggcggcggacgggccataaaggagcatagtggcattgtttgacgagacttctaaaaattataaaaaataaaacccaacaagacaataaactctaaaaactacaaggttcaatttttaaaggttccgaacttcgaaaaggtaaaaaaaaacaatgataatcatgttcgattttaaaatctcaatgacaataaagaagggactcagcgggcgagccgtagagaagtacaatggaaaagccgctgatggtttggcggga

SEQ ID NO: 11775 - DNA, 698 bp, Oryza sativa
ttcctgcagcccgtaccggaagctcgtcaatagcaggttgcagagagttaattggctctgaacagtaaacagtgttctgctgtagcattcatttctgatctctctcttgcttgcagtttcgctgatctgcagaacccacagatggacatggacgggaaggcctgcgctgccgtcggtcagagtgtgctgatggcgatctatgacacgttatttagccaggttggcgtgccattcctgatggatttttgtgtaaaaaatatgatttttttgcatatattttgacacgttaaacttccttcgctgcagcttgacgtaacatcatctcagcttcttgttacggatcgtgattttatggatccaagttttgggaaccagctccgcgagactgttaattctctgttagatctcaaggttataccagtatttaatgagaatgacgccatcagtaccaggaggcaaccatacgaggtgtgtttcctaatgtgatttgtgtgcactgggagcttcactgatatatacgtattccaaattccattaacaacaaacactaaccttttacactttactgattgtaatgatcaaccgtgtgtaggattcatctggcatattctgggataacgatagtttggccagactgttagcgcaagaacttaaagctgatctccttatcatgctcagtgatgtggaggggctctata

SEQ ID NO: 11776 - DNA, 700 bp, Oryza sativa
ctgcaccccttaagaggagtgattcgtactagttttgcctatgttaagaaattattattattggggaaaataattcagttgaaggtaactagtaactatcaccatctgattgtattactagcataattggtttttcttgttgctgcagccaaggcagaagggtatggtgcaaggtgcacaatttaatactgccaatgcagctcaagcattacaaggtatgcagtccatgggagtcatgggtggtatgagaggaaatggaactattccatataatcagcaacgttttgcccatgcacaagcacaattgaggccgcagcagacatcacagcaaggcacactgtctccacaggtacttgacttccgtaagcaaaagaattatctttggttatcaagcacccacctccttagtccttaccttaccatatgtatctttcatggccttattgttattatatgtgaatgcatgccgcagcaaatagccaaggtcctttttaaagaacatatattaacaggtactgatcaaagaagctaatattaatctcttggcagctttctgatgtatctttacacacagttactaaaattatgcttttacccactaaaactgcatgagagttaagcatttgtgtgtccttttccctttttcttttaagattaatcagaactatgcttattaactttgcaccatggatattctatt

SEQ ID NO: 11777 - DNA, 543 bp, Oryza sativa
cggcgtgagcaatttctcctccaagaagcttggcgatctgctctgcgtcgcccgcgtccctccggccgttgatcaggtcgagtgccacccgggctggcagcaggcgaagctcagagcgttctgccacaccagtggcgttcatctctctgtaagtcctgcatgtttctgagctcatcgatcacttgatatgtagtagtagcattgtgctgtggttcactgctcacatgattcttgcaggcgtatgctccattgggcaggatgaagggcatcgccgttgattcggtgttgccatcggtagccgagatgctaggaagaactccggctcaggttgctctgcgctggggtcttcagcagggtcagagtgtgcttcccaagagcgtcagtgaggcgaggttgaaggagaacatggatctgtttggttggtctattcctgagcaactgtgtgccaagctctctgaaatcgaacaggcaagtgcatccaacctttcagctgtctcaagtgcagaaaacagattcacttctgtcttcatatcttatgcaatt

SEQ ID NO: 11778 - DNA, 566 bp, Oryza sativa
ggcccctcctcttctcctcactcccgccgcacgccaagctcctcaccctcccctccccccttccaaccgccacacccctccggcgcggcctctgccacttcgtcgacctcgactccttctcgggagcgttgctcgtcgcgtcgtccccgcccttcttggcgccctccaacctgcttgctgtcctctgcaccccgtctccgccgtcctccgcaccgccctctgacctcgacggcgtcctcaccaagggcagcggctcgccgcgctatcccctcgccatgggcagaggaaatgggacccactacccgcgcccagctgctcccccactacttgtgcccgccggcccccactcacacgcagctgctcccttccctccctccccccaaccggccgtggagagaagaggagagaggaagagaggtggagaggagaggggaagaagaggctaacatgcggggcccacgctgggtgagctgccacatcggacaaaacctgagtcaaaaccacagagggatctagtttgcactgggtttcgtaagttaggggacacgttgtatctggttttacgg

SEQ ID NO: 11779 - DNA, 675 bp, Oryza sativa
cttaaggtacccatcccctgcgcgcccatacgcaggtgagtttcggatccgggtgccaaatcaaaattcttgagacgacgagagaagaaggtaaaactagatcagctcaccgatggctcgagacatggcgaggacgccgagcacccgggcgccgtcccagtaaatgacgcggccgcccgccgcctcgattcgttccagctcgtcgggccgatcgggctgaaccgttccgaggtagcaagtagcaaccatgtcaggcacacgctcatggacaagaaactaacgattttttgcagatggacgggaaaggctcagccggccctgtgatgcgagcatatacgtactttgtggtcaacggatagtgcgacggggacgccggcacgggagatgacggcgcgggagtcgccggcgttggcgacgacgacctgtgttgggctaacgacggcgacgacggcggtggaacccgcgtggtcgcgacgcgaaggcgtctgctgctcgcacgggcaggcgggctcgtcgtcgctgcgggtggacgcccggttaccgacctccccatccatccgcgcgaagctcttctccatcacatccctccaaggcgccacttcgccggaggcccccttgttgtgctcctcggcgacaatctcgtgcatcctgtcctggcacgtcgtcgcaacctaa
